United States Patent Application Publication US 2015/0240253 A1 - sequence listing, part 41

SEQ ID NO: 192541 - DNA, 1961 bp, Zea Mays
ggaggaactacgacgacatcaacgagtacttctggcgccgtgacgtgttcgaccgcctcggctggcccatggagcagtcacgccagttcttccgcaccccgccggaccgcagccgcgtacgcaagacgggcttcgtcgaggtccgctcgttctggaacatttataggagcttcgacaggctgtgggtcatgctgcttctctacctgcaagctgcagcaatcgtggcgtgggagggcgccaagtggccgtgggatgatctgctctcttcccgtggctcagagtccaaggacacacaggtgcgcgtgctcaccgttttcatcacctgggctgcgctccggttcctccagtctctgctggacatcggcacacagttccgccgcgcatttagggatggccgaatgcttgctgtgcgcatggtgctcaaggccgttgttgcagccgcttgggttgttgcgttcgctgtcctatacatgagggtctggaaccagaggacagacaatgggcagtggtcgtcagcagctgattcacggatgaggagcttcctctatgcagctgcagcgtttgttatccctgaggtccttgccatcgtgctcttcattgtgccttgggtgcgaaacgcattggagaagacaaattggaagatctgttacgccctgacctggtggttccagagccgcagctttgttggccgaggactacgtgagggcacatttgacaatgtcaagtactccatcttttgggtgcttttgctcgccgtgaagtttgccttcagctattttctccaaatcaggccacttgtaaaacccacaaaagagatatacaatctgaatggaatccagtacacttggcatgagttctttggccaaagcaatcgttttgcggtgtttgtgctctggttaccagtggtgttgatctacctcatggatatccagatttggtatgctatattttcttctctgtcgggtgcatttgtggggctttttgcacatttgggagagatcagggacatgaaacagctgcgacttaggttccagttctttgcaagtgccatgtcattcaacatcatgccagaggagcagcaggtgaatgagagcttcttgcccagccgttttcgcaatttctggcagcgattacagctaaggtatggtttcagcagatcctttcggaagattgagtcaaatcaggtggaggcacggcggtttgcacttgtttggaatgagataataagcaagttccgggaggaagacattgttagtgatcgtgaggttgagcttcttgagctgccacctgagctgtggaatgtgcgtgtaatccgttggccttgtttcttgctctgtaatgagctgtcacttgcacttggtcaggcaaaagaagttacaggatctgatcgtaggctatggaggaagatatgtaagaatgattatcgtcgttgtgcagtgattgaggtctatgatagtgcaaaacacatgctgcttgagatcataaaggaggggactgaggagcatggtattgttacacaactgttcagcgattttgatggatccatgaagatggagaagttcactgtggagtataagatgactgagctgcacaatatccatacaaggcttgtagctctattggtcctcatcctcaaacccaccaaagatgttaccaagatagttaatgctttgcagactctctatgatgttgttgttcgtgatttccaagctgagaagaggagcatggaacaactgagaagtgaaggtcttgcacagtcaaggcccaccaggcttctctttgtggatgcagttgtgcttcctgaagaggacaatgctaccttctataagcaagtgaggcgcatgcacaccatcctgacctccagagactctatgattaatgtcccacagaaccttgaagctcgtcggaggattgcctttttcagcaattcattgtttatgaacataccaagggcaacccag

SEQ ID NO: 192542 - DNA, 570 bp, Zea Mays
cgtcacgtcgccgttggccacggttgctgtgggagatagatatcccctgggtcctcataacatggatatattcaatggttgtctggcgggctctcgaaagaatcgtcgaacaagcatactattgggccacccccagacagaacagatttctccaaagaaggtgacactcggagctagaggcaatcccgaagaatgtggcgcaaggcagttatctgtgcatatccgacacaaaaaggattgctgataatccgagggcatactttgcgcacaacataatggcgagatacatggaggataactcggacgaccgaactccacggtagtcggcacacaatagaagcggaagtagatagactcatatatgattagataagctgttacgatctgtaaagggacgtcttcctagctggttatataaggccgagggggtacccctacaaaactctctcgacgttactctcaccgcaaccacaccaccattagactggtaggagatctcatccatcaccacccgcaaatcatatgtaatctgtgcaccaccagcaaactcaatactcagcaccaaacatg

SEQ ID NO: 192543 - DNA, 302 bp, Zea Mays
cgggagaatagccaaatgggcctgcgagctgggatctcacgacattgaatttcgacctcgcactgccatcaaaactaaagcacaggttgactttgtatcggagtcgaccgaacaacaagtaccagataacccagaaactgcagaagtatggcgaatgtattttgatggctcattaaagctgcagggagcgggcacagggatcctctttactgcacctggaggcgaacacctcagatatgccctacagttgttatttccagcgtctaacaatgcagcagaatatgaagctctgactcacggac

SEQ ID NO: 192544 - DNA, 743 bp, Zea Mays
atgagacgcagtcctcccgcgttttcgagaaaaaaaatcgtgtggtcgttgggtaccctgtagttgatgcggaatctctaggaatgtctggtttcttgacgagcagaattggtgccgagaatgccgacgtgctgttctaatgacactatggacgagcatgtcggcacactgccttttgagctcatctttctgtaattgccgatagtggtatgggtgcacgacaatgggggcggttctaggcatgaggtgaatcttgtggtcgcagctatgtggtgggggtagccctgatggagtggcgaataccacgtcgaatgcctagaggaggttgtccagcatgggttgttctgtcgtggccacgagtgcggttggcataatgttgttgcctagtggtgcatagatgtcacgccatccgttgtgcctgccagaacgaaagggacaagctggcaaggtcccataggattggcccaaggatctgaaggattgccactccatggacgacatcgtagccttccagcggaatggcatagcagttggcagtgaaggtctctgtgccgatgaggagagagagtcccgggtgaatccctgacatcccaccgcgtctctgttggccactctgatgttgattgctgggatggtggcgaggtgcaagataagtcgagcggcaaggatctggtggatgaaattatgtgtggaactcatgtccagtagtgcgatgagctgatggtgattgatgtcatcatttg

SEQ ID NO: 192545 - DNA, 290 bp, Zea Mays
gtggatgcgagctgagcgagcgagcccctgcactgcactgcactgtacatcatgcatgtatatatgcgtgtgtcccttctctgcgtctaattatacaattgcttacggagatcttgcaatgtacagtacatactacgtactgcacatgcccagtattactttaattaatcttatatgacacacgcctgttggccggcggtcaagctccgagcaggtgaaggcgacgaccacacgaccccaagcccgctggtgatcagctaggcgagagaggcgacccaacaactttcacc

SEQ ID NO: 192546 - DNA, 308 bp, Zea Mays
gtgggatgcattggagcccctcgcaacgtcacgggcaacggagattggatctacaagcacgtagctaggacgacggctgttatggataaaggagtgtactatttattatttagtacgatatctaccctgtgtctcgataggaaatcgtccgtgatccttatctgccggccgcatcgtcatgcatgatcatcttgccctttttgcgtgttggaaacgccgaaacgtacgtacgctatatggctgtgtacactgtctgtgtgtaagcgccttttctgccgtacgtacttgtagaaacaaacttggccggg

SEQ ID NO: 192547 - DNA, 783 bp, Zea Mays
caccaatatgaggagcgcagattgcttgttgctcagtcgtgcggtgaacttgccgtttatgtccgtccagagatacgagattccctcattttatccattgtgcaacaacttgtcgaagatgctgcaacagttgtaagggaagctgcaacacataacctggcattgcttcttcctatgtttccaaatctggacaaatattataaggtcagcctcacttatgcttagaatcagtgattggtaaaagatttcacagaattagctacttttaggctttgtggcaagattggacattctgtttagtttagaattgagtgcttgcagattaccaataaatgaagatgatattgtcatttataagttccttgactcttccttctttggggtaggttgaggagctaatgttccaattggtctgtgacccgtctggggcggttgtggaagttgcactcaaggaacttgttcctgctgtagtaagatggggagataaattggatcagatatcaagagtactattggctcatatcctggcatctgctcaggtaagcttgctcatgaatattgtgaactccttattttcttatagccatgtgtcctaaacctgttgtgttttcagcgatgtccacctatttcaggtgttgaaggtacaatagactctcatcttcgtgttttaggagaacaagagcgctggaatattggtgtccttcttcggatgttgactgagttgcttccatttattcatcagaaagctatacaaacttgcccctttgcatcagctgatccaac

SEQ ID NO: 192548 - DNA, 347 bp, Zea Mays
tgtctttgccgattgggacgagcattggtgagggggatctgcggaatctttttgagggtgaggagttgagaataatgttgttcaattatagggaggcgggcatcatcccgaaggttgagccgatgtagtatgtgttgcccttgctgagtgtatgtaactgcaacttgtattgtaatgtggcctgttgaccttctttgagtgagacactgcgtgtcgcgtacttgttgtgctaatccggctgcacccttaggcgacttttgcgtagagtgtcttttttgtaaaaatacttcgattgacgcacttgttgtgcttattcggctgcaccctttggtgacttttgcgcggag

SEQ ID NO: 192549 - DNA, 1094 bp, Zea Mays
attgatcctatgaaaaagcgggctgcaagatctggtcagggtgtcccacttggtggtattgggtatatcttcttctctttgcgtaatatgtgtttcctgtaaatattgagtgtatattcatcaaacttttatgttaaaaggtctaccaggaaacttatgttcaccagatttaccgtgctcttactgcttgatactgtaaagagcttgcgaattccctatgcatcactttgttgctaaacatgtctgcatatcatttggtagttcaagtgtcatgaagaaagaataagcatattatatttactttattgtttttaaatgaagctacctacattaattctcacctgccatattaaacactacattggtaaatcaaggttgctctcagcaactcagccatctgttttattatttcccctttcggtagtggtgccactgtgccaggggtatcaccacactgaaatatgcaggagtgtgtgccctactgggcagaaggttgatataaataacagtttcaagtagtgcacacactaaaaatgttttcctcttgttcgatgaagcttgttgccatatttatgtattttcctgattgttggaaatgtagtgcaggaagtattggaagaagctacaaaggcgatttccaacgttggcaattgtttccaggatcttgtgaagataatgctgtattggcaaatcaattttctgtaagtttctagttttctccattatttatttctggctgataattttcttttgtgtctgacgattcttggaatttgagatactcttttctaatgcaatctcacttgtactggcttaatgtcctgaggtgctgatgcacccttgtcagacttcgagtgtataagaaattgaaagacagtactttaattaatgaactatggtgtattgtgatgcttctcaagctcttatctgctggattaacacatgcattagctgatgagaactgcgataagaattttaactacaatgtttactgtttgtttgatatttaagtgttgtccatttaggccttcatttcccgccaagatggtaaaaaatattccacagtgttgcatcctgggaaaccagatttgccg

SEQ ID NO: 192550 - DNA, 364 bp, Zea Mays
caccaagtggccaaccggttggaaaaatgagtggttctatgttaaggccgatgaaaagaagagggagaagctaaagacgctagtactgagcccgctgagcttaagcttcgggttgactaggcctctatgccgcatgatgccggggtcaccgtgccaagaagatgtggtagaattcagggtggtagccgagcagatcagcaccaaagatctagtccaagaatatttggcctataaggtgttcccgacgctgagtgaatggcatatgccgaagctaaaggggacaaaggaaaagaatgaacttgtgcgactgccttatcggttcaaatttgagaagcaattcaaagggccatgccaagaatggtta

SEQ ID NO: 192551 - DNA, 305 bp, Zea Mays
ggcttgatagagctcaagagacagtggtggtggtgagctacatgcagccatcatttgtgtcaacgaagtccaatgtactaaaggtgaccttggtcctaaggagtaaggggctataagaagtaactagaggcataaaaaacaaaatctttatgcttggaggggtcatggaagtgctgattggcgacgtgctcaatccactgatagtgcttctttttgtgcgacttgatggagccgaaggattgtttcttgtcctccttgtgcttgtcgccgagaatattgacttccttcgatgaagtcttggcttc

SEQ ID NO: 192552 - DNA, 344 bp, Zea Mays
cctttggaagctaaaggtgataagcggctaccgcattagcgcttagcatactgctgagccccagagaatacactcgcgaacaaccacggggaaggcgtcgctgtctcacaagagggcatccaccgcctccgtttaagttgcccttgcgacgtgtagaagtagaggcggcagggtcagtcgtacaccacctggaacagcatggtgtgaaatgccatgtggaacaaagtattatagcaatacttcgcccaagaaaactagtcgacctaggcgcgcagacgttctcacatggcataacggaggtacatggcgacgatatgggccaatgcaagtcaagatgcggtggc

SEQ ID NO: 192553 - DNA, 1488 bp, Zea Mays
cgcatgtgtggacaactctggcgaggttgcaagatatgctggttagcctggagatccgtccggagctgcaagaatggatgggggatatcaagcaggtcgcgtacgatgttgaggatctggtcgatgaattggaagaccacaatagcatggaatctcagatgagcggctgcgttgcagttggagaggtttggttcatagatccttaaaattattgccgatgcaagtccttcttccattattttagaattgatatttatataaaatttttagtgcgaattacttgagcttgtttgattgtcgagcccctccaatccctccattttccttgctgccacaagcccttatcgtacctccctccttccgtcgagccgcacaacagtggtctaataaaattagtttgagaagatatgagttatgcaaatatttatgacaaaagagtagtatctgcacatgaatatcgttttcacgtaatcgctatgtctaacatttcatcaaataatttatatgctatcgtaaccaacggacattgtaatagtaaatactacagcctaaggttggcaagttttaaccttttcgggccctacattttgaacctagttttatgattgaatatccgttaaaaacactgactattgcaaatgcgtgcaaagttggtgtagatgttttaaagttttcttaaaatttattactgacacataagtcgatgcataatgcaaaaatgaatctcaaggggttatctgtcttcctcatctccagaacctttcttttccctctgtcctgcctctcaataaactccgtggagctccagcgggtaaggggacttgctcctgcagccccgagtcggatctgcccctgctgatccgaagggccaccttctctacctacacaaaataatatcaaaagaacacttaattcgaaaagtatgagaaaactatctttttttctatctatttctgtagttaattactaaacctttgtctaaacgaggattaaccttcaagatatgatctgaatgtaaactaatctaggaggttgtggacctaatccgctctgcccatgaaatcctaaatgtgtagtaaacatgttaactattaaacttattgtgaaactatcattcaaatttgaatgtaggcagtatttttttcatacttcatttagcagttctttgtgaaagatatgctcatcatgacacataactagaagctgatcgtctttgtggtcattttaaataaaattacaggaaacaagatggtgctgttcatgttcgtttctcatgcatagtacaagagcggacagaatgaagacaatcaaaagaaggttggactttttagtaaaagattctgtcatcttcagtttgatgcagtacccttttcctgatgttgagagatttgataatgaagcatttgatagagctgcagtcgttggaagagataatgacaaagcaaagataaaggacatgatcttgcaaagtaatgcacaaaagttctc

SEQ ID NO: 192554 - DNA, 630 bp, Zea Mays
gctattggggatgctattaaacaggtctgtttaaattttctggcggcacatatgatctttctgcagtccattagtctatctccagcatattcaaaccccactatgtgaacaatgcagtttatagtgcaaaacagtacacaacaatgctttgggtgaccatatgggtgaacttcttgaactgttggacacggtcttattaacaggccttcattttacaatgtagtttcttttaaattctttcttattctaggagactttttttctgagtgttgatttatactatcacaatcataatctttgcctgtatttattttcattttgtaataggtccacttttaatgtattttctgatttgtttgtgaaagtaatgctacatagatccttttggtttcctagtaacaccttttgttttcgttctgcctgatatttgcaggacgatagccactcgcaacgtgttttggaggatttattatctgtcttagtcccatgttggttatcaaggaccacaagcatagaaaagcttcttcaggttctctatagttttcattgaagttcctttctgtttttatttcttgaacaacaatgcattaaaagggtttgcactgttgctgttgcagatattcattaaag

SEQ ID NO: 192555 - DNA, 547 bp, Zea Mays
tcaacgaagcgccaaaacgcaagcgcattacatccatgcacaagtctacaccaagaaactatctgcgcacagaccaactacaggcacagccagaccaacataataaatgcgccagaccaagcgtgcaacgcccctataaacatagccggatacgcgaaggcacagagcctcatcatacaaactatagtacacacttacaacgagggcatcacaccttacatcggttcaaccttcggaatgattctcatctccctatagttaaataacattatcctaagctcctcaccctcaaaaagacttcgcaactccccctcacccacactcgccccagccggcgaggacaacaattcctgcttgccagccctgcccacacgaagccgaccgccatccacctcactcactctacgcttcgccaccgcccttcgccgcctacgcccagcactcggaccaggcacaacttcagcatccgcaacacacggagaagcctccgtcgctgccacatccaaggccgcaaagtaatccaagtcctcatccgaagactcttccg

SEQ ID NO: 192556 - DNA, 422 bp, Zea Mays
ctaaaattgaggtacattattgcattcactccgtctggactctggagtcacatgactctgaagatgccccttacaggtagcatcaagcacccaaacagcaccctgtattgcaagtttcaactaggaacctcatccagcaccagcacgcccttgctctgaaatcgatttttgcacaactagaatctcacaatgtagctcagaagaagaccgcgctggatgcagaggtactcctgtttctgtagaagaaaatacaagcagaaacaacaggaggtacttgcaccgggtctcgtcgacaaacagcctatttgccagctgacagagacgccggcggcgagcggtaccagagagagaggcggagatgatggtagcttagcaacacctacaagatgcggtgacgtcgctggcgagcagaagcagagtcg

SEQ ID NO: 192557 - DNA, 306 bp, Zea Mays
gtacagtgactgaacaagatcactagttcagcccccctgtcaccggtgactgttgcaccgtgatttgcgccgtcgtcgtgattcgtgcgccgtgacttgcggataacggtgggcgggtaaagatcttggcgcctggatcgactcgggctcggtcacagctaagctccacatacccacttgctcgtcgatcggtcgagatagacctcgccgccgttggccgacttaccactgtgcgcacgtgctaaagcactgaaccacgtcgcagtgaatctagccatgcattcccggtgatccctggagagccgc

SEQ ID NO: 192558 - DNA, 405 bp, Zea Mays
gttctgcacaatagtctgcactgtatagttcacatggggtgctgatcaacaacagtatgatctgaacctatagcctaatttactcgcaatagaatgtagaccagcatcttatgccataaactagagcagcatactctgcagaacaaagcaaacgtcacggtgttatactgttactacagattcaccgaaccaaatccatgctccatcaaacatgaaacagttcctagcttccatttttttcagttttagcagctaaacagctcgatttgcaccacagcaaccacatccgcaataccactgaaatgaacccaaccaattctccacttcctggtgctcaattgcacaggaaatgccctaattcgcacccgaccatctgcaaaatccatccaattcacgacataaacc

SEQ ID NO: 192559 - DNA, 356 bp, Zea Mays
ccaggcttctcaacaaagccttttcctacctcggtgtcgacggagccaagaagctgaaagagctcgagactaaagttttacagctggagctgttgatggaagcggttgaggagagtcctcgcagaaaccagctggagagattgtttcaggatctcaggtctgccttctacgaggctgaagacatcctggacgatgtcgagtactgcagtctggaaaggcaggccttatctttatctcaccccggtgacaagttggattcccagagcatgccttctagtggcaagaactgggtgagcaagatccactctgccctgcccaagatgttataaataaatgcgacacaaataggatcaatc

SEQ ID NO: 192560 - DNA, 312 bp, Zea Mays
agtctgcccatggtcacgaccgagcccgtttcgagattcgaagacgtgcgcaccatagttgtaggagtgcctcctgtgggattcgcggggagcaggtagccgaggccaggcttgagcgaggcgaagtttgtctcgagaacggattctacttcgggtgaggcagagttttgcacgcgagggctagcctataccctttcgtattgtatgtcccatcaggagttgggcgacgacgtgcgagaatagtggtcgtatgcgtaatcatagttggtgaagcttgacaggaccacagtcttgttgctcctgtacacctac

SEQ ID NO: 192561 - DNA, 422 bp, Zea Mays
gaggcgaattcacttgctccgtccgagcgtccctagctgccaaatgcgatgacattgctgtgtgggggaattttctaggaactcactagcagatgagtggaagcagctgcaccgaaattcctaggggcgtggatgagcttccttctgttgtccattcttccatcccctacgatgtcaactgtgaggaggaagaatgttggttagagatctatgactggaaatgatggagagcccattgttgttgcatcgtcagtctgtggtcagagaggggaagattttggcatggtggatcatcatcgtctccaactgcagctttagcaattaggaggaaaactgaaagtagtataactatctgtacttagttatatacagggattgagggagatcgtgccttaagtgctctagatcaaattgatgttgcc

SEQ ID NO: 192562 - DNA, 573 bp, Zea Mays
ggcgtggtaccgctaggtttccgggtgaaggcatcctctcgcgagtcgccgtcacagaaggcggggaacgtgctggaggccgacctgcgctcccactgggccaccgccaccaacaccaaggaatggatcctccttgagctccaggttcccgtttccatatgcttctagagcttattcttctccctcttctcccattgtagttggggatcgaattcgaattgagtagtcactccccagctgcttgcaggaaccgtgcctcctctcccacatccgcatctacaacaaatccgtcctcgagtgggagctcactgccggactgcgatacaagcccgatgcattcgtcaagttgcgcccccgctgcgaggcccccaagcgcgacgtcgtctaccccgccaaccacaccccttgccgctaccttcgcatttcctgcctgcgcggcaaccccatcgccatcttcttcatccaactctttggcatccccgtgcctggcctcgaacctgagctccagccactgctcagctatttactcccgcaaatcacatcctccaaacaacccctttctcacaacatgca

SEQ ID NO: 192563 - DNA, 354 bp, Zea Mays
ccgaggtagatgacgacgatgaggaggaggccatggtggaacgttaccgagcacgccgcagtttcggtgcctccaggaagcacttagcctcttggagcacgcttacctcggtacatgatgaaccatacagcaatcaccacaggaaggaagtaaagcttaggcattactatgaggaagacgaggaggaggaagaggagaaagaagatatttttcactgtaccgaagaattggtgtatggggacattgtgtgggcaaagcttggcaaacgccagccaatgtggccaggagtggtggtcgacccaactcagcaggccgctgccgatgcaatgccaccacaacctcgcggtgtcgctg

SEQ ID NO: 192564 - DNA, 486 bp, Zea Mays
ctaatcagtaattgcccagtccaataaatagttgtaatattttgtgtttcacttctctgaccattgtttaaaattgttgggggcgcaagggatgacatatcaccctggaacaccgatacacgattttcttgcagaaacccatacaatactttcataacagatggttaaactccttgcatcttttttcccttttaggttggagggatccgttggacatggcatggcctgatgtattggacacacttttcgtggatgcgtgtttcaaagaggttgagaacggcatctatgtaatagaattcactcaccttttttggcagaatgttacaaaatccattaataacacacgaatatgactattccacttaaggatctgcaaaataggtttaaatatttcaaagatttgtggggacggtacaataagcttacgcgacagttgtcaagtggcgcaggcccgataaagctctcacttgaagaggtatctcacct

SEQ ID NO: 192565 - DNA, 432 bp, Zea Mays
gcgaaggggtatcttctaatctgagccctccgatcaggaatctagggttcaaaatagatcaagtgtcatgaaccggtattgaacccgagccgcaggatcttgatccaaccgtccagattcaataatgcttgacctaacctaaaccgtaggatccccgatcgaacggtccagcacactttccaccctaccagcgcacgggatctaatctaagccgtccgagggggcatcaacggtcatgactttatctccctcccccggctgaactccggtgacgacgcagagtgccacagcgagccgccatggccggaatacccacaacgctccatggttccaaccaatctgaccgaactggtatgcggtactcaatcgcagtcgtccattcaggatcgaaggcctccgtttcaccttcatcctcctgacagcgcccagcga

SEQ ID NO: 192566 - DNA, 347 bp, Zea Mays
ctgcccccgcgatgcccccacacccctatcccaccactgccaacgccaccaagcgcaatgcctgcccctagagactacttcgtccctcgcgcccttctcccctatgtctcacagttgcagcccaccacaaaccctaaccctagatggatgtcgtcacctcgatagtcatggcacacttcaccttcttctcaccgaccccaccgtcacatggtatctcggtgtcgcgcgcgccccaaactcccccaccactgcatctgctgctcacggtggtagaggcgtgtttcgtggtggagtgtttcaccttctcactgagcccgacgtcgcatgacatctcggtgtcgcgtgtg

SEQ ID NO: 192567 - DNA, 657 bp, Zea Mays
agggtacatcgaaaacccaacactcgagcacacactccctaactgcctagcacaaagacagatgcacctgttacagatacaccaagaggaacgaccaacacatcaacagcccaactctagagcctgggcgactaggtgggagacaccctttgcccctgctaaacaccaaagatcaagctcctctaagacctggttcacaaggcctgcaaggctaggcgaaactccatcgaacacatctattgcgaagcttccaaagagaccaagcccctagaataaccacatagttcagtacttgtttgatgagaccagagactacctcatttaaatgctgccaccaatcaccaaaggaaacaactctaggttcagggtagagagactggaggccaaacttctgaagaagctggaaccagaactgtcgggagaagacacaggaagcaagcaggtgatcaatggtctcaagttcctggtcacaaaggaggcatctaggatgatgttgcagccctctccgatcaagccggtcggccgtccaacatctatcctgagcaaccaaccacatgaagaagcggcaattacccggtgcccaggatttctaaatgcgctcccaagggtcaaagaggatccctccctggaagaaaccctctttttttttgaacaaac

SEQ ID NO: 192568 - DNA, 375 bp, Zea Mays
gtggtgtcagtgctatggaagctctaggtattttcttgtgggcatgtgggggtccacaatcatttaggcagataaggaataagtttggtcactccttggaaactattagtcgcaagtatagtgaagtacttaatgcactatataagatgtcatctgacgtaatcaagcccaaagacccaaatttcatagagattcatcctcgtttgcgagaggggagattttggccccacttcaaggattgcataggagcaattgatggtagtcactttccagcgtctgtcccggcctcggagcaagccaaatatattggtcggcacggttacgcatcacagaatgtaatggccgtttgtgacttcgatatgaggttcacatttg

SEQ ID NO: 192569 - DNA, 287 bp, Zea Mays
ccctcggcgagttggcccggctatcttttcggacgacggtggaagactaccaagatcgcttcatggcgctgctctgccatgtggctcccctagcaccagaacagcaggtgcagctgtttactgcgggactccctgacctgattcgcatcgatgtggagctgctcaatccgccagacctcaatacggcactcgcaacagcacgggcatacgagcgccgatcacagagcttgccatggggtcacatgccagcaggacagaggcagccacggtccacatctcgccctgca

SEQ ID NO: 192570 - DNA, 2241 bp, Zea Mays
gcagttcataacaattactcttacagcgttcttgtccatagcggtggtgttcatggtggacattattatgctttcatacgacctaccctttctgatcaatggtaggcttgcttcattctagaaacatcatgcacatacttttttttatgactagttcatttgttcacttcaagtatttactggagcgaaaaattcccaggttcaagtttgatgatgagcgtgtgacaaaagaagatgcaaagagggcactggaagaacaatatggtggtgaggaggaggtatgtttcaatttctaaggctacagttattgtctttggtatcttataaacactgaacttaccaattccattttgcagctacctcagacaaatcctggcttgaacaacactcccttcaagtttactaaatattcaaatgcatacatgcttgtgtacattcgtgaaagcgacaaggacaaaattatttgtaatgtggatgagaaagatatagcagagcatcttcgggtaagctgtcccctaagatttgagtttcatgtgatcttcttttgtcggttctaatatttaaatctactctcagattagattggaaaaggaccgtgaagagaaggaacgtcggaagaaggaaaaagctgaggcacacctctataccataatcaaggtgtcttagtcaaccttctgtgcgtagaacatccttttgtttttgttttgttatcttatgctctgttatataggttgcaagggatgatgacttaaaaactcagatagggaaagacatatattttgatcttgttgaccatgataaagtcccaagcttccgtatccaaaagcagatggcctttgctcaattcaaggtaattacatgatgtgagggtgtatcttagcatgtcctgtcaaaggaatatgatatatcttcaatctggtgtctgttactcaaggactcaagtatgtttactagtgtcacattttgctgttgaaacttgaaagcacatttgagtttatctcaggcagaccaactgctgttcatagtttactaaaagaatttaagtgccaataagatgtaaatggtggtgcaataatagattacttaagaaatgtgttttgttgtctcttttcacaccttaaggaatcatttgatggttgatctaataatattttttcatttcttataggatatagggtagaatttcgtagttggcatactgattattcatccatgatgtgctttacaggaggaggtagcaaaagagtttggtattcccacacagttccaacgattttggctgtgggccaagcgacaaaaccatacttaccgacctaacaggccattgtgtcctcaagacgaagcgcatactgtaagatgattttgttacacattgagttggacaaaacacaaaaggatgccttggcagtttttaggccattttttaattcttggaaagctgcatgatgcacactagtttttacaaatgtgtatttgaatcatcattttctctaagtttgtcttcatagaagttgcttcttttggatgttaaggtcctgattttcttagtttgttttttacttgttgagcaattgtatcgtgcgtgcagctttatttcttatatcttgtttagtcagttactatggttgaaacacctcactcaagtagtgtgctactatactacagggagggaagcatgcagaactttttttttcagtcagctaatttgcaagctgatttcatagctggttttgtacttgttgatcaatttcatcgtgcatgtagctctgtttcctgtatcttcttgagcagttattatggttgaaacacctcaatcgagtagttttctactatactgctgtggtgggtaaggcatgtagaacttttttgagtcagctaagttgcattatagcttgtccaacttcctaacacccatcagtatatgaattagttcaaccatttaagatccatattgtaaaatctttactaccatgactaacattaataattcacatcacaatgagatactttggtgctgttctagccattgcaaaatccgtatgctttttcttgaactcaattaactgtgggggtttattgttgagctgctacttctatgccttctcttgtctgtaaaggaataggccagttctaaaggagagcattttatataggttggacagctaaaggaattggtgaacaaggcccacaacgctgaattgaaattgttcttggaagttgaacttggactggtaataactt

SEQ ID NO: 192571 - DNA, 1807 bp, Zea Mays
ggccttcctcgccgcccccatggccttgtcttgtctccagcagaggttagcgaccagagaccagccagagccagcagcctggaccaaggcaagtagcgcactaacatttctctgttcttggcctgtgtccctgatcaactcagattggccggacgcttgggacgctgccgcctttttttttgggtctgtaagtatgatctttgcttcatcatcagttcagcactgcatgccttcaattctgccgtctccattgtactttagctctgtgcatttctcgattcagtcagagtagcatttgctaaaccgtaagtttgggtgtcctgtcaaatgttctgcagttagtttccatggctagcacatagttttgggactgatttcacaagttgaccccccaccccaccaaaaaaaaaaacaacttgttgatacgttggtgttcctcggtactcgacatgttaactggatgagtgacaaaagtgttacaaattaatacgcacagcacaaccacctgcacttcgtatagtggagtgtcatttcccatttttttctttcttctttaccggttcattgaatgtggacgtgtggtcacatcatcctagagactccactagacagcgaagcttttcatgctggagactcctccgataataagtacgcttgttttgatcctgaatatgacagccagtcatccgtttgccgctggatgagtttattgccgatttgaagtatggacacattcaaggccttaaccttatgttctgtaacatctaactgaggggccgagaaaaggcgacgtgtatctgctaaaatatctgaatacttactgcgtgagtctctctgatggttaccagcaaggaatttgatcgactcagtcaaattatcttaagtttcactaactttatagaaaagtgtaacgacgtctatgtatattctacgatttatttaatgatactaaattgatgtcataaaccttggtggctagaaatccggtcaaagtttcttttttaaaaaaaattaaggaaactctagggatcaatttattcaggaacagaagcaaaccatgaaaagaatatctaactggttatgtttttattacctggtccccatggtcactgagtggtctgctttcagtagaatgaatacttttgatcttttcacacttcgatccctttcaatgaccgtcccggccccgggcacaagtgaactgcacaggtcatttcatttgtttcttcaatgttaaacactctgtgctttcgtaaaatgtcaacgtaattatttgatgtcatcagatctagtatcccagtgcacttatgtgaggatcccctgttttttcaggtaacggtgctaagagtgtgatggtgtattttaaaatgcatttctggttagtccttgtgctctgcagtttccgagcatcaaaatccctacctctggatagagatatacttttgggcatcagaggctatctgaaagatccacagaattacctacacaactgggatgaatcccactcaccgtgccaattctacggtgttacatgtgaccacaattctggcgatgtcatcgggatatcactctcaaatatctcgctgtcaggcactatatcatcttcattttctcttcttggacaattacgcactctggagcttggggcaaactccatctcaggaactgttcctgctgcgctagccgactgcacaaatctgcaggtacttaatctgtcaatgaacagtttaactggtgaattgcctgatctttcagcattggtcaacctacgagttctggacttgtcgaccaatagtttcaatggggc

SEQ ID NO: 192572 - DNA, 981 bp, Zea Mays
taactgttaactcagagaacgaggaaaccaggaggggctttacatctgctgttatgttgccaaatgatcaaggattgctatgtgttactgctgatcagcagtttttgttctattgtcccaaaagaactgatgatggggactttgaactgtctctatatagacgactaataggttataatgatgagattcttgacttgaagtttatcggggaggaggaacaataccttgccgtggctaccaacttggagcaggtgagctattcataaatgatgtctgcacagttcttgttggttaatgcacttgaaacttatcaaaccgttaccggcatattcaggtccgtgtttacgatgttgcgtcgatgtcatgttcttatgtactcgctggccacactgaaatagttgtttgcattgacacctgtgtctctgcttccgggaagacacttgtcgtaactgggagcaaggatcatactgtaagttgtgatgtctggacctgaaaactatgttgacttaccataatgtttttgtttgtggtttcttttgataatcctcggtacctcactgctgtcgagtgcattcttgtgctacttcttctatttttgagtctgaccttttgtacacaggtaaggttatgggatgccgaaagaaaaggctgtattggcattggcaaaggccatctgggagctgttggttctgttgccttctcaaagaaaacaaataacttttttgttagtggcagcaggtttgctcttcagtttctctgtgatctttgtttgcctgaagtgacaccaaatttgatattctaaaatattactatctttttgttagtgatcgaaccatcaaggtatggacctgggacgatgcacttggtgatgctgaggatgaagtccctcttaaagcaaaggctgttgtagctgcacatgataaagatattaattctctggcaatttcacctaatgatggccttgtttgcagtggttctgag

SEQ ID NO: 192573 - DNA, 564 bp, Zea Mays
cgatgattccattggtgacattgtttgcggggaactgaaagctgatacggtccctcgcgacctcacagagtacagcagtgaatctgaccatcgcagggacagcagggaaagctccccaggttacacatgtggagccaactgtcctgtctcgccaagagatctcagcatccgtcttcacaaggtgatccaacacaggctcgaagaccgaatcaaggagctcgagtcagcaatcgtgcacggacagaagcagacgcaactgcagatgatggtgactgaccaaatggtctccgaccgaatacgctcgaacagcgagtcaggttcttcttcaggccagggaagtcccattttcatacaagaaaccagctcgctggcagaaccgtaccgtctaaacctatctggagacgcgctcgaagcttacgatgaagcttacgaagagttcatgaggatcgcggactccccttacaccacaagtccaaacgggaagccacaggcaaccgaagattgcttggcagaccgtggtctagtctggggaatggaggacagctctaggaagctgagagaagt

SEQ ID NO: 192574 - DNA, 973 bp, Zea Mays
agatgcgtccgtctactcgtaggcatcaacaggttgcatcttctccggaggataaaggtcaaaaaattcctgctaccagtaagtcccctctactgaggtggtcacggagaaactattctgaggccaatagtgcaaattcagtaaacatcaaattggccaaagactcgagcacagctcagccattggcacaccataattctcattctgaagatttggagaaacaaccagcagttaaagaaccaattaaacggtcaacacgtaaatctattgctttggctgcacttgagaaagagaaggatgtaattgaaggaaagaaccctgaagcacatgttaggcgatcaacgaggaaatcagttgtgcaggttaaagataccaaaagtattgttgaagagactcaatatgctaacagtgaagatgtggcgaagcaaccagcaactaaaggacctgctagggggctgagacgtaaatctgttatcacagaattgcatgagaaagagaagagtctcattgccgaaaagaacatggaaacagatgaagcgatattaacgcggaagcctgtaatcccagttaaaaatattaaagctgttggtgaaggaattcaaattggtaagggcaaagatgtggataaacaatttgttgtgaagcaacctactaggcgatcatcgcgcaaatctgtgctgcctgatatgcttgagaataatagtggacttctagcacccaaaatgaatgctgagatgaatgttaggagatcaacacggaagtctgttcttcctgacatgcataatgagaagcaagatcaccataaaatggctagaaatgagaacttgcaaagtggtaaatatcaagatggtgagaagcaacagaaagtaaaagattctattaggcaatcaaggagatctatcgctacagtgctacttgagggacaaaataatgatgaaggaaaaaagttcaaaaatcctacgaggaggacaac

SEQ ID NO: 192575 - DNA, 678 bp, Zea Mays
aaagggaatgtgatgatgatgatggagatccaaagtaaggcagatgcggtgaaacagactgggagaccagtggaacaatatgctagtgaacttcagtacttgtggggagaactagatcactacgctcctctgcaaatgatttgtcctcaggatgcacaggttgtccacaagtgggtagaggacaggagagtgactcactttctaaagaatctggattcggagtttgagagcaggagagctgccttttgtcaccaagagagtcttcctaccatggatgaggcggtgtcagcaatgattaatgaggaaagcaggctccgggtaatgacagctagtgatcctgtgaaatcagcctacactgcaactgatgatagagactgttataattgtggtgagaagggacacttgagctataattgtcctcatcctcgtggcagtggtgaacgaggtggtggaactcgtggagccactcgtagtacctatggaagaggtcgtggaggctatggaagggggcgtggtggccgtgccaggggtagaggtcgtggtggccctcgtgttaatgttgcggtcactgaagacactccctcaatcaccctgactggggaacaagctaaacggtgggaagaatggcataaggaaaaagaatctgagtgtccaaccagcactcctcttggttctgtg

SEQ ID NO: 192576 - DNA, 398 bp, Zea Mays
gaaggaaagagtgcagtaaggggaatatcaaacccaaaaggtacgtaataccagctcgaagcggacacaatgcaaggccggtatgaaacttaaaaaaaatttatgatgatgcaaaagagacagttatatcagtgcgtattgatctgttgcacttggatcataatcatgaattttttaagaaggatacaaaaaagaatcaattacaatgcaacaagacgcataatcctgaatacatggatttcataagttcaatgcaggagagtcgaatcccgcaacattgtattatggattatgtttcagaaatgcacggtggtcctgagagtgtgcctgtaacagcacatgacatgtataacctgtaagtttataataggtttagattgtaattcagaattgaaatt

SEQ ID NO: 192577 - DNA, 485 bp, Zea Mays
gcttgacgatgtcagcacagaaaccaagaagatggctcgttttctgaaagggctaagaccagaactcaagaccatcctcgccagccaagatttcctcagcttctcgcacctctccaacaaagccatacaagtggaaagggcaaaagaagaagaaaaaggtcacctcaagaggaaattccaagttctccgagctcagcagcaagactgacaccagagagctcgatccttcgggcttccacctaagggaccaagcttcaatagaccagctagacccactccgtcatgtttcagccaacagagtcagagctcctttcaggcccctcggtcgcaagcaaccaaccgccagcaaatgcctgttggcactgcggagaccccagtcacttcaagaataactgccccaagttgaaggcacccggacctacctactccaactcggtgaatggccccaagaatacctcggcacctgcctccaaggcactcccctc

SEQ ID NO: 192578 - DNA, 662 bp, Zea Mays
tgatgtaccttttgatgtagtgagcaggactgttggtagagaggggcatgtagatgccgatgcatttaacctgaacaccatatgccatgaatctgggaaaaaggcagctgcaccttttgttgtagtgtgcacagctgatgcgagtgaggggtctgttgatgccaattcaatctgcctgaattcctttcctggtgttcctgcgagtgcagcagctgtttatccaatttcattggaagacatcaacacagacctcaacagtgtggcgattgaattttcgccagcaacaaatattcatgcagctattccaaatgtatcagttgagcagatacatgagcatgtccggggagctgagcactcggtggctcagctcacctctcccggtggtgcagatgggagtggggctcttgttgaaaatttctcactccaaggtaaaaatctatttaatggtgatgttatttttaatcacgacaatgttgatccattcctttatacttctagacatggagactttaatatcgtgcatacatgcatggaccatggtggtggtaccttcaatatgataacttctttgtcagaggtaccgagagttactttacaacatttatgcaaacaatttaagattaaagctaatataaaaaatgatgaaatggtacaggcgctca

SEQ ID NO: 192579 - DNA, 347 bp, Zea Mays
aaggctatcgatgttatgattcatcttctcgtcgcatgcgtatttctcgagatgtgagcttcaatgaaaatcgtcctttcttttacaattctttcactcattcttctttttattccacagagtctacctccttcatgagccttcctccaatttctgaaacttcatcagtatcaccacctactgtttctaccccagatgtccttattcccatcacaccaccttccacttccacaccatctcagtcttactcttgcaaaccacctgtctctcagacttacattcgtcgtcctcgctctactcccacggccagtcctgatgacgatcctgttgctgatacttgtactaac

SEQ ID NO: 192580 - DNA, 299 bp, Zea Mays
agaagacacagagcatccgagaaagaccaaaagtggagcaccatttgcatggagaaggtctgaagctatccacgaagttacttttgagtgggagcttgtcccttgtgtgggcattccctttcatggggctccaacaaggattaggggaaagcttgcatgctttttgatacctcggtaaaatactgatgcttcattggatgtgaaaggatcacgatgcccaagagagggtgaattgggcttgtctaaaattctaacaaaagattaaaccctaaacatgagcccaacttcacccaaactac

SEQ ID NO: 192581 - DNA, 624 bp, Zea Mays
gactgtggccaggtggacctggacgccgaggatttcatcaagaagttctacgaccagctgcgcacgcagcaggcccttgccaccgccacgccggactactgcggcgggtatgcgcgaccggtctctggcatcgcctagaattcaacccacgcatccacacgcgtatgcatatgtaatatatatgtacgtgtccatagagtatttgtttgaacatgcatgatgcatgcatggataaagcatgttcgtttgagagctagctactggtggtagagctagtctagagcttggtctttgtgatatgagggagagattttgtacaacatcatcatatcatgtttgcaagctagatccatgcatgtatagtactcctatatatgtgtacgctgtatgtgtatattttgttgtagtgacatgtatcaattttactgcaagtaaggtacatgttgcaaagacattagcatataagaacactggtgtattacatagtataagaattgcgctcgtgtgtgtggttcctgatgtcctgcatgctggccctctgtccatgccagggacttgtacatagtgttgttctagaaaccactgctacatgtaattttcagacaatctatggtcggtatgctg

SEQ ID NO: 192582 - DNA, 286 bp, Zea Mays
gtctatattcttctacgctgtcccttattggttcaaactaagcactgtaaagtatctgaaaaatgtctatttgttcttggcactaacacattttacaggcgcatatcgatgggaatgatatggcatttttggtgctctaccatggacatagtctaagatatgcatagttactacgtactggttttttatacaactcttttatgtttatggctgtcaacatgatatggcatgaaactggtgtttcctttgtttggtgccactgacgttttcttgatgcttgtatcta

SEQ ID NO: 192583 - DNA, 847 bp, Zea Mays
aaggtccaatgcctccgcttcgaattccatcccttcttttgtacaaatcttgatcaacctgcgggcaatctctgcgtcatctatcttgcaaaacctgtagctctggcaccaccctatggaattgcttggtagcttttcaatatcagatgtgatcataacaaagattgtgctctcaggaatcccttcaaggctattgtagatagagtaccatccctccttgtccatgtgctggcaatcatcaacgatcagaaccttgaagtgtgaagaggcaaggacttcacaggcattcctgagcaaggccgcgaccctagacttgcaatcaagtttggaagcatcaatctctaccacactgctgctgcttcccgagaatatgggcatgcactcgtcacagcgtccacatggctggttctcacctggggaacggcaattcagcgctgctgcaaacgttctagccgtggacgtcttgcccacgccgtgcggaccatggaagaggtagataggagcaagctttcctttcaaaacggcacccgaaagagactgagcaataacaccatgcccaacaagctcggagaaagatctgggccggtacttctgaagcaaactcctggagctctcctggaacgtgctggcctccctccggccaatctcctccccatcacccaccaagccaaaggccctgtcctttgtgctcctcgacatcccggaaatggccgagcaacagctctggttgtggagcgccgccttggccatggcattggccttgatgatgttgatgggcgagtcggcgagccggccagacctgaggccgtcaccgaactcctccctcctccgctggaggtgatcgtac

SEQ ID NO: 192584 - DNA, 597 bp, Zea Mays
gagatcccgtcagctagtggctgacgggggagagcggcgtggggatcgcggtcggagcgggatttggttgcgggtgatggctgtgtcgccgagagattcgtcgaaccaccgagaggagcaaacatatgtggtggtggcgcccaggtcggagctggcagcgccgaaggaccccgtattcttttggcgcatggcggcatggcatctaggctgctgcgcgatgttgcctgctgaaggcgaacgtagcaggcggcggcgttgcgaaatcagggccagggcgtcggctgcgggatcggagctacggttgctgggggatcgtggctagaggttgcatccttgcaggggatggaggcgttggtttggacgcgcaagatcgttctgatggtgggcgaatctgacgacttagattgcataatggcacaacgaatggctgagattgcagaacggcaggctacccttagagccttaatatgtagtagatatttgatgtcataagaagaaagtagaagtcactctacatgacatgagatttgaacactgagtataaggagctagaaacaccgaatcatttttaagctaagttgcatggcatgaacaaat

SEQ ID NO: 192585 - DNA, 784 bp, Zea Mays
aagacttgcagaagcttcgggatgctagaattcagcaagacatgcttgatcgtgaagcttccattttacgtgcaaaaactcaagcagctttggcagagggaatctcatggggtatgacagatgatgcaatagaagagtctgcagaggttagttgtttatttaccacagctggttgtagttgtttatttaccacaactggttgtgtttttagttttagatcagagcttttgatggagctatactcaagtttaatctgcgcaccactttcctaattcagcttcatatattgctttgtatttttactgatcatgttcttggatcttaggatgatgcagatgaaattacttggcaaacctacaaaggtcagcttactgatagacaagagaaaactcgtagcaagatagtaaaacgaatggagaaggtaagcatttgtactgaaatttcatattcttgtacattgttgcaagttcttatttatccagtactctacttgggtggaaagtataatatcatttcatgtgaatgtgccaataaacactaggactcatacgcagccttttccagtttaattttcagttgatactctttcaaacatagtcaccagaaacctgggtcgatgagtgatgtggattgcaggtcacagttatctaaaaatgaaggtcaaagggtcttaatgagaagttccagtacatgggaaccctcaataatgaggatttctagtacatgggaaccctcatcaagcgctagtgttcacgagaacaaaagaaataaaaaataataaact

SEQ ID NO: 192586 - DNA, 624 bp, Zea Mays
cgggagaggcgccaccaccgatgtcccagcaggagcggcatcagaagaatcttcggctaacatatcaagcatggcacttatctctgcatcactgggatccaaaggcacctcaaaatgaacctgtcgttcatcatcaagaatttcttcaagcgaagcaaccaactcactaacttcttcggcagagggtcgcactctaaggcccaaaccgccatcgccagcaggaggacttgacacgaaatgggtaaaggccttggaaggaggcaagttccaagccgagtaggcaacaggggcaccaacatttgacaccttgcccctaagtatcatttcaagtcagctcaccaagtccacagcaggaatttttctattggtgacccgggtggagtcagctagacctcggtacaggtaggtcgggtatgccttgtccttcaatggctgaatgttcttgaagacaaagtcagcaaccacagcttctgcagtcagacccctctccttcaacaatccaacttcagttagcagaactcctgcctcagccacatcctggtctgtgggggattcagtccagctcagagtgcgaacgtccggctgtctccctgaccgcggggggagagaatttccgtgattctc

SEQ ID NO: 192587 - DNA, 316 bp, Zea Mays
gctccctcaaaatttgttgttcccttggagaatctgcaattttactaaaagcttcaagcacattggtcataacctccttatctgtattaggagcttgccttatggtgccaccaggagctggggtgttgaggtattgttgatgataaaatttggggcataaggcatatgctaagcaatgaaggggaagattcatcttctcccaacggcgcataacgatactttcaacctcaacaaaatcatctttatgcaggttatcatcttttgtcattatatcttttatttcaccaaccatgcaatccattctctcgtagatttc

SEQ ID NO: 192588 - DNA, 286 bp, Zea Mays
tctatcccactcgcagatggcctcgagcgagttattactgcctgtcccgcccgcggatggcctcaggcgagttgtgactatctgtcccacctgaggatggccacggacgagtcgtgactatgtctcccgccaggggttgcccttgggcgagtcatgactgcatgtcccacccgagggtggcctcaggcgagtcgtgactgactgtctagccagggcttggcctcggttgagtcgtgactgcgtctcccgttgagggtcggcctcgggcgagtcgtgactgcctgtc

SEQ ID NO: 192589 - DNA, 589 bp, Zea Mays
gctacttattaaatcacatggctaccagtgcgccacaaacaagagtgtgattaatactttgatacagtacatattattacgtattattgacttttgtgtggtctcagctccacgtatccatccagcgccctgtacctcaacaacaaattctttcacgccgccgcaattgaatcaagaggcagcagcctccctctctcgtgacatcgccggtggtaccaatttgggcgccattgagggtgactacgccacctcgcctgtgccctcgcactcgcaggtaattgcggtggtgccaatttgggcggcagtgcagctggtgacgcctccctcgtagctccacccacaggttactgtcttgctcagatctgccctcattatagaagcaacatcgacttgcgtgcccacgacacaagctcgtgtcagtgctactgccaccatccctccacagcacagccacgctgcctgcctcatgtgtcactactgcgtcctatcctgccacaccggatagaacttctacaaggtaccacattattgaccttcaatttatgactaatcaaagaattgatccctatggtagaggatacaagttgca

SEQ ID NO: 192590 - DNA, 296 bp, Zea Mays
gaggtttaatccccccaacgccatcagatgtgatgtgatgcgatccgtcccgcgccagcgccagagccatcatgtgatgtgttcccatgtgcatgtactcccggccggcccacgcgagtgtgtcgtaacggcgtcagaatcagagaccgggactattcgcccgacaagagattgcttcggctgtgagaatcgtttctacgagaatcacagacaaatcgtttctacgaaaaaatcgcagcaaaatcaacgtggacgtagaatccgtcaagtcgtctgtcgttttctaaaccttaaac

SEQ ID NO: 192591 - DNA, 283 bp, Zea Mays
aagaaaaggagactcaatgatgaagagttggggattatgacagggcttactagagctgtgaacaaattggctgaagctgtccaagcacctgttgtagtccagaccacagatgtccaccctgatctgtatcaaatttgcatgagtattccaggtttcacagatgaggagttgatgacttgccttacctacctattggacaacaaaaggcaaggtgatggctttgtgaagatggagcctaaacaccgtgtgctttggctaaggcagcaccttgcaaagatttgag

SEQ ID NO: 192592 - DNA, 349 bp, Zea Mays
gataaggcgtcgagggcgagcagcagttcccggagtccgcatggtgtgggcgcgagtggaggagcagttatggaaggagagggaggagccgacgtgcaggccctgcatgcgcgtccgcgagcacgagtgtggctgatgggtcgggcgcgcaagaaatggtcttgtgggtgaatgcaggtgaggtattcgagcgcaaaggcgaggtacttatggctgcgtccgagtgaaactagcacgcgtgaaaaggacaacagtttgggaagatgaagctaacacacgagctcggaataacagcaagaggaataagtgaggggaaaacggttgcgcgcaccgcacgacgtttgcgacg

SEQ ID NO: 192593 - DNA, 356 bp, Zea Mays
atttgaatgccagcttctgatgagcacgaactgccagggacgactgcacatatggctggagcttgaggaacacccaatcgccaactgcaaactcgcgttcagaacgacctttgtcggcttgcttcttcattctgagtttagcccgttccaaatgttgtcggatcagttcagacatcaattgcctctcatgcaaccacgacgccaaatcagtggactgaatattgtccttctctgagatgccaaactcatgtggccggcacccatacagagcttcgtaaggtgaaagaccagtagctgaatgtggggaggagttaaaccaaaactgagcaacagataaccacttactccactgcttt

SEQ ID NO: 192594 - DNA, 1152 bp, Zea Mays
caactgctgtagaggacaaattacaaaagggggtaaaatacagtgtctgacttttcgtattgttaagatatgcttcttggttcctagtattatgctagtaactgtttcatgttgttttgatttataagttatgtttttgtgctctatcaggttcctcagtgcatagatcggttggcgcaagcaggtctcaaaatctgggttctgacaggtgataagatggaaactgcaattaacatcgggtatgcttctgccaagtagaaattcttgatatgtacaagtaaccttttttacctcgttaacacatcacgttcatcaacaccatgtgatgtttctatttcttttgcagatatgcatgcagtttactgaggcaaggcatgaaacaaatatgtttgtccatacccactggtgagcaggtagctcaggatgcaaagaaggtaccttaactttttttctctcttttactgtataggaaggtataatctagatggtaattctctttatggtagactttagtttcatctttgacaactgagcaggttgcaaaggagagtctcctgtcgcaaatcgccaatgggtcacaaatggtcaaactcgagaaggatccagatgcagcatttgctctagttattgatggaaaagctctggcatttgctttggaggatgacatgaagcatatgttcttgaacctggcaatcgagtgtgcttctgtcatatgttgtcgtgtgtctccaaagcagaaagcactggtagctttgcctctctccattggactatctgtcgtttctacataaagcaatgttgagtttgttctccttcactttgtaggtgactcggctcgttaaagaaggtataggacaaaccactttagcagtaggtgatggtgcaaacgatgtgggcatgattcaagaagctgatattggagttggaataagcggggtagagggcatgcaggtgagttgttcagattgtcatgatctaatccttatctagtgtaatgctatttccatctgacatcaaggattggtgattaggtgtgtgactaaaattggttattttcctttaccaggcggtgatggctagtgatttttctatttctcaatttcggtttcttgagcgacttcttgtcgttcatggacattggtgctacaagag

SEQ ID NO: 192595 - DNA, 933 bp, Zea Mays
ttcctacagttatgttggtacacaaaccacctgaatttcaaattgattttccagcaatgaaatttgatcttgtagcctgattgaatgctctccatatagctaggcacttcaataataatcctctcagtggaggttttcctcatgaactgtcgcttttaaggaatctacggtccctgtaagtgacccctcctgttttttaagtacgaaataaccttcattaggtagagcaaatttgaagactgactaatcttgtggtctgttgtcgattctgcaggtggatgtttgataattacattgtagggccttttccggcatttattcagaacttaaccaatctcacagacttgtatgcctgttgcataaacacttggcttaattttgttagatacaactctttactttacagtctttaaatgctaatgatgtgatcttgctaggcgaatatatgggacgaatcttcaaggacctattccaaaaaatttctctaatctgagcaatcttgaagtcctgtaagtcactctgtaatggttgtttctatagggaacatcctccatttttttattttaaatatctattatgcaatagaaattgaaataaataaattaatacattagtaatttaatttggagaaatttcctatcccattgtttcttaggacatgttatcatttgatagaagacatcaatctgatcttttatattaatatgttttatacactgccatcttttactgtgatttccttacaggatgcttggtgatcttgcgggcaaccattcttatttaaatgtcataggagcgtgggcaaacctttcagtgttgtatgtcaagcgtcatccatgctcctattaaactactatgtttgacaatatttgtctggtctacgtacctaggagacacaaaagctatgtaatttttgatcaacttgaatgattt

SEQ ID NO: 192596 - DNA, 391 bp, Zea Mays
cggcggaggtttctggaagagagaagaggggaaggagaagcgggcaaggagaaagtagatggcggcgataagctttctgtccttcgcgacacgcgcataagtacgattcagcgttcggcaacattccaccgtttccacccgtttcaggcccatacagccgacagcaaccattacaaggcccactgcggcccacaaaacttggcgttcggacgacgcttccgcgcttgacgctgctcgttaccgtgctcgacaccatcttcatgttccgacgctggcttgttgctgacaagtacattcaaacacacaagtttatccattcagcaaattctaaatcatacttatccattcagagttagctttcagtcagtcctaataggttgttgattggagt

SEQ ID NO: 192597 - DNA, 1153 bp, Zea Mays
gagaaaaatatctcccttgttctgaatatcaaaaggccactgctggaaaggatatcacgttgcactggtgctcatatagttccctcaattgattgtttgtcatccgagaagcttggacgctgtgatttattccatgtagagaagtatgttgaagagcatggaaccgctggggaaggtgggaagaaaatgctgaagaacctcatgttttttgaaggctgtcccaaaccgttcggttgtacagtaagtatttaccttttggtctcaactactgtgctctgtctttttcatgtgtgagcatggtaaatctgtaccttggtatacttaattactaaggggtaagcaagttcattgatggggtacctggaaaagtttgcaattaagctgatttgaagtattccatgcagcatggagattggaggatacatgatctaagaagattaatgaaattggggttgtcgtgttagttgtgtaataaatctggcataagcaattgctctgtccatgagccgttcttccattttagctagaaaaatgtgtagctgtgacgtttgttccttgaatgctttattaggccactttggcatcatctcatgtaaataaatgatctgcattatggtcatatatctaacttcctctgatgctgtagatcttgcttaaaggtgctaatggtgatgagctaaaaaaggtgaagcatgttttgcaatatggagtatttgcagcctaccatttggcacttgaaacatcattccttgtggatgaaggtgcaactcttccagaactccctttgaagtcgccaattattgtagcttttccagacaaaccttccagtgctgatagatctatctcgacaatacctatcataccaatccctagtgcttcaccgccaaacagttgcctgcaagcatttggcttgcaaaatgatgatctgacatttgatggcactaaacgaatggaacaaacagcattgggagttccttatgaacaaacagcatctgttcagatcaatagccaaaatggacatattaccggttttctggatatggtccctcaatcatctgttggtcccttgtttcagcagtcggacattcactgtcctgatggtactggaggtgtgaacagaaaaatgaatttacaaggcagcctacctggaacc

SEQ ID NO: 192598 - DNA, 338 bp, Zea Mays
ggtgagtctacttactgaaaccaatgatcttgcatccacggcaaaaacagtggggtaaatttctgcatatgaatggaattcttctctgagcctttgtacaagtgtggcaattggctgtagcccttctggcagatgagctaccttgtcataatgggtgagaactatagttacactgggaagaaataattgtgagactctcttagaatttgaaaccaaaaacttaagccaatatattagctccagttcaatctgctctatgcttttgggatacctattagcaggcttcagaaccaaactagatacaatcatgaaaaagcatggaccaccatgcaccagaa

SEQ ID NO: 192599 - DNA, 359 bp, Zea Mays
gagaactcgaatttgagattttctccaaatcaagtctccgccaccgtgaaacccacctcaccgcggccagccctttcccggtcagttcatccctcgctctccctcgtttgagcactcttgatgctctgtgatgcttgccgaaccaccaatttgtatggagtagctttagatcaccgggaacacgtaccaattgtcctcatcgtccgcggttcacgtggacagagcttgatagcttaccaattgtgaaattgatttaggggaatcgttcagggagggttcaatctggtgtatgtcgctcgagagcaccggtcgtagcgtaaatccgccagtacaatctcaccggagttcgttcccccaag

SEQ ID NO: 192600 - DNA, 420 bp, Zea Mays
ctcattgcatttgccatttcacaaatggtagtatcactactatgacaccaatctgatagcagtaacttaatctcacaaaagccacagaaaaatagatttgctgttggatatgtagtaccagaaaatatctcagtgaggtcaaagaatttttttaataatggaatcagattgtgcgcattctgccaatcctggggtgaaggtgcaatactgccatatctatggcgttctatggaagtaagtctctcaaaggccgccttgtaatataaagcatccctcaacataagatacgttgaattccaccttgtagaaacatcaagtgacaaagaacgttttgtatccaatccacattcagttgcacacatttggaattattcccactgaattggagaccccttaacaacaagtacggatgctctaatc

SEQ ID NO: 192601 - DNA, 339 bp, Zea Mays
ggggtatctagggttttcggctgtaggattagatctggacagcaaccaaaagagcttgagctgataactgatcacgcgcgttggatcaagatctaacggcctacgacaaaagagacgaagaggtacacgggcgatttaatccaagccatctgctggccgatcaatggccatcagcccataacccaccgcagccgttcatcagagaacgagcggtcaccacatgtcgtccagctcccgtcaccgagccccaacagcacacgcgcacccaaggcgacggaaggccacccgcgacggcgcgccattaacggacagggcaccccacgtcacagcagtccaaac

SEQ ID NO: 192602 - DNA, 282 bp, Zea Mays
gttctagggtatgagggccataagcacatttgccccaatgattatcaaacaaagataggtagtcaaaaaacactaaaaatagacttgttgccccaatcactatggagattttctaccaaggaaggggtcttagtgtcccatacacatctagtagttgcatcaactatccatgacaagatcaaacaactgacatcgatggagggacacaaaattcttcattcgaaggatactaacacctaaagtgtcatggttcaccaaattacatggtcataatttctcaat

SEQ ID NO: 192603 - DNA, 1812 bp, Zea Mays
ccgcgatcttcttctgctccaagcaaagccgcacccagacctcgacggacggcgagcagcaagagggcaagcccgtaccctatcgactcgaacctcggagcggcggatcggtactcgtaggcagtggtggacatggcttcggcggcggtgatggtgagctcggcgggctccctgctggcgatgctgcaagagccggcgccggagctcaagctccacgcgctcgccagcctcaattctctcgtccacgccttctggcacgagatctccaccagcgtctcctccatgtaagtcccctcctcctcgcgcccttccccgctcctccagcggccccctccactcccgcccggccgacccctcaatttgcccgctctaccgccgccacagccgacggcaggtgctgcatcgccccatcgccgcgcgtttccattagtttcggtgaatttctgttagcctaggttcgattcgggctcgcctgcagaggtccggctagatggcggcggcgccgccgcgtcgagttccattcagagggaaccctgtgtccgatctgttgggatggaggttttgggagggttaatgtgctaccgttggtaactggaaacctagaatttttagaatttagagcttgtcatgacatgtcctccaatttatggacactgtttgctgaaaaatttgaactttgttgctaagtttctagattgtttaaggcaacaaatcccgaacttctatattcgggttgtcatgatagggtatgaatcaaatgtggtaactttgttctttaaaataaaaacttgtaacctgtgacaaagtaatactgattatgtgtttatactgtttaatgtctctcttaatgtcggaactgcccttagcttattggttgctcctcagttcaatagaagctatccagtcatagcggagaaatgagtaaatgctatatgagaattggtgtttatttcctgggagttgcattcattttagaaggatccgtatgaataccaagattcttcatgactgatgcaattgatgtgcatgtggcaatatattttgtctctttattatcctggtcactggttgtaaaaagttttgacaatcagtttgtgcttaggtgctttgctttgtcctgtattcctatttcctcacaatttgttccctgctgcttgcagtgagagtttgtatgaagacgaggagtttgtccagaggcaacttgcagcactagttgcctctaaggtatttttctacttgggcgagctaaatgatgctctgtcatatgcacttggcgctggacccttgtttgatgtttctgacgactctgattatgctcaaacactgttaggtgaggaactgcctggtgcctgcatcatggccagttaattattgccagcattaaaagtactatgttaacattatttcttgtttattttttcagcaaaagctttggatgaatatactgccatccaatcaaggggcactggggaagaaaaaacgatcgaccctaggctggaggccatagtggaaaggatgctggacaagtatgatagtttcctcatggtccattatttcttggtttattaaaatgcagttctgagttcacacatacatgttgcatttcaggtgcattcttgatggaaaatatcaacaggccatgggtatgtctgttgagtgccggagactggataaactggaggcagcaatttcccgatgtgataatcttcatggagtgctttcatattgcatcaatctgtctcaccaatatgttagtcaccgtgaatatagattagaggtaggcaatgctatggatgattggtattataaatc

SEQ ID NO: 192604 - DNA, 512 bp, Zea Mays
taactggcagagaggaaagcttagacccgaagaatgatcctcttatgagggctgatgatattatacttactgagcatgttttcttgcaaaaagaggattttattcaactatctcctgtaaggcagctaatagttgatggttgtgatattgacgagttcatttatgatggctgtgggggcactgtatccttatgtgaggaatttgataagaaaggacaggtatactctgggattataatcataattggttgtggcaaaagacttcgattcaaaaatgtcaaaattgaggtattaaacatgtaatttacttctatgctttatctgaactacttctactataaagttggtaatgttttcttctatagtgcaccattatattgatgctggacttacacctttattgttctttatactgtgcatactagaatggtgcactgcttagaagatgtgtatacttgaacatgggaagcagttactcaatttcttctgaagatgatgtagaggtttctgtgt

SEQ ID NO: 192605 - DNA, 474 bp, Zea Mays
gtggcaaaccttgccaacttattgtttcccatctttatttagagtactcctctcctactgtcatcctcaaaaggaagtgttgagcatgtattggacattcgttgtaggtttatacagttgggcctgtatatgcacatgctgaagcacggaagtctccagttgtggatggggttgtcacaaggaattctgatggaaaagaggtactgttccttaccttgttggggcaggattcgtctcattctttacattaagcctctgtttataacatgctgactgaaactcaaaccttttttatatatataaaatggtgtgtgtttcccatatgaacaatgtagcactgttgcattataatatttgtcttgcttgaaggtgcgctatccggttctattaaccccttctgagaaacaaatcgcaaggagcatttgccaagccttcagacaagcggtaaattaaaacctttctaccaaataacac

SEQ ID NO: 192606 - DNA, 352 bp, Zea Mays
cttgatggcgttggagatcatcaggccaaacaacgggaagagcactccatggactccagcggctagcgaccctaacacaagtatcggtacctctggcttgtttaggctggctagccgtcccatcggagctttctttggggcctcacggtcaccgtcacgagcctgctctttctcgtcctcctcccaattctcatcgttgccttccagcaattcaactgagccaggcatgccaatggggagggtcaaaaaatgctggctactgttccccatggaacctctgcttatcgaccgtttcagtgagaggcttctacttttagaccttgaatcagacacgtgccgctctggtttctgt

SEQ ID NO: 192607 - DNA, 523 bp, Zea Mays
caggtttcaccctggacatcctcaaaacagaccaggcaaacatgaaacggtcccaagggagcagctggaatctgataagctacatgtctttcaccaagaacaccctgggagtttgcatgataatccagatcgtctaggaggttcccgtgaatttgaaaggaatgtgcagccagcaccgccacttcttccacatcctgatggaaaacagactgatatgaacatgagggcagatacaagggacacctttagtgagactgaaagaaccgtggtacttacaaaatcggtgcctaaccagagaggttcggttggtatagaccatttgtctgtttatgaaaacacacgatcccatcacagagaaacttgtgatggcactctgcgcaagaagttcaaggaggatagctcagttgtacttgaccagcatcctgtcattaagaagaatgcagctttaatagagaaaattgagagtttgaacaacaaagccagaaatgtctatgcacagaatctcccagaaccagcttcatcc

SEQ ID NO: 192608 - DNA, 462 bp, Zea Mays
gtcaagttgcaagaggaaggtggtgctcagtggtggttcacgggtgtttatgggccacaccaagaccctctcaagcattcctttctccaggagcttagggaagtcagggagacatgcgctggcccttgggtaatagctggagattttaatcagatctacagctcagaagacaagaacaatgccaatataaatagggccatgatgggcagattcaggagacttatcaatgacttggagctaaaagaaatcccgttggtaggcaggaaattcacttggtcaaatgagagaaatgtccctacacttgttaaactcgaccatgttttctgtacagccagctgggaggagatccatccggattgtattctccatagcaactcttcggagctctctgaccattgtcccttagctctgcatcttaatgaggatgtcaaggggaagtgaagattccattttgagagtttt

SEQ ID NO: 192609 - DNA, 390 bp, Zea Mays
tatacatcaaggaacaaatcttctgcagtgatccgggttcgattccaaaaggaaaacgccaaaaatggccgcccaatgtcgacacttttgcacctgccactgctcactgtcacttgacatgtccagagctatctctccatttatacacagctccccatctctagtccggcactcagagctctgcccccttctccttctagcgcagggcgctcccctagccccaggacagctcctccattcggcgccccttgctccaatcctctcatcttcttcctccatggacgccgagacgcaaagcccccatggccgctagcctccatggcacttggccccttgagctcgccttcctcaactccggcagcttgggatccacttctccctgcacgctgc

SEQ ID NO: 192610 - DNA, 509 bp, Zea Mays
cagccccgcaaggtcatcacacacccagccaccgaaaagcactagcaatcgttcgtcagagagcttgaattttagttttcccccaaatcaagtttccgccaccacagaaccgagctcaccgtggctagtcctccacaggtttaatcataccatccttgttcttgttttagcatctctgtgtgctggtgatgctcaccaactcgcccaattgagctaagatcccatgaatcaccgagaacgtgtagattgttagttcatccacgcgctcaccgtggccagagacattggtgtagttgtttatgaaattaacttggggaaaaccttcactaggccctgaatttggtttagaccaatgtagagcgccagtacttgccccaatcggccgacctacgtgctcgccggagctcgaccgcgctcgacgttgtcgtggatcaagcagtgtaaagaaatagaaacttagggtcctttctgcagttgtctgtgacgtgctaaatagtgcttcggtcccg

SEQ ID NO: 192611 - DNA, 296 bp, Zea Mays
atctcagatcccgtgttagatatctgaaggagagggatgcaaacacttcttttttccacttgcaggcttgctaccgaaagaaacgaaacttcatctctagtttgatagtcggagatcgggtggccacctctcatgagcaaaagcatgaaactttgaatgaagtctatatcaacctgttgggggtggctaaacatagagaattcacactaaacttgggatcatgccacagagacatggacgatctaggtgaattggacctccccatctcagaggatgaggtccggtctgcagtttct

SEQ ID NO: 192612 - DNA, 460 bp, Zea Mays
cctgctctccgtgctctccggcgccgcgaggccgtcggaggaggagtcccggtgactcgccgcactgttgctacgtaatcgcatgcgttgacgcgtggtggcatgccgcatgcgtctcgtttccgtgcatctccgggggggggggggggggggggggggggggtgcgttgcgcgtgttttccctgtggttttgcggtgtgagaggaatgcggcgagctggacaaggaggatccagagcgcgagatcggaatcggatcggggttagcggctgtagatagcattcgtcaggtttgtgtttgtgataatgagctcgccgtggttctgtggtgtggttatgtatgcatgcatgcatgcatgccgaattgtcaactgatctgaatcctaacactaaataatgcacgtcccggtgtgtgcaattccgcatgacgttgccttgactgctgttttgaatagaagaaac

SEQ ID NO: 192613 - DNA, 337 bp, Zea Mays
cgcaccgaacagcccggatgatgtgaccaaactgagtcgacacccacacaaagaggtgagaaatactggtgaaggtgtcagacttgcggcggaggggaaaggtccacatgtagtgagaaaaatcatccaggatgaccaaatagtactggtaaacggagatgcttggaatatggggtgtccaaatgtcacagtggatgaggtcaaagggatgagtagctcgggacatggaagaagagaagggtaagctagtatgacacccaagctgacaggcatggcaaagcaaggtggcggtgtcgcgggggcaagggatggttgaagtgccgagagtcgagggagg

SEQ ID NO: 192614 - DNA, 341 bp, Zea Mays
gtaagtcaagatatgcagtggtgctagatgaggatggaaacgaggttacgaccaaggtgccgatcaagcaactccggtacatgcctatcactccacggcttaagcgtctctttctaaatcaagagacagcaaagcaaatgaggtggcataaagaaggggatcgtcagggtcaagatccggatgtcatggtgcatccctcagatggtgaggcctggcaggctttcgaccgttttgatccagaatttgcaagagaccctaggagtgttcgtcttggtttgtcgacggatggattcactccttactccaacaattccacttcttactcatgttggccagttttt

SEQ ID NO: 192615 - DNA, 286 bp, Zea Mays
cttgcaagaacagggttattggggcccgccagtcttcggccatgatgaggttgacgatgcgatagccctcggcgttggtggttatttgcagaccctctgggttgcggacgactggtgtgctgatgacgtggtagaacacgtcggagtgcagggctttgcctctggctgctgctttggctaacgcgtcggcttcttcgttccttgcgcggtccacatgttgcagggtgaaacccttgaattgtttctcaagactgcgaatggccgtaagatactgcataagtgtggg

SEQ ID NO: 192616 - DNA, 460 bp, Zea Mays
ggaggaagagagaggcggctgcgtctctcgttcccgtggataggaggaagagagataggaggaagagagaggcggctgcgtctcccgttcccgtggatgggctgattgctccccggtcccgctcggccgctctgtatataaaagaagaaacaaggaaacacgtctgtgctccgttataagtgttgaatgctgtgcctcttcgtctcccgtctcccttctgctgctgaataccatcgcgcagccacagccatcctccacctccctccctctccgccaccaagaacaaccccaatctccaagaaccccaatctctgccatcctccgcttctttcctcgactccctagctcccaccgcagccatttcttgctcgtcaaacgcaaacgctgctaaccgactccatggcgaggagaaagaacaggctcccccgacagcttccggaagatggatgcctccaatggc

SEQ ID NO: 192617 - DNA, 644 bp, Zea Mays
ccaaaaggcaaagggcgaggcgccaaggcggatgacacctgcaactattgcggcaaaatcgaccactgggcgagggaatgccgggggaggaagaaggaccagcaggctcagcaaagtcagcaggcacatgtggcccaagacaacgagtcgtctcttcttcttgcccatgttgcagatgtcgccatcaactcctcgccaaagctgaaccaggcacaagcaccgagcgatgcagcggtgatcagcaactcgtcgaacaccacggcagcgcgctcaccacaggagtgtgttcatctgatggagcagaaggtctttgccacgctcgacgaaaaggaggagcgagatccacgacgctggatctttgacacgggggcgtccaaccacatgacagggtgccgcgacgccttctccgacttcgacatgggcgtccctgggaccgtccgttttggtaacggatcaacggtgtgcatcaaggggcgcgacaccgtgctcttcgagtgcaagaacggcgaacactgcaccctctccaacaccttcttcatcccgcatctcacggccaacattgtgagctgtgggcggttggatgaggagaaccaggagatcttgatcaaagccggcgtgatgcgcatccacgacgaacaccaccg

SEQ ID NO: 192618 - DNA, 350 bp, Zea Mays
gtaaaggaaaaggtttgtgtgcacacaagccgagatattcgtgctatagctcggcagttggtcagtgtgtggattgaagtttttcgtagagaaaaggatagcaacggcggactcaaattgctgcgtcgaatgccatcaattgaatcgagtaagaccaagagtaaggatctgcaatcaggaaagcctaccttacgtgtgccaaatggaactttggacaacaataaagtagtgtcccagcgccagcgtacaagattcgcaagtagtcaatcaccaccaaagataaacaagaagtatgataacaaggaaatgaaattggaaactgtgacagctgctatgtctgatggcaagtt

SEQ ID NO: 192619 - DNA, 295 bp, Zea Mays
gaaggtctggcttgaatcttatccttccttgatttgatgtggtcggtcatcttcgatcttcgttcttgaagttgttatccgaatcagggacatgtagttaagataaagtagtaggtggagcagctagtttagtaggtggctttgagttaaatggggttagacagaacctggttggattgttttgcttctgaatggtttggataggttatgtaacccattatgtaggtcaagttgttgggtatggccgagctgatctaagttaccaatttaggcttagtgaattaggagtatggcc

SEQ ID NO: 192620 - DNA, 534 bp, Zea Mays
ggctgagtatgctactagcggatatattaaaggaaaatatgcagaaattcagtttatttattgacaatcagtcagcaatataactgagcaagaacccggtgtttcacgatagaagcaagcacattgatactcgttaccattacattcgagattgtatcgaacaaggtatggtaagtgtagatcatgtggggaatgatgatcaacttgccgatatactgaccatgtaatccccacttctttaataaacgaatagagtgcagaaatagctgcggcagttgcacagcagcaaagtgctttttccccaaatctgagaatccatacctgagggtttttcaggagcacaacacgcccttcgccgccgctgctttctgagaagtcggtcgccgggatcggggacccaacacagcaaccctagcaatcagcaaatatttataaatggtatgtacattaaaggaatagagtgccgaaatagagcgtcgcggaggaagacggctcgtgcgggatgaagaaatctgtgtgtcgcggaggtcctgg

SEQ ID NO: 192621 - DNA, 321 bp, Zea Mays
tgatcatgccaaagtatatgcagttcctcgccagcgtcaggtggatgaaaagttggcatctctgaaagcatatcgccgagctcgtgggttgtgcgacaggtgtgcagacaaatgggtgcctggccatcgttgtgcaccaacagttcaacttcatgctctacaagaattgtgggagttaattgaagaagattccagcacaaacacaaccgaaactgaacccaaaccatcaggtgagttgttgtccttgtcaatgtcagctatgtcaggtactccttctcgccgtactgtacaactatctggtgagtgtcaagggcatcctgt

SEQ ID NO: 192622 - DNA, 271 bp, Zea Mays
tttagacatgatcacacaaacacaccactcacatacccacatgggtgcgtcaggggtggagttcaattatttaatcactgggttcaatcatactatcatattggggccatgctgaatatgtacttagaggaagaatttgctattgttaaaggggaactatagtgtattaaacaaaagtcatcagggccagctggctctgatggaagcacgtagctccgcccctggggtgtatcctagcacacatctaaactagggaggcctactcacagaa

SEQ ID NO: 192623 - DNA, 549 bp, Zea Mays
ccccaacaagcccctgagcttcaagttgacttgagaaacaatcagcttgaaggtccgaaaagaccatctaaagaagtgagttcaatggcatgcactgtaggtgcacccattgggcgtagctctcgagcttcaagttgactcgagaaacaatcaacttgaaggtccaaaatcagctttcaaaatgtcttgccttgtagtctttgaaaattttctgatggtatcctccatgcagcccttgaacctcaagttgattaagataatcgggttgaggatcaagcaacttgttcctctgagtgatcttggtgaggtgggcagcaacacccgagctgacgaagtggtcggcgaggtgtgtggtaatccaacccttgagctgacgaggcggtggcgtagcctcccagagtcgacaaagcagagagttggcgaggcgagcgatgacccagcccccgagtaagtgaaacatggggtcggagaggcgagcgacggtgcggcccctgagccagtgaagcagcgagtcagcgagataggtgatggcctagatcctgagccagc

SEQ ID NO: 192624 - DNA, 401 bp, Zea Mays
accaaggtaggcaccagtggtggtggtggtaactgagcccaagcagcttgaaaatgactcgccgaagcaaccgacgccatgggttgctggttgcccacatatttagggatatatggtgaatagcatgaataagtatgcaagacctgcttcggctgattctgccgcgcttcggcttcagcgatctccttctgcttttggattgtgacttggcacatccttgttgtgtgtcccttatcctccgcacagaataaggagaacaatctcctaggctgagtgccaaaccttcctccgaagcttctcccccctctgccccttggagttgatggcctgtaagaggtttgctgcattcccgaatattgtgagttttgttggttgctctaggtatgatttgccctatcatc

SEQ ID NO: 192625 - DNA, 570 bp, Zea Mays
gttggacattcgccggtgagtacgccgccgggcgagctctgtttctcgcgcggggtgtccgtcgatggcgtggggctgatcctccgtcgatcagtgaacgaacgggcgtgattagttcaccttactggtgcggcggggacgaagtttggtcgttggatcgtagatgaaggagtgggatcggatctcgcacgtattaaatctggggccttggatctagatccaacgatccctggcacctacagattcctcgacggcaggatctaatcctggccacaggacttggatccgatggctctgaaacgcagataccccccttcggccctgaaatcttgcataaggacccctcggtttagttaaaaccaacccgccgtcctcggcgtctgttgcctaagtcttagaaaacttcggtttaggcccctgacttttccagtatttgacgcccagtccagataattaataaaacagggaaaatcatttagaaaatagtttttagtacatatttaaatgcagattcttgtttaatttgtagaaaattcatataatgtccaaatcagttcattccagtttcta

SEQ ID NO: 192626 - DNA, 344 bp, Zea Mays
caggcagcacaccagacctgaccataccctcgtacagagtgaacgcctcctcgatctgcttcatcttacaacactccccaatgagtgcagtgtgtgtgaccacactcggctccactccatccgccttcatcctctctgctacctcccatgcagcatcagcatcaccggagtggcaaaacctggcaaccagggtattgtaccccaccacatcaagcgccagcccttgtgtagtcatcctctccaccatcaccaatgttgcggccatgtcctagactttacagtagccgtcaatgagagcattccatcccaccacacccaagccatcaattcctcggcctcggacc

SEQ ID NO: 192627 - DNA, 306 bp, Zea Mays
caaacaactcctaaaccaaggatactttggacctgagttccataagccaaagttggatttgagattaaggagtaactttgctttaaaaggatggagaaatttgcttttgatatgtggattagaagtggtgaagcacttagggtggttgagtatctataagccctaaacttgcccaaaggtggaatttaaaatctagaaaggattggttaaaagttcatctaagaaagttgtagagcttggaaaatgaataactttattattgggatatttcccagttttatagagaaattcggggtaattcacaaa

SEQ ID NO: 192628 - DNA, 355 bp, Zea Mays
tacctatacacgtagataacaaattacgcagtatccatactcgatggataattatctccaattatttgtccatactcgtacactaccatccctaatctgatggacagtctcgaggcgtgttcgtggtttctccagtgtatatcgtggggagctcctttaggactctgaagccaggttgttactccatctcccacgaatggtccaagccccagtggcagctagccacacaaatacaatatcatgcccttactccttgtcctggatctacggccgggggcccacaaccccagtttagggcaccattgctaggggcgggaccatcaaaccccgagttaccctttggcaccatcttctg

SEQ ID NO: 192629 - DNA, 354 bp, Zea Mays
tcgacgccaacacccttcaatattgaaaataagggcaaaggaagagaaaaaatagactcgtgatttcaccaaaaactgaatcttgatcaccaagatggcgatggcgactattgttgttctcatgatccgtgaatcagtggagagcttgatcgagtggtttggaagtattggactagaggtgcgtgcctctatgcttactttaaatggtttgaagcaagagacataatgacacaatagccagtccgtcatccatggtgaaaataatcagaaaggccaaagtttggattgtcgaacaaaggcacaaggccattagtaacgactaacgattattaatccatgcaatttgctgcacgc

SEQ ID NO: 192630 - DNA, 534 bp, Zea Mays
cgcatagcctaaaggaagggatgatggatacgatggcgactcaccagtggccagccgaggtaaggtgatgcccgtccacgaagcttggcggtccggcggggattttccgccacggtaagcaattgacgagcaatcgacgccccttcgcggaagaagacgccacacccacgatcgtgcgatcttccctgaccacctcccgcttccaatcgacagcaggatccggtaaaccgtggcgaatcgagcacggccgcgagccctcttctctcacccacgattttgtgttacacgtgctctggtcactacggcgaggcgagtagggaagaggtggtggtcacgagaacccctttaatcctctggagtccaagtcgggcagaggagaagaggttgtggcccgccattgtcgcgcgggtggttgcacgcgcccgcgcggagctcggcgaagctgttagcacacgacccggcgcgtcggtcccacgtgtaagcgacaccatgcggcgtgtggatgaggagtgggcccggcttgtcaatcataca

SEQ ID NO: 192631 - DNA, 481 bp, Zea Mays
atatttatcaccttatttctggtaactcgagtcaaagtgtccagaatcttgatagggtactccgcataagtcaggtcatcttgaacactaaggtcccccattggtaattgttcctcaggcaccctgagacatttcttcagctgagatacatgaaaaacatcgtgaacatctgcaagatgatccggtaactctaattgatatgcaacctctcccactcgctttaagattaagaagggtccaataaagcgaggggacaactttcctttcactttaaatcttctcatgccccggagtggtgacaccttcaaatagacataatctccctccttaaactcaagcagtctcctccgggtgtcagcatagcttttctgcctggactgtgcaattctcaaattctcccttatttgttgaacttgttcttctgcttcctgtataatctcaggtccaaacaactgcctttcaccagtttggtcccagtaca

SEQ ID NO: 192632 - DNA, 334 bp, Zea Mays
aatcctcagatccccttgctgcagtgcagatctctctataatccgcgctcgtggcgacctctcctccagcttccgttcctgaaatccatctctagtttcgccatttgggttttttctcgagggtttcgctcctcactcatctgatttaacgaagggagctgggtcacacccacaggccgcggcttctgaaattcgatggccgtggctgcagcgcgcctgacgctcccagatcgattcgacgaggtttacatagcctctgcccggtgaaaagatgggctcgtgggttatacgcgcctcgcacatgcacgagctgaatttcttctcgccttttcga

SEQ ID NO: 192633 - DNA, 300 bp, Zea Mays
ttggagatcttttcaattagctctaatgatagtggctttgtccctggatggtcatgccctcttcatgtgtgataaccggggcaactccacttatcatgtcaggagaagttgatgtggtgataaaagatgatggggataaggttaaatgattgggcaaaggcgaagctgagcccccctttcaacacatacatgcaaagaaaagggaataagaaacatgagtttatgttgtctcttcccttttctgttgaatatgttgttgctgtgtgttttcttgtctaacctacatattttctaactcca

SEQ ID NO: 192634 - DNA, 630 bp, Zea Mays
caaaatgaaattaatgttagtaagtaatatagccttattaaataaaattaaggtagtatcattaaactaaaaatacaaacctcgctaatctgccaacgacaagtgcgtgaattatgaccaagtctaccgcactttccacactcatattgctcggggtcggtaagaaatggtgttctccttccccttctactcctaccaccaacctgatccataaccatcttgtgcctcgtcctcttcctggatccacgcttggtccaacgactgcttggatcagcgacatactttgggccatcgtacggaggccactcacccgcgtcacgataaggaataaatcttggactccaagtcaacactagtttatcaatagtaaactcttgaggtatcctcctctctaagtcaaagttacgagctcgagcagctgcgattagatgagaacatggaaaatggtattgcctgggtgcgccacaagtacatgacaagtcattaaggacaaccacatgcttcctcgactcttgtgactcgccgtctgaagtagtaccagcttgaaggaatacctcatatgtccctgactgtaagtcaaaacaatcaacagtgtgtgtgtttgccctttcctttgccttctctagaaag

SEQ ID NO: 192635 - DNA, 647 bp, Zea Mays
gagagagggaaagggaagagagaggaaagagagtggagggagggagagagagagagaagagagaggagggagagggagtgtatagaaagtattactgtacaccgaacgacaattaagttgccactcgcacaaatgagaaccatgcatacaacgccatttcctcaatttgtttacttagttgccactcgcacaaatgagaagcatgcatacaacgccatttcctctgccatagttaccgtgttaccgtggtcataatcgccttcacgatgtacgcacgcatagaaagtttggacgatacccataaagaagaagatgatggcccaaatagttcagtggcaaatacgagtcatcgtcaatagtgcgccacacacattccatagaattacgatggtgtgttgactgttgccgatgcacatttcgtagaactagatgcttgattgttgtctgttgatacgtttagcatttatttcttgaattgtgattagaattagcacatgatctctgatatggttttttagtgagacgcggaaaaaagactaagtaaagagatgtggacgggtgagaaggaggacacacggagagtagcgggcgagcctagttggcaccccttcccttcacacagcatgtgggccgcacatcaagcggct

SEQ ID NO: 192636 - DNA, 1191 bp, Zea Mays
atgtgggacaaatcattggacagcctactgcagcacctattacagcagacaaaaccaatatgaagcccctttccaggaatattgtccgctttgaaattgtccatttagtttacaatccattggtggaccattaccttgctgttgctggatatgaggattgccaagtgttaacattaaatagtcgtggtgaagtaactgatcgccttgccatagaacttgctctgcaaggaccatatattcgtcgtttggaatgggttcagggttctcaggtacaactcatggtagtaacaaacctgtttgtgaagatatatgatctctcacaggataatattagccccatgcattattttaccgtagctgatgatgtgatagttgatgcaaccctcgtcccctcctcaatggggaaattggtgctacttgttctttctgaaagcggtgttttatataggctgaatgttacattggagggtgatattggtgccaagatattgactgaaacagtcttggtcgaagatgtcatatccatgcatagagggttatcattgtacttctcatcaacctacaggcttctttttgtatctcaccaagatggtacaaccttcatgggacgtttgaatgctgattcttcatcaataacggaattgtcatatataaatgaggatcatgatggtaaatctaagccagctggactctactgttggagagagctagtagctggcagtggtatccttacttgcctatcgaaatctaaatcaaatgctcctcttgtggcgttgttgagtcctcatcaattggttgcacaaaacatgaggcacaatactggtgcaaattcctcagtggttggtgttgctgcctataagcctttatccaaagataaaacacattgtcttcttttgtatgatgatggaagccttcatatttactctcatacacctagtggaggtgacggttcgatgaaccttacagcagagcaaacaaagaagctgggcagcagcatactcagcagtagagcttacactggcacaaaaccagaatttccacttgatttctttgagaagacaacttgccttacatgcgatgttaagttcaatagtgaaacaacaaagagtggcgattctgaaagcattaagcaaagattgacatcagatgatgggtatttagagagtttgacacctgctggcttcaaggtag

SEQ ID NO: 192637 - DNA, 406 bp, Zea Mays
ccacgttacgtgcaatgtttgcttcaaatttcttgttttgacgggctaagatagcttgtctttcaccatgcaaaacatggtgtttacgtcttaatgtctcattagacatattgtgtgaactgatatcctcggtctttgttgaagctggcatgaaaggtgtactggtgtattcagggataacctagtcgcatgcgttatctgaggatgaatcaggttttgatacatctgttgtaggatgtacaacctcagaggtatatgttgggacctccatggcgatggacccctgattcaaagtgctagcttgcagtgctctacgttttcttatgtactctaactttccctctttccgccttggtgtctgattatacaacataagctgttaattttggtcacctacaaaatatga

SEQ ID NO: 192638 - DNA, 538 bp, Zea Mays
tgaggagttgattagattctgccctgacctaaagatacttccttactggggtccagagaggatgattcttcgaaagaatatcaaccccaagcgtctgtatcgcaggtgagttgctgtctaggagagaaacttgtgcgagtgatccttttctttaaaaagcgtataacctgattgcctaatcatctaaccttttctctcttaactctgcagagatgctagctttcatattcttattacaaactatcagatacttgtgaatgaagagaagcttttgagacgtgttaaatggcaatacatggtattggatgaggcccaggctatcaaaagttcaagcaggtgactttacatgttgaaatctctctctctctgtgtgtgtgtgtgttttcattgatttattaaggaactatcgtatatgccttcccttgcttgacaaattatctctctgctgcagccagcgatggaagacattactgagcttcaactgtagaaaccgtcttcttcttactgggacaccaatacagaacaatatggctgagtt

SEQ ID NO: 192639 - DNA, 284 bp, Zea Mays
ggaccatcctggaaagaaactcaatgtcatgttaaaacccttgattgaagagttgaaggagctttggaaaggagtcgaagcatatgatgtttttaaaaacagatattcaaacttcgagttgcgtatttgtggttggtgcatgactccatggcgtatgctattttgtcggttggagtactcatggtagattgacatgtccatattgcggttcagatacagattacttccgtcttgctccttgtgaaaagatcacttacttcgattgtcacgaacgttggttgccc

SEQ ID NO: 192640 - DNA, 773 bp, Zea Mays
cattagacagtgggtcgttgacagaggcaccatcaccaaagaccttggcatgtgtgtccaccaatgtcgcacatggcttgcaatctagcatgccagtgcgctctaggacatctagggtgtactaacattgctaaagattcgagcgacgctcaacgacatccccaggaaatgatgaagaggacccagatccttcattgtgacttcttgctatgatgatacggtgcaacatgaccgaagaagaggtagtgagcacaatgtcatcaacatacaggaggaggtacatagtggcactgctatgccaagagatgcacaaagatgtccgacttagccacaacaaagcttagggagagcggatatgtagcaaacttgctataccaagcgtgcggggggtgcttcataccatagagaacttgttgagcttgtagaccatgtcaggatgagcagagtcaacaaagccgacagatttactacaatagacagtctatgtaagagtcctatggaggaaggcactcttgacatctagctgatgaataggccaaaaacgagagatccaatgagacaccagcacaaacagtagcatgcttcaccactagattgaacgtctcatcgtcgtcaaccccgggacgttgagtaaagccctagagaacctagcaggccttgtacctatccagagaactattggactttcgcgcatgtgtctagacccacttcccagtcaccactcaggcactcaccacgttgcgacctggagaatggggcaccaaatcctaggt

SEQ ID NO: 192641 - DNA, 746 bp, Zea Mays
gtctgacagtaggaagggcagatcacgcagcatggatatttcaacagattctgttgctaatgagttcttggatatgcttgcaatagagcatatcccatttgggcaaccctcagatagtgatcccgagtcaccgagggaacgactttggaagcagtttgaaaaggaagcactagcatctgacaaagctattcttggtttggactttgatgatggaattgaaggacctatttgtgagaatgttgtggaggatttcgatctctctgcaatgatacatgaggctgagctcgagcttcagaatggaagtcaacccattgataccaaatttcgagctaagtcgctggaagacgaagaaactgaggccttaatgcgtcaatttgggctaaatgagaagtccttccaatcttctcctcctgaaagtagaagtgggtttggtagccccattaacctcccacctgagcaacccctggagctaccaccattggctgaaggtttaggtccatttattcagaccaaagatggaggatttctgcgatcaatgaacccagccctgttcaaaaatgcacaaaacagctgcagcttggttatgcaggcttcttccccgattgtactgccggcagagatgggatctgggattatggatatattgcatggtctggcatcagttggaattgagaagttatcaatgcaggcaaacaaacttatgcccctagaagatgttaatggtaaaatgatgcagcagattgcct

SEQ ID NO: 192642 - DNA, 287 bp, Zea Mays
agtcgatctctcttgctatccaagttgtgtaatttgccgtgttatccactttcatgttagtgcaaatgagttgatgaggaaatggcttgtacgcttatgtgacacattatataactatgatggttacaacaaagtggcgtacctggaagcagcagttttggatggtcaaattactgattttctggatgataacactgagtgatctctctcactggcctgggtgttggggtgtaaatcatgtcagttttcgtcaaaccacttactaatcgtttttaacaatgttttca

SEQ ID NO: 192643 - DNA, 1344 bp, Zea Mays
gggggtcgccctggacaaacacaggagaaatatcaacagaatcattccctgtcgcagccaaatcatcagaagtcattcccccccccccccccccccccggcttcagacggagtctgggagactaccacgtccacagccggagagaatgaaaggtgaggggggcaggtgccaccatggacccgctgcgatgcttcggaccttgagcccaaacggtcaaaaattgatctccttccccgaggttccccaccgacttccctgccgtcgttatcatcaccgccatgaggaggagagcgggaacgatgacgcctcctctgtcttgaagaaccaccatttactccggaatcctgagaagggatcaaccgatcactcctcaacgtcgagaaactaatagaaatctgatatacaaggccaagccttccatcttcagtgttaactcccgtaggttccacaatccaaaggtctctggcagcagggatggttgccgggtcaaaacaccatccagaacaacgaaagacgtcaagattccggagctccagggtatcaggatggacttcatgcacccaaacacactgattcagtagctgctgaactgttgataactcccatgcatgtaaaggaataccagtcagttgcacttccacagggatcggcaggctcactccagacgaacccaaaaacttggaccatttcttggacagcaacgagaacgtgctggatctgatcaagctccacctctctgttagtaccagagctaagcgctcatttggaagcatgagcaatagattggccttggtaaactgccgcagaaccaaagaagatgcctcaacatccaacttaagcgcaatcgcctctgcaatctctgcaagcggaatcaccaagtcactgataacagcaatagacactgcattcttcaaatcatcttcagcttgcgttagaggattattccagccaatgatgcaaggcacatgaggctgtactgctattccttccaaaggggtctcatcacttcctggcaagacagctccatcttggccttgaccaggatccgaaccacccctcgacgatgaacggcgcttgcgatggcgcctgcgacgtgggcgaggcgggaggggttgctgcgagtgtgcggcagttgcgatctccatgaccgtggacgatgtcgcgacggtcgtcgacacagtctccttcctcttctcaccttcagcactagggggtgaaatcctgcgccaaaccttattacgaccctcgaatcgacttggatgagaagccgggatgcggagccggttccaaactggcgctttagaagcctgctgcgaaagcttggttacagacgtcgtcttcact

SEQ ID NO: 192644 - DNA, 681 bp, Zea Mays
gcgactgttgtctcaacggagatgatgttgtccattgccaacaaggtgacacatccaaggaggcttgggacgtgatcacgaccatgcgggtcaaggatgactatgtcaggaaggcaatatgacgcgaggatcaaagtgtcaaggattactcgatgtgtttgggtggtatagtggcacaattggtgactcacgatgcggaggtggacaaggccacagtggtggggaattttctgtctagtgagtcagaaagggtcaagaagattgtggtggcgattcagacactactcgatatgtcaatactcacattagcagaggcgacagtgcagttgtacgccatggaggaggagctatagccgccatcgatatcggtccatcacaacgacaagctctacctcatagaagcatgcatgcgagtgacagcacacatggtggctctagctgtcatgatggtagaagcagccatacgagaggacacagaggtaactcgaacacatcatcttcttcatctgggcaggaggaggaaccaagatcgataatgaccaatgcatgaagtgtgggaaaattgggcattaggctcgtgaataatggccctggcccaagaccaagaaggagcaaatgaacgtggttcaagagtaggagacattgatgttgatgagaatcgcacataaaatttgacactcc

SEQ ID NO: 192645 - DNA, 414 bp, Zea Mays
cccagctgcggcaagaacaggccagccacccggcggtagtggcgctcaaggaggagctgacagcaggcttacgcggcgcgccttgggccattgtcgacgggctcctcacatacgacggccgcatcttcatcccatcggcatcaccactcctccaggagatattggtcgctgtccatggggacggccacgagggcatacagcgcactctccatcgcctccgtcgggattttcacttccccgacatgcgccgtgtggtgcaagacttcgtccgggcatgctcgacctgccagcgcaataagtcggaacacctcctgccggctgggttgctgctacccctgccgatcccgacggacgtatggtcggacatcggcctcgatttcatcgaagctctaccgcgtgttcgcggcaagtccg

SEQ ID NO: 192646 - DNA, 740 bp, Zea Mays
attctgcaaagcctgaggattttcttctattctttcctaatgaagagactgcagtgagggttcttaatgatggtaaagtgctccgaggacctcggttcagcttggtttttaaaagatggtccagattttctcatgcctcttcctcaatcatgtcgagcttggtggatgttgagattaccggaatcccggtgcatgcttggtgccgctcaacagctgaattcatattgggggattcttgtttcattgaggaagttcatccagacactctgttgcagaaaactcttccatcctttgtagcaagggcttggtgcttccaaccgaaacaattgcaccgtgacatgattctgcatattctggagccaggcccacaaaactctgaacgaagatgcttagcctataacataagcgtgagggtacttgcaatctgccatgatggtattagaggtccctcgctgctgactccaccggaggatggcgatcagactgatggttcggacgacatggatgaccagaggaatgatgagcctcggcgtttgggcagtcccttgccccagcgacggtctgttcaccttcgccttgggcctcccccgccgtctggacatggaaggacttcacatacatctaggggacatgaacagccactctttgacgcaccggagttacagcagatggcctcggataatgggatgatactccttaatgagttgtctgcagagaagccaaacagtctccatgatgag

SEQ ID NO: 192647 - DNA, 413 bp, Zea Mays
ctttggcaatccctcgatgaagtccagcgtgatgtcggccaaaaccagttttggaactagaaggggaagcaggaagccgcctggcagcatgtggttggttttgtagcgctggcatgtgaggcaccccttgataaattcctgcactgtagcacgaaggttaggggcgtataagtcgtggcggaggcgatgaagagttcgtttgatgccctcgtggtcgtcattgtggatgtcgcccactatctcctggagaagggcgaaggacgactgaatgtacaacttggagtcaaacgtgaccatgccatccaccatgccccttggcgtcgcacgacgccctgtactgatgtcatcgctgagggcgactagtgctggatcagttatgtgtgcttggcgcaggttgttgatgaaggagaatc

SEQ ID NO: 192648 - DNA, 516 bp, Zea Mays
ttagccatttcttatgagatgggaatatcttttggtttacttgcagcttaattccatgatggatcttggaagcgatgttcaagttcgtgctgctggaggtctcctagcaatattagacaatgagagacttcttgacaccattgagcagatggaaggtggagcatccattgcgatcgattctgtggtacagatctcattttatcctctgatggagataaattgaacacactgatgtgttgagatttaattatatcttctgtcatgggctgggcttatggccccagatggcagtatgccagatcagatccgaccttatatactgctgctgccctggccggccgcccgtacccaacagattgcccatgacaactttcagtggcagtctagtttgtaatcaacaaaattatatacataatttatttcctactttcaaggatatagttactctcacgtgtgtatctctagatttatggtgtatatggtccgacgaagtgtatatagacggagtatatgatc

SEQ ID NO: 192649 - DNA, 570 bp, Zea Mays
ctcactggcgggtgcggaggcggcgggggttctgagacaagtggttggtggggacgacggcgggacattcttcgagccgttcaacgtgacctacgaccaccgcgcgcttatccttggcgggaagcgcaggatgctcgtctctgcggggctccactacccgcgtgccacgcccgaggtgagcagtgaggttctgtggtgcttcgcgggctctggcgccacggcggtggggcggggttcgggcgagtgggctatggttatagacggcgctttaatagctcgaattcttcggtctcagtttttgattcgcgcggcggttgggttcagctgttgctgcggttggtcgggcgtttccaattgcgaattattccgttctacggagtactcataatgtcgctggtgttggtccggcgtttccaattatgagaatttccaggctcctcataataatgctgtttgttttccatggagttcgttggcgagcttgtggcatctacattcatgttattagtagcttccgatcaactgacacattttgcgctccagatgtggccgagtttgattgcaaagtgc

SEQ ID NO: 192650 - DNA, 336 bp, Zea Mays
ggtttgccggttcacaaatggaagactagttctctattgcaaggtaatacaaggaagacgaccttggtttgacttctgttttgttcgttgcactaacctgacataatcttttgtgtaaatagggtgctgataatgttgtatatgaacgattggctgatggaaatcatgatatgaaaaagatcagtagagagcatctagagcaatttggttctgctggcttacgtacactttgtcttgcctatcgggatcttagtagggagcaatacgaaagctggaacgagaagtttgtacaagcaaagtcatctttacgagatcgtgataagaagcttgatgagg

SEQ ID NO: 192651 - DNA, 634 bp, Zea Mays
ttgacgtgtgccttctggaagctaaaggctgtaggccacctgcccaacacgctccaactcctgaacggggcctgcatagcgaggaccaagcttacccttggactagggctctagtgagtgcgtcgggcaatggagacggcgaagccacacctagtcgcccaccctgaacttgagctcacgatgttggtcgtcataggaagttaggaacacttggtgtactgctgggcttggataagcgccgatgaacctccatgaggaaggcatcgctgtcacgtaggatggagcccaccacctccatttgagtagcctctgccatgtgtggtaaaaaaggggacatgggatggccaacaccgcctggaaggggatggcgcggagcgtcgtgtgggatgaggtattgcagcaatattctacccacggaagctagtcgacccatgcacgtagtcggttccttgtggcatagcggaggtacatgactatcatcttgttgatgacctctaattggccatgtggtcgcttgggatatagaagtcctcgcgcaggtactgaagggtcttttaggtcccttcgtggttagtggaatgggacagtgcagccacctggtggtccaaatcgtgctatgtcgacatgaagatgc

SEQ ID NO: 192652 - DNA, 350 bp, Zea Mays
gaataatgttggcgcttctccgcttgtgcatgcgtcacttgtagcagctagtcttcatctgctaacaagttacttctcttcccagtggcatgaacttgtccatattctgcttgcacatccaaaggtaacatgcaggtttatcataggaccactcatcactcttcaatttcttgtgatatactaatttcgtctgaaacataaattatgaattttgccatccatcttatttctgaagcaaagctgattgtcgagcccatatcgctttgcttttattttggtcctgatctgccaagttttgtttactacatctttgctaacagcttctctacactaatctcattgtatgattc

SEQ ID NO: 192653 - DNA, 473 bp, Zea Mays
ttcaacttctgggtccagcacaatctgagagagattatcccaaagctgcaaatactcaagtaaggcagcaacaccaagggcgcctttgaggcccgaaatccaaatattttgagtcaaagcatcaagaaccgttcggctgttggctcttcgtttgggaaccagccggaatagcagcggtgcaaggtccgcgatacactgtccatggagccatttatctgtccaaaaaaatgtattggctccattcccaatctcgctacaaatagcgattgagaagaaggactgcaccatatttggggcatgaactggaagtgaatcccaaggcttatcaggctcagttttttgaagccaaagccatctcatgcgcaatgcctagctaagcttctgaagatcagtgatgcccagaccaccaagctcctggggtcgacaaactttttgtccaagcaagcagactatgactaccgttgagctatttc

SEQ ID NO: 192654 - DNA, 719 bp, Zea Mays
tgccccttggttccgtgtaaggtatgcggggttaatcctagatccatgacttcgtgtttgtgcatggtcgttgtcgtggactgtggtgactcggtcgtggtgtggtcactcttctctagagagactcgcgattgtgttgattctcagttggggatttgtcgtttggtatgcttgagccctctggaacctgatcatccatgttttaggttcatgacttcgtgtttgtgcgtggtcgtggtcgtggtgtggtaactcttatctagagagatttaccattgtgttggttctcagttgcggatttgtggtttagtgtgtttgagccctcttgaacctgatcatccatgtttcaggtccatgacttcgtgtttgtgcgtggtcgtggtgcgggtgcggtaactcttatctagagaggttcgcgattgtgttggttctcagttggggatttgtggtttagtatgcttgagccctctggaacctgatcatccatgttttaggcccatgacttcgtgtttgtgcgtggttgtggtcgtggtgtggtaactcttatctagagagatttgccattgtgttggttctcagttgcggatttgtggtttagtgtgtttcagccctcttgaacctgatcatccatgttttaggtccatgactgtttgtgcgtggtcgtggtgcggtaactcttatctagagagatttgcgattgtgttggttctcagttgggg

SEQ ID NO: 192655 - DNA, 299 bp, Zea Mays
tgcaaaacataagaggggctatcagtgttagtgtgttaactgatttcatcagagtctaggatcttgctacaaattggactttgcacccaggacaggaggataagcataaatattatgccaagtcggcatatgatggtttcttcttaggttcaacaacctttaggtcacgggagaggatttggaaaagttgggctcctggaaaatgtaagttctttatgtggctcgtggcacatgggcgatgttggactgctgatcagctagcaagaaaaggtctgcctcaccctcaaagttgcatgtta

SEQ ID NO: 192656 - DNA, 425 bp, Zea Mays
caatataagcagaaatctccttaaaaagaaggtattgattgggtgctatttttactccagggaggagcagaaaaaggaatagttcctactggctacattggagtaccagctaatctccaacaatttgtaggcaatcaaacagcatttcggccaagcattgtgtacatggtaccggtatgtcaatacagatggtcatatatgctttctcgtatctttggtgaaatcccgcaggcattagaaaaccaaatttccatgatacgaaaatagtatggccccctcatttggagtcgatgcttggcatcactaagaattgctttgacaacaggctctgacagtgtttcttcctccaccttcctcatcttgtgttcctctgcttccgtctgtgtttcaccatgcagccttccccgtgcgtgctgcatcagtga

SEQ ID NO: 192657 - DNA, 280 bp, Zea Mays
cagccgccgttggtgattctcgtcactgtgtggtttccgtcctcggcggtggggcgagtaggatcgtaaccgtccagggaagccggtcgcgcgttcaattggagttttgcgtcattgtggtgtgcgaattgctcgccgccgtgaccactgcaggcgagttccgcccctccccgtgggcgagcgtctccttacctcggccgaccattggtgagtctccaccgtgtccgttcctccttcctccgagttatgctctagcgaattgcagaatggtgtagctaag

SEQ ID NO: 192658 - DNA, 459 bp, Zea Mays
gagaagatggaaagggcagtacgaatttctggttgtttccgagctcacttgaagaacagcgagcgcctcgccgtgactcctagctccatttataggcacggcggcccaacagacgacccccgaccacggatagcagcgcaagcgcatgcctaccacgtcggaaagagatacagtgagggagatggaggcatgggcgacaccgcggcaaaattcacaggtcatggtggccgccggtgaaggctccggcagggctagggcgatggcgccacgtaaggttgtccctccccgacgttatccgttccccactgcacacaaacccggacggcggcggcgtgaattttggcgcaaagaggtcgccggcggtgaggttgtcgtgctggcgttctgatctacagagaacactgtaccatggaggagttcattcagatgcctgacagagccttttgaagcttagttttc

SEQ ID NO: 192659 - DNA, 286 bp, Zea Mays
cttgggaccacctactcgcccggttacctataaatatccccgttctgtacacgcataacaagatgctatagtttgctacctatcgtttgtagtgcacctgagccctatcaacttccgagtttttgggtccgcccgtccacgtgttggcaaatccaaaatttggcgcccaccgtttgtgctccgaaaaccaacacccacgatggctccaaaaaagtgactactagagctagctcctccatggacgaggccacgaaggcggccctcgtcgacaagaaaggcaaagcag

SEQ ID NO: 192660 - DNA, 863 bp, Zea Mays
atgcagttccagttcacaccacagcatttggtgagattgttacagatcattgtcgatggaagttgtgatatggctgtaagacaggttgcaagcattcatttcaagaattttattgcgaaaaactggtcacccaatgatccaggtctgcagatgttattggcatgccgttgaatttgcttatgctctgctaactcaaattaatatatttattttgtttatgtagatgagtctccgaaagttttggaaagtgacaaggccatggttcgtgaaaacgtacttggttttattgttcaagtgccccctttgttaaggtaaatacttagtagtaccctaaatttcctcctaactgttggaatggctacaaaagtgttaccgatcaggctttgacattttcagtgccaacatggttctgattattagcacatcaaccttatttcatccccctgttatatgataatgattgtgctaaattagatatggagaattgctgttttgagtattctttgtttgtctttttgattgcaagtgaagcattaggtacaaaaatcttgacatatcgtttaactcatacttgtttggtcctgtctctttaggccttatgggttgactatttaatagaaatatcagttcaaatgtttttagacactatgatattgtaataccatcattaacatttctcttttgataaagttgaaagtctgccatcttgtggtggaaatgttataattttgtattgtcatttatggaaacattgttttaacgttttctggttatttgtagagcccagcttggagaaagtatcaaaacaattattcattctgattatcctgagcagtggccaagtctccttcactgggtttcac

SEQ ID NO: 192661 - DNA, 297 bp, Zea Mays
gtgctgaaatctaacttggtgcccatagcttgctgaaggctcttccaaaattttgaagtgaactgtgtccccctatctgacactatcttccgagggataccatggagtctgactatctctttaagatatatccgggcaagggtggctcctccaatggtggttttcactgggatgaagtgggctaccttggtaagacggtctattattacctagatagagtcattccctttttgcgtccggggtagtccggttacaaaatccatgcctatttcctcccacttccattcgggcactggg

SEQ ID NO: 192662 - DNA, 735 bp, Zea Mays
gagttcggattctcgttgctcaacagaggacatcgacaattaattatccggcttctgcactcgtgttgtgttgagcgggtggacggtggagagatttgtggccgctcgcggctgactagatcactgctgatgaaatttggtgagtgttagtccgtgtgaacgggacgccctgatgtgatctctatgccctgttgtgtagatgcaagggatgaggtagatcctgctgccgtgcatgtggtttggttgcaagatctccagatcttgcgagcatgtattgcgggccccatgtatttctggggatactcaacatgtgatctggtgcaggagtactttagcagtagaatttgtgtgagtccctcatcatgggggtttttattatggtctggtaggtgtactggagtggagtttgaaaccacagtaacttccattgttatgttggtctacatatgtgtttggtgatggaactatttgttggagtctgatgttgtagtgctgtaggttctggtgttttcccttggttggagttccaaggtgcgaaaggtgttctggtttagttctgccaccatgctttattagtttattgttacaaggactcctgaacatgccagcatttctttcttgagatcctaattttttttctggatttcagcatttattgtattccttcaggctggttttgaatcttcaaaacctcttgttctgttgtcatggaaacaacgtggttgaagttccaag

SEQ ID NO: 192663 - DNA, 1079 bp, Zea Mays
gtggtcctgaaggatctgcggtgaaagtgagaaagcaggatattaagaaaggctgcgtagataaaatgtttacagctgttgatcatcaaaagaagacaatatccattaacgacactgttaatgttgtggaagggccatttcaggtgaaaattgaactattaatctgacaggatcctgctattggtctccaattttgtaagcagtatgggaattgtatgttttttgcttttatttcaaggaaacattcatttgagatattttaaagaacgtgtgaattctttcacagagtattggcaatgatagttttaacattgtgcatgtactagtgctgctacattgttcttatctaagacgtattccactgttattgcagtacatgtagcatgcttttggattccagcatgtgtttttggagtattcaagaataccatattttccacttagcacacttgtggtgtgattaaatatatttgcagggtaagcaaggggtcgttaaacacttgtacttgggaatactgttcatttataatgaaagtgaaagtgagaactgtggatttttctgtgctcaaagcgggtcatgcgaaaagatacgaaagggtctgggaagctctactactgaaagttcggtatgtagatatgtgtatctacttgtcaaagaattgaggatgttctttgtgtcactttgctttctatgtaccaggactttacaactcctatgtttcctgaacctgcttatgagcaaaatgggcatcgggacagtaagtgtttcttgatttcttctgtaatatttcctgcatgtaagtatatcggtctgatttccttcataatacagctgaaaggccttacaggagcaccagagaacaacttttctctattgggcagatgctgcgcattagaaagggtcctttgaagggctacctctgtcgagtagttcggatatttcggaatgatgtgactgttaagctagattctctactgaaaattgttacaggttggttagcttacctattgttggagctgttatttggacaatgactgacttcgccatgtgtgcagtacaagctgatcttctctcagtc

SEQ ID NO: 192664 - DNA, 339 bp, Zea Mays
aaccgtggtgcggttgcatgcttcttgcgtggcggtccgccctttcgaccgctggtttcggcgaggatgagggaatgcatataaccgcggggcggttacatgcttcgcgtgcggcggtttgcctttcttcgcgttttgggtcagctcgtatgacgtgtgggacctagcccctatgtcgtagggtgagaaccctggagcacgttgatggagactttgcccgtgacgcttgggggtgtgagtgaggagatctgcctttaaaaagggatcgatccctcgggcggtagccatgccttcgcactcctctcattcatcgcgcccttccaccttccgagcccctag

SEQ ID NO: 192665 - DNA, 410 bp, Zea Mays
ccggagacttacaggtgtcatccagtaccccaccttcaccaagcccgacatcacctatacagtctagcaggtatacctctacatgcatgatccataggagccacacttacagttgtcaagcagatcctccagtaccatcatagtacgtatactcgactacgggcttcttcgacgctcctccatccacgagctaatcatctacagtgacactgactagacagggtgcccaaaaacccgcaaatccacctcaggatacgatgtgttccttggaaacaacctcatctcctggtcctccaagcgttagcccatggtcttccgccccagcgcctgaggctgagtaccggatcgtcgctgatggcgtggctgaagcgagttggctccgacggctcctccaggagctccacatctcg

SEQ ID NO: 192666 - DNA, 440 bp, Zea Mays
agagttattagatgatacagccggcactggtaatcgatctagtaaccaggtcagtgagaaggaagctgctatactgtggggatcttttttctgctaccctaacatgaaaggtgtacatcaagatagtttgtcactgctgaggaagttaatcatcaactttgatcggttgcttgaagtgggagaaggtgattttacttgaagatttctttatattactatcactgcagttggtttttctaaatggcataaattcaaaggatttacatgcagggaacatgaatggtcttccaatgactacctggagaggtctacttggtgcagcattgtcatcgtaccacaaactactgttggtcaacaccagcagaaattcagaatttagttttttcttatcgcttgccaagagtcacagtacatgcccacaagtactgtctgctgtagct

SEQ ID NO: 192667 - DNA, 625 bp, Zea Mays
atttcttgtgcctaagcaaatgtccagtgccagcattagaattagctctcaacctagctttgcaaaatttgcaaatacctgcaatgcacaccttcttaccattaaggttttctgtgacttcagtgaagtcatcccaaatagcagatcgacgtttaccagtgctagaagaagtcaatgaatcaagttcattagagccagcagcatcacttaccgacctgggattatgagtgctatcgacaccgaacaaggcagcaacatcatctcccatgtcgtcgacgtcatcgggaagctaccctaactcaacgagctcctcgttgatggttctagggtaccgaccgttgtcgtcgtcgtcatccataaccgacttctatctcggcaccgtacctcgacggcagtggcggcactagcacgaccacgtagtcagccggcgacctaccaaagtcacaagcaagcagcgagggttagggttagggattaggacggtcgactggtggtgatgaactgaggaagagtgagtgagtgacataccagccaagccggagcccggagccggagacgagggtaaagtgcacgacgacggacgacgcgagagggagagccggagaagaggagattagggttaggg

SEQ ID NO: 192668 - DNA, 502 bp, Zea Mays
gtcggtggttgcctgtggcagggataggggggtacggtgccgaacccgcaaccagacccaatcgcctaccttgtaggacaactttcgatcgtagtgtgccttgtaggatgcttgggcctgctccagtctgtaccacgcgtccttaagcatctcatcgtgttcagtcattgtcttggccaccgcttctacacgcgtttctccctgcttgtatgaccttatcgttggcggatcacgactatacaccagtttgaatggcgtatcctttagggatatctggaaggcggtgttgtaggtgtactccacccagggaagccaccgcagccattggcgtggtcgatcccctgtgaaacagtgtaggtacatggatatcaccttgttggtggccttgacctggccgtctgcttggaggtggaaggcggtggtcatgtggagcttggcatcggagagggtgtggagctccttctagaacgcggatgtgaacactgggtcgcgctgcggaatt

SEQ ID NO: 192669 - DNA, 486 bp, Zea Mays
ttaccttcaggccaagctcgctgccaacttcggccctcctatggcggatgccacacaattttggagtctcactggcgccctttagtacttgatgttcaccaggcctgacattgcttatgttgttcaacatgtttgtctccacatgcatgatccgtgggagccccatctatgggatgaagcgcgttctacgctatcttcagggcactccaattcatgggcttcatcgatgctcctccgcctttgagcttgtcgtctatactgacgttgattgaacgggttgtccataattctagatacacattggtccacctcgggctatgctgtgtttatcggtgacaaccttgtctcctggtcctccaagtagtcagaacatcgtcttccgcttgagcgctgaggcggagtatcaattgcgtcgccgaagcttcctagttgtgtctgcttctctaagctaagaagccatgttcccaggacaatgggattgaggaa

SEQ ID NO: 192670 - DNA, 473 bp, Zea Mays
tgtcgctccagtccgccgcccgcgctgctgttgggaaggaaattccgcttcagtccgccataccggaaccttccatgaacgccctcctctactccgcccgttctccaatagtggaaggttggccaggatccgcgcactgtcgtcatggttccttttcttcgcgcgacatcgacggtggggaggatcggcgcgccctcctctgctccgcccgtctccaatagcagaaggttggggacgatctgcgcaccgccatgcttgcgcgtctccaatagcagaaggtcgcctacgatccgcgccgacgattgcgcgctcagctcctccatccccttccaagcgcgttgatctccaataccagaaggttggatcgtagcctgcgcgtgccctcctccccatgccgatccgccccaccctcctccccactgtccccgtctccgatagcagaaggtcgcctaggatccgcgccgacgattgcg

SEQ ID NO: 192671 - DNA, 340 bp, Zea Mays
agcaaaacaaacgcagttcatcagttcatcaattgatattaacatatgaacataatcatcaggttacctctgtgccaaacgcagctcgacagatcaaggcagttcaagacagcagttcatcagtgagcaaaacatccggataccagcaacagcaagcagatccagatagcgatttcccaacaaacaacatttcagttgtgagtagtagatccggtgtaaactaaacagttcatcagtgagcaaaacatttcaatagtggatgaggttacctctgtgctagacagggagtgacagtgagcatcagatccggtcaccagtgatagtgagcagcagatccgga

SEQ ID NO: 192672 - DNA, 739 bp, Zea Mays
ttctcttgacagggatgtgtgccatgacctggcaataagctcagtaccgcagaatttgggctaggcgaacatctggccttcccatggtgtttatctgcgagcctactctgctgggctcggatggatgaatgatgatagtcactaattggggtagattgattgctctcaagagatctgctgctggggcttgcagaagaatgtgatggagatgagaatagtacagacctgctagtattggatggagatgctccatggcttctagcgagctcatgcttttgttgctgagaccagttagcaagaagaccccactcaagaactccaacattcagcgccttgtcttgaagatgctcagaagtttctttacgctgtaaatatgaaggaacatttgacatatgtttgacaagttcatcaacagtagttgcctttcgaccaggccatggttttgagcccttcatgcatgcagccctttccccaccccaagactctcgttgtcttcggaacttatcattcttcacaactctaactttatcttcaaattttccatctacatttccattgactggtgtgaccatgtcctttggcacgcgtacaatttggtcatgctgtgaatttcccttcttttgcccatctcgacctgatatgatcttcacattcctttcgctgctaacctgaacttttgttggcatctttatgatgggtgaacatatgaagcagaagtttcaggtataacttggcgtat

SEQ ID NO: 192673 - DNA, 303 bp, Zea Mays
caacggtggaaatcgagtaccggttcacgggactttgatctgatctgggccactgatcgtggacggacgagcgagatcgtttctgggttgttttaaatctgggacgtcaatcgctcgttgggtggctcggattgcatacaggttcggtatgagtaacttctaatctgtgccgttgaatctgatcggacggcagatattcatccataccccttcgtcgtgcacttctttcaaaagagaccctttgttttattaaaactaacccaccgtcccttatagttctaaaagtattacagttgggtcctg

SEQ ID NO: 192674 - DNA, 308 bp, Zea Mays
ttttatttgctcgcgctcttgttccgcctgtcggttttctcttcttttcttcaatggcagatctagtagtatccagtaatccagctagacccgacgcttcatttggtgtttttttcttggctctcttcttcgccgatttccctgcgccgtagttgcttttcatcgtcaaatgtggtgtaccgtctcgtctggtgatttccgccacacgcgaatgtgcctttcttcagatggtgtttcatgtctgtaaatcctcaaattcggaccgtaacggccactccgtctctcacagctgcatgccacacgcgtcg

SEQ ID NO: 192675 - DNA, 442 bp, Zea Mays
gcgacagcggatctccctgcctaaggctgcgtaggtgtgatataggaggtcctggttgtccattcatcaaaatctgcgtagatgtcgtggagagcagcaaactaataatgagcatccattttcgctcaaaaccaagatgttgcctaacctctaataagaaagaccacgacacagagtcaaaagctctagacatatcaagcttgaggagaacatggggttccttgctcttgtgtaatgttcttgccagctgctgcaccaacaggaagttatcgtgtatactccgacccttgataaaagcagtttgatttcctgagatcatccctggcaacaaaggggccaagcggttggctaataccttagtgctcagcttagcgaagctgtgaatcaagctgattggccgataatctttaacggtagtagcatcctgtttcttgggcagcat

SEQ ID NO: 192676 - DNA, 412 bp, Zea Mays
tgctcatgcacaaaatggtgtggctgaacgaaaacactgtcatgtcatagaaactgcatgcacccttttgatatcttcttttgttccttcacatttttggggtgaagttgtttctactgcggtttatctcatcaatagaaaatcgtcatccaaactctctggcaaaacacctggtgaactcatttttgggactcctccacgatatgaccatcttcgagttttggatgtacgtgttatgtcttgttagcacctcgtgagtggactaaattgactgctcaatctgttgagtgtgtttttcttggatacaaccttgaacataaaggctatcggtgttatgatccgtcttatcgtcgcagtcgcatttcacgagatgtgagctttaatgaaaatcaacccttcttttacaactcag

SEQ ID NO: 192677 - DNA, 282 bp, Zea Mays
gaaataacatctacgcctatatagagaggatggatggggtcagacagttgcgcggaccattgcgcgacgaggcaacgtgaaacgagttggttgcgactgcgttcgtgtcgcacacatgtgtgaaccaaatggccattgcaacaacaacgaatgcacgcggtcagaggtagacggggttagacgaggatagccgacgcgaacagcatgccgttcgcgagaagcggttcagtgatctcacgaaaaagggcacgagatctagaacaggctcgacgagaggaaaat

SEQ ID NO: 192678 - DNA, 353 bp, Zea Mays
acattcctacccaacagtgcctgcaataacactatcttccaaaaataggatataactgcgcgatactgagataaccaatccatacccaagataacatcaaatgctcccaaggaaatcacaacaagattggccgaaaagacctcatcagcaagaatgacggaacacccctgacaaactgaacagctactaatggagccattagcagaactaaccaaaattgggtgacccaacctctgcatcgaaagaccagcccgcgacacaaaattctccgaaacaaacgaatagctagcgccagagtcaaaaagagcatgggccacaaacgaataaactgaaaccgtacctgtcaccacgtc

SEQ ID NO: 192679 - DNA, 589 bp, Zea Mays
ggctgatctgtcagatagctttgtcagaccaggtccaaccaacttcacatatgcaacacacccaaaaatcctcatgtgcttcacgttgggttttcttccatgccaagcttcatatggggtcatgttgttcaggctctttgtagggcacctgttcaacacatacactgcagtacatatagcttcgccccaaaaatcagaaggtagtgccattgtcttcaataagcatctggccatctcaactacactctgatttctcctttctaccaccccattctgttggggagtatagggagtagtagtgtaatgctttatcccaccttcactgcagaaaattgagaatagattggaattgaactctcccccccgatctattctcaatgccttcaacttgccatcacattcaacctcagccctgttctttattttcttaaaatattccagagcctgatccttgctcttcagcaattccacccacatatatttgctgtgatcatcaactaccagcaaaaaataggatgctccccccagagactttggagagatatgcccacacaaatctgcatgcacaagttctaagcccttttctgcc

SEQ ID NO: 192680 - DNA, 400 bp, Zea Mays
gcggcggccatgctctttgtctcctgctctaaccgcactgctcgcagcagcttgccggccattcgtgagatgtgatcagggcttagccccccttgcatcaccatcagcagcttccccaccgctttcagcgcgaaaaccatggcctcctcatcctttgctccccgcagcccatgcagcacgaagacagtgccactgtcagcctagtgcaccggcttaccggtgatgaattcacacgaacatctggataacataaagtgttttgcgctgctgaaagttgcagtgatttcttgtttttattggaacttaaataacggattacagaagctgaaacatggcatgtatctcgaccatgaatgtgcacggccagcgagctgctcatgatgtgcaccatcccgcacac

SEQ ID NO: 192681 - DNA, 780 bp, Zea Mays
gcgtggtggacgtcacggtcgtcaccccctacgaatcccaggtgacactcaaggtatgtgttgtgttgtgcgccatcaccgtatcatcagttgcattccttcctaatccttcttctcccacacttgattgagcgcgttaacgctagctgattgatcagagagacgagtgactgtgctgtgctgctgcgcactgattgattgtgcaggggatatcgacggaccgtgtgctggacgtgcggaggctgctggggtcgaacgtggaaacgtgccacctgacaaactattcactctcccatgtggtaataatgctcgcctctcgcactctcgttccctcaactgcctacagtactagcagcaggcacggctaattctctggctgcgcggtatggtcgtgttgcaattgcattgcaggcgcgcgggcaccggctggaggacggcgtggaggtcgtggcgctcaagccctgcgctctccggatcgtcgaaggtgagtgggtgtgggtgggtggtggtgaattggtagcacaatcgagttgggtatcgtagagccaggtccctcccacccagtacacgagaggacgtacgtacctggctgccgtcgtccaggcaagtacacgtacagcgcgccctctgttggtctgttactctgttatgctgcgttcgtagtacagtacagtacaggccacgcaaggcagttggccccagtagtggtacagcggtagcacgttcgaccgcgtaatggtagaacatggtttgctaccggccgatcagagcagatggccc

SEQ ID NO: 192682 - DNA, 407 bp, Zea Mays
tttgtgctaatgctatcatactttcatagtaagcatgtcttaatcgaatgcactacataactaccgggatgcaaacagtctattaaaatgttaaaaagatactttttttcaaagcaattactaacaaagaaatacatgataacctgcggggaagaagaacacaatagtctctggcgatgatacgtgctctatgtataggtgtgtatatatacacgatgacatttgtattgttgcttggatgttgtcggtgaaaacagtgcaaatattttttccaccattaattaggaaaacacgatcatattgaccttttgctgccaataactgtagttctcgaccataacaatgcaggctttaacttagtaaacatcatcatatctccttgttcacagggggacatctgaatgtcc

SEQ ID NO: 192683 - DNA, 289 bp, Zea Mays
gcgtatttcgaaatttactgttaagcattgttcctgagcagtcattgactttatttctcgaatgtgcatctaattcgtgatggaaccacattgtctgcagatgtttcggttaagagctgcaatgatcctaaggtggatgaagtggttgttgtcataggggaacaatcaacaaagtcccatgatggtgagaggcattcccaaatactctctcttgttccttgaattgtcgtctgtagttattgagattctgacaatgtcatcttgatatactccctccgtttcgttttag

SEQ ID NO: 192684 - DNA, 426 bp, Zea Mays
cttagattcatgccaaagtttgagtaccgattaaggtttctcacacatgacaaaggcagagaattggcagtgggcgtcttcaaaagattgtcattcgttcaacaaatcactgtcgcttgttcacacttttgtgccatgctcgcctctttcaccttctacattgtctcacttaattcccgactgcaaggaagaagaaaaaaactgtcataaggtgctacatagaaatttttaatctctagttacaaacaactgtggtagaacttaaattacgcacatatagtcataattcttcttcatgtgatagaaagtatgcaaaataatgagctagccaaaagaaagaaatatttttttatcagaaacaggtataaaaccaagttgggttgttcatctttactactctattaagagtacaacgaaggcgtccac

SEQ ID NO: 192685 - DNA, 272 bp, Zea Mays
cgttgcaggagtatcttcttcttgaaccaacgttcttggttctggagatgcagttttcctctttcctgcagtggccaccttcggctcaggattcaactcttcagggctaagtttttcagaatctccccttttctttttggttaccttggcgacctcttcgtcagcagcgctggaaattctttttcgctttgggcctccagcatctccgcccaggcgatcataatcagcatattcaaaacctatggcatcaagcaccctgttcagccttcgct

SEQ ID NO: 192686 - DNA, 499 bp, Zea Mays
cccaaatgtggtagatccaaggaaaagacccatataagatgattttgcagagtagctaccattcgaagataagctgaaaatatgtctatcctcagtgttaggctgcagcacaaaatttgcgagaatattccagaggtgtagataatctacaatggcaccaactgtaagagctcctttgatgtctgcaatccatcgtctgttcaatagggcctgctgcacagttcttctgttaataattctttttggaataatgctgaataatcttggagcaatatcagatacccttttgccatggatccatttatctatccagaacatggtgttggtcccattccccacctcagagatcaacaccttggagaagaaggaacgggccatgctaggaacttgaatggacaggctagaccaagggcgtcttgggtcagttttttgcaaccaaagccatcgcatgcggagggcccagcagagctcaggaaggctagcaatacctagacctcca

SEQ ID NO: 192687 - DNA, 354 bp, Zea Mays
cgaggccgccaaaacagcgccgatttcagaagtaatgaagcgatcaggtttggttgtggcagaggagattgctgacgaaggtgcttctaatgccaaagctgaacaaactgtggttgagggtgaaaatgttgatcagagcaaagaagactatagcattctgatcccaacaaagcctagtcatcttgattttgaaaaatctattgtgacggaagatgacatgcctatgatgatgaaattgggctattttggagaagctaagagcaaacttattcgatttgctggagaagaggtaatcccagagccgaagaaggatgaagttgtcgttttcaagagcttcttcagagcagggcttcg

SEQ ID NO: 192688 - DNA, 598 bp, Zea Mays
cgtgagcggaccaaattgactgcttaatttgttgagtgtgtattccttggatacagtcctgaacacaaaggctatcgttgttatgatccttctactcgtcgtattcgaatttctagagatgtgagtttcaatgaaaactgccccttctttcacaaccagtctactcactcctcatattatcccacagagtctacttctttcatgtgtcttccttccattcctgcatctgcacaatcatcttctatatccacatctgatgttctcattcccataacaccaccttccacctccacgtcatcttcttcttactcttccaaaccacctgtcattcaaacctacattcgtcgttcctgctctattcttgcggttggtcctgatactgatcatgtacctaattcttgtcctgacaataatgagtctaatgatgtttttaatcagggatatcgtcttcgtgatcgtggtaccattgaacctccagatcgctatggttttccacgagctggtgtggcaattgttgaacccactacatatcaggaagcttctaggattctcgagtggcagctagctatgattgatgaattgactgctcttgaacgca

SEQ ID NO: 192689 - DNA, 278 bp, Zea Mays
catctaaatgctcaatacaatacatgaatcattggcgacaatccctctgacatggtactagagcctaacaattaacaaatccattctgcttttgccgcctctctaaccttccagggtgcgccacctacctctccccctctcttaggctactgcctccctggtatggttgtgccctcccactccctagctacactgctctagtcaacctcaaccactgcagcctagtgccacttctcttctgcaatggcaccacctggtgctacctacggaatggcggg

SEQ ID NO: 192690 - DNA, 306 bp, Zea Mays
ctcagtcgtcgtcgccgcctccgagcgccagcccaggccatcacgagccaccacccctgtgcacagaccataaccagcagccaaacactgcatcgacagcacgcgcgcagccactgccaagcgcaatcgtctctactcacgcctgacgccgccgctatcacgtgccaccctcctgccgacaaatgcggcctcctcattgccaagcgcaacccctcacttctctcttggctgcgccaccatgatgtcgccacggaatgcgcagagccgccgaggagagcaaagtcccagcgagaaacacaggagctc

SEQ ID NO: 192691 - DNA, 322 bp, Zea Mays
gccggcgaccgcgcaccggatggtgccggcgcggcgcggaggctggcgccggccgctcaggaggaacgagtgcagcggcacgggcgccgccaggaggcgcttctgcgccgcggcggcaaatggggtggacactagagacgacgacatggcgcctgctcactggacggagccggcgggcggagaaacgcacgcctgaacacgaacgccacgctcgaactcagtcagtgtgtgtgttggggtgttctacactagagtaaggcgcctgttcttggcttgtggctggaggattgttctcggtggcctgcgcctgttcttggcggcc

SEQ ID NO: 192692 - DNA, 434 bp, Zea Mays
atctttcggtattattgaaaataatcgttaatgactatttttgacaaaaatgaggttgtgtggcctttgattaatgaccagagactcgtacacctaccatagatcacattcttgtatttctggtgttgaccatttgtcggttaaaaatccgtatgtgttagcatttagtattattgaaaatgatcgttcatgttattttcaacaaaaatagctgttgtgtggctattgattatcgactaaaggctcatacacatcacctcaaatatttttcttgccataaatcacattctgttggacaccatttttatgtggtaccaagtcccccaaccttaaacacacttaaatcctaatagataatctactacttttctataaaaggtatgacttaatactccaaggattaaacaccagagtactccaaagttgagctaaac

SEQ ID NO: 192693 - DNA, 331 bp, Zea Mays
tcccctggtttcgcccgccgcatcgcccaccacatcgcgcccagtgctctgttccgagctcccatcgaggtctggtagaaatcgatagaggaagagggcgagttcgctgtggccgaagaagcttcaaggcgatgtggccatggccctcggctggtgcgacgtcaagcggacccgttggtcaggcaccgaacgccgaagaggtgagcgcgcagcggaatcggatggtggaaacctgggcaatgtcgagccagggagcagaggcacaacggaggagcccggacgccggagggagctcagactatatctcttggacgcgcaccaaatctcaacg

SEQ ID NO: 192694 - DNA, 565 bp, Zea Mays
ctgttggcagtgaaacggatcatcagatatgtagcaggaacactacaccatgggtgtcagtatggaagggagagcaactggaaactgttgtatgggttcagtgatagtgatctgggccaatggcgtcgatgatagaaagagcaccgctggagcaatgttctttcttggtcagagtccaatcagctggatatctcagaagcagagagttgtagctctttcctcctgcgagaacgaatatatagtggcagccacagccgcttgccagagcatctgactgaaacggctgctgagtgatctcagaaatgcagcagctgaaactattgatcttaaggtggataataagtctacattggccctcatcaaaaaccctgtctttcatgatagaagcaagcatattcagacaaggtaccacttcattagaaaagctgcagagaatggtgatgtcaaactagattacatctgcacaggagggcaactcgcggatgttctgacgaaaccatttccacgtgatcgttttcagatggtgcgaacacaaattggcatgagtgattttggagcataagct

SEQ ID NO: 192695 - DNA, 295 bp, Zea Mays
gtcgtcatcggccacgagcatttcgcaataccctgctacgccattgcattggacagtttcgatgtcattctaggggttaatttcctccgtacgttgggtccaatcttatgggactttgacgacctctgtatggcattctggcgtgggggtcggcgggtcttttggaagggacttgggtcaccacgcaatgacatccatgaaccagtcactcgttcactacagatggcagaccctcagatgatggagcaactattgcagtcatttgaatcagtgtttcaagaaccacaaggacttc

SEQ ID NO: 192696 - DNA, 428 bp, Zea Mays
cagcgattgggatagtcgaggcgaatgtggagtatgattaatcttgttggggtcactggtgtggttgatgtcttgtgcgtagtatggggacacgtatgtgcgtgtgccgtggtgtattgtagtggtggtggcgtaagatatttgattgaggtgtgcgggtatatgccgtaatatggttatactcgcgacgaagaaagatgcatgtattgtgtaacccaacgtttaggttgctgtcgtataatcatgcgaaggatgctcatgatggtcgtgtgattgaggaggtttgtagtggcaagcgagaagtaagttgagtttttcaaacggttagtggatagtatctatcggtgttgtcatgatttttgttgtatggtaatgtgatgcttcactttatccatcattacattccatgcccagtggataaataaatg

SEQ ID NO: 192697 - DNA, 776 bp, Zea Mays
gaattcctgctgtggatttggtgagccggcttgaaatgatacttaggggcaaggtgtcaaatgttggtgcccctgttgcctactcggcctggaacttgcctccttccaaggcctttactcaattcgtgtcaaatcctcctgctggtgatggcgatttgggccttagagtgcgaccctctgccgaagaagttagtgctttggttgctttgcttggagaaattcctgatgatgaacggcaggttcactttgaggtgcctttggatcccagtgatgcagagataagtgctatgcttgatatgttagccgaggattcttctgataccgcccctgctagaacattggaagtggcgcctctcccagaagctagtaaaaccttggacattcagaggcctgccagtgctcgcccgaaacgcccttgccgagccagtcagcctgcttctcctgctgatgggcagaaaaagaagaaaagacgtcttcgccgtgtgtgtagcttggatcgggatgctggtccttcggctcctgctgctgaggaagtgcccgtgcctgaatttactaaggctgatcccaatgggtgtgaccaatctagtgctgaccccaatgggtgtactgtccgtgttgctgatgaaaatgaggaggaagaagaagatgaaatccctctgattcggaagaacagtcggtgttacatagccagtggggaaagtagtggagtgccttctcctgctttgtccgccctcattggtctgcaagaattatctttggcggactttgatcagact

SEQ ID NO: 192698 - DNA, 878 bp, Zea Mays
tccgctggcattcctaataaatctcatgatggaactgagtcttctagaaatggtacagtcgaggatatatgtgctgatgaatcagccaatcatagtggtcacagtttggaaatgcagaaggataggaacagtaaatcccatgaaaacgagtcatgtaaacgagaacaaggcaataatatattgtcaatatgttttgttgatgagaccagtataatgaaagatgatcaagtaggcagagagaatgttgcagcttccaaaaagggtgaagatgcgacatatgatttacctgcagaaaaggatgataccaaactaccagtcactagagctgatgcaatgaccaggaccaatcaagagcatacagatgagagcaaacagcatgggaaaataaagcaaataacagataaagactacaatgatgctggatatgagttcttgatcaagtgggttggaaaatcaaatatccacaacacctgggtttctgaatccgaggtaaaaatattagcaaaaaggaaactagaaaactacaaaacgaagtatggaacgagtttgataaacatttgcaaggaacagtggtgccagccacaacgagttattgctcttcgagcatctgtagatgaagtggaagaggctttaatcaaatggtgtggtctttcttatgatgaatgcacttgggaaagattagatgaacctacactgatgaaatatagccacttggtcactcagttcaagaattttgagtgccaggctttggataaagatgtggtaaaagattatgcaaacacaaggaaccgacatgagcttaatgtgttagctgatcagccaaaagaacttaagggcggcatgctcttccctcatcaactagaagcattgaactggct

SEQ ID NO: 192699 - DNA, 352 bp, Zea Mays
gacgaaattagtttccttagacatgctgggaatgatctataggagaaaaaaggtacttaatgaactggtatcaccaaggtcaccaaactacaataatattcaaagacttctctctgaatagagtacacaagcattttgttgataccaacgctcttagtcaagttttgctggtaacactgtactaagtacattttttcttgtgatgggacacaaagtacaaactgaccaatgatcatacagaagtacagttgaatgcttaatatatgaggggtcctactaccatcgtcatgtatcacgaaaaagttaaatcttactggctagtcatgtttaagatcatagagcaagctgaatc

SEQ ID NO: 192700 - DNA, 277 bp, Zea Mays
ttagccaactcatgttaggcaggagttgattgtgttaagtgattgttatatatgttgtgtctcgaattgtgataataataggcaagccgacgtgtatgctgtctagtgggttgtgttgttgctctgattaatcaacttgttagatggccttagttaagctcgtaatcccggtgatttgcttgttttggtctagatacgcatgattatggtcgcgggtaaaaagtagtagtgctcatgtgatgtctaatttaaaacacaaattgttgggtgatcatcg

SEQ ID NO: 192701 - DNA, 463 bp, Zea Mays
acgagcgcagccggaccaacacaggtgtacgaatacggccaacaggccgcatcaccatacaaattacaattacatacacacggcgagggcatcacatattacatcggctcaaccttcgggatgatacccatctccatgtaattaaacagcattatcctcaattcctcaccctcaaaaagcttccgaagatccccaacgcctatgcccgccccaatcggcgaggacaacaattctcgtttaccatcccggtctactcggagacggccacgctccatccccatatgacggtgcctgccacttcgtgaaaattcacccacactatgttttcccaccaccctttgccgcctacactcagcactcgcaccatgaagatcctcagcaccctccacacgcggagaagtctccgccgcagccacatccaacgcaacaaaataatccaagccttcatccgaggactcctccg

SEQ ID NO: 192702 - DNA, 383 bp, Zea Mays
ccgaaatcgatggcgcagactggaatatggtggcgattggggagcgactctcaggggcactcatgaatcgccttcaccaccatttggtcctctattgtcgccgagatctggctggatggagcggatctggctgatgcgccggtggttggatgagggcgacattcacgatgaatggaaggcggagcgcgagcgagcgaggatggaaggggagcgaggcatggggggtgacgatggccgaagattttgggcatggatttgcagagtttccaaacggggtgggggtatggatggaaagggaagatgcgatcatcctgtaatggcgtccgtcgaggcttgggatcgtggtcgctgggcgaagttcgcgggagcgggggcaggcgggg

SEQ ID NO: 192703 - DNA, 415 bp, Zea Mays
ctggacagctccacgacgttccagatcgtcaaatgtctccagcagattgtgcacctgggcgaggccaccatcctcatgtccctcctccagccagcccccgagaccttcgacctgttcgatgacatcatcctgctgtcggaaggccagatcgtttaccagggacctcgtgaatacgtcctcgagttcttcgactcctgcgggttctgctgccccgagcgcaagggcactgcggacttccttcaggaggtaccattcggcacttgtctagtaaagtagtaaccatatattctctgaaagcaaagtttatgaattgcaacaagacgaccgattctttgggtgcctttccaggtaacatcaaggaaggaccaggagcagtactgggcggacaagcagatgccttacagatacgtttcgg

SEQ ID NO: 192704 - DNA, 389 bp, Zea Mays
tatggatatttttggatgtctgtgtgcactttcctgattagaagacgaaatcttgtatactagaattatttctgatgtccattttgtttgtttgtgttctaatctgtttctcacttgctctttcttatcttattatttaaaggcagtttgctacttgaacaatcatggagaggactataagggtggaattttgcagtttcaggatggtgatccttcctgtattgttccagttgctggtgtaagcaaatctaattttactttgcatccatgtggtttcaaaatacttcttatgaagcacacatttgttgttagtaaaatgttctgggtaattttggtaagttttatgagaaacatttttgtccaggatgttgtcatatacacggctgata

SEQ ID NO: 192705 - DNA, 283 bp, Zea Mays
cctcgcgtgcgacactccgcgcaaaagtctcctaagggtgcagccggaatggcacaataagtgcgcaaaatcgaagtcttttccaaaagactcttcgtgcaaaagtcgcctaagggtgcagccggactctccgtgccaaagtcgcctaagggtgcagccggaataataggtgtgcacaatcgaagtcgctcccaaaagactctccgtgcagaagtggcctatgggcacggctgtatcaacgaagtcgtgcagccttatcatacaaattatggttacatacaca

SEQ ID NO: 192706 - DNA, 531 bp, Zea Mays
tcaggaccaagtgattctcatggctgccagagcgtctcgcacagaaaaccaagatgctattgatactgctatagttgggatgctagctgatcctaaagaggtatgttgctttgttatatgctcaaagcagataatgaggattatattacttactaaatgatgagatgcctctttgtccatgttttcatgaaggcacgcgctggaatccaagaagttcacttcctgccattcaatcctactgacaaaagaacagcactgacatacattgatggtgatgggaaaatgtatcgtgttagtaagggtgcacctgagcaggtacaacaagaatcaataatcaaccagtgacgtcttgatatctcagcattgccttatgaaagcattacattcagatttgtttatcattgcataatgcatataacctcatgccattggatgcagattctccacttggctcacaataagtcagatatagagaggagagtacatgctatgattgataaatttgcagagcgtggacttagatcacttgct

SEQ ID NO: 192707 - DNA, 736 bp, Zea Mays
agtggatagcaatgtaaggcaacatatctttactttcttatagggttaattgaaatttgaaagtggtttaaaaaattatcatccctgtcacatttgagctcaataaatagcatatacttatggtgctagagtatggtgcttaaacttttcttctcaagattgcactggactgaagaggcgtgcatcattttttcttacttactgctcagtgttcatgctctagaaagttgcagaaagaactttatgaaaggcgtggccagggaacgtcgtgacgcggatcacggtaggactgggctctaggatctctggtagggtaagcagcctggtctgtcgacgaggtaaacggtcgaccctagtcgaaaggttctttcgatcgcaccttacttttgctctagccatgcatggtacccgatcggggggtcggctgacccggtagtgactcgaaagttggcgcaatccctctgaaatggcgacactttttgttacaaaaaaatgcgacacacacgcacacaagctctacatacactgtccattgacaacgagaaagtcgtttcctaatcaccagctccctccaattattatcgctccctctgaaatgcaaatcgctagtagaaagcaacgtgcaggccaggcaggtagggtgaggttggagccaacgccagttcgattcctgcgacctaacactcaactcaccagcggttgggtctggcagaagcgaccttgaatgaatgattgg

SEQ ID NO: 192708 - DNA, 378 bp, Zea Mays
ggaaaacagaggcggctgaaagcgctgtataagcaggatattcccgagctggatactgtctccaaaagcgcccagtcagcacccggcggttacttctaaaacgccggtgtgccacgtcgtcactcgacggttacctctaaacccccggtgtgccacatcatcactcggctattatcctcaaaagtagccgacacggcccgttttaactcggctgttatttctaaaacgctgacgttatcatcagtcgctcggcagctatctctaaagcgccaacgatatccttagtcactcggcagttgctcctaaaacgccgacgatgctacaagtcattcggctgtcacatctaagagcgctgacgtggtcaacagctattccgac

SEQ ID NO: 192709 - DNA, 306 bp, Zea Mays
caagagtgggtgctttggatgcgcaatgacttagcgaagctcactggggcagcaatttataggatctatcggcggtgacatccaatttggaagaaatgtgctggcggccggagagagggaggagtcaccggagtcacataacgtggcatttactagggtagaagcctcggacgatgactaactaactcacacgacaccttacgaaatggtaatagggtcagtagcgtggtggatttcggtgaagggtggtcatgacggcaatggccatgcggccacgttactgggcaagtgggtgcggtgaggcca

SEQ ID NO: 192710 - DNA, 747 bp, Zea Mays
caaggaggagatatcaacagagcccttcagtcccaaagttaacgtagttggtaaaccccctcttctgctccctcgctcacagatattactgtactcatagggttctgttctgcttcctaactgctgctcagataatttaacaccgcttgtgcggcaacctccgcctatatcaggcctgcaactgcaatagataaatccttacctagtgggtcaatcacaaagctttattagtgatcaagatccggtgcatcttcaaggttcagtttcctttatttgctaaattgggttatttgttttgttttggaaaattagcatagtcatagcttatgtatgcatgcattgtaccagaattcagaaaaccacgaccttgaaacagttacggttaagtccgtgtaactcttttgtgtgcttgctgtttgtttgctctagctctatagtgatcttctagtttttctgccaaactcactgcaagtactacagggcaattacaacttggatgcatacttttctgctcttaatgaactgacgattatttaattgtttgccacagttggtgcaaatggatctggcaaatcaaatttctttcatggtaatcttaaacatgtggtacagtactgctatattattatttgcatctgctcttatgcgagaacatcctcttgatttgcttatgcttattgctccagctatacgatttgtcctgagtgacatgtttcagaacctgcgaagtgaagataggggtgccct

SEQ ID NO: 192711 - DNA, 328 bp, Zea Mays
tcagcttcatgcgtattcagatgccacttgggcaagtgatcctgttgaccgttgttctactacaggttactgtattctccttggatcatctcccattgcatggaaatccaagaagcaagcggccatatctcgttctagtgctgaagctgaacttcgggcacttgccactaccactgctgaaatttatttggttgcgctggctcttggctgatcttggtgtctcttgtgatacttctacacctctgttatgtgataacttgagtgctatacaaattgctcatgatccagtgaagcatgaacttactaaacatataggtgttgatgcatc

SEQ ID NO: 192712 - DNA, 450 bp, Zea Mays
cctgcccagcagtcgtttcttgctcgacttcttcaatgtcattattggcgaacgtccgtttctctatgccatcagacgacgcttcaattggtaattcaatccgtggttaattcgtctctaatcctcctcttgttctctcctatattagtgtcagcagctcctccacctaaccgaatgtagcggtagccaccatttccctgctctttcctcccactaaccaaatccatatgttcctgcttcctccataaatgccgacaatttctctcgccattgtttgttacaacgtcttcaccggcgacctctctgtttctcttccccacgacgtccgggctcccttcgtctcactataaaaggcatgccctcgacctcgccaatgcccgttttctgtaccctttccctagctcgtgcccttgcatgctgcacgttgcgtcgcgctgttgctgttccctg

SEQ ID NO: 192713 - DNA, 276 bp, Zea Mays
attttgatttgggtggaacttccctacatctagtcttcggcggctcgcgctaccgacacctttgttgatcaatgctcatagtaggggttacaagcgggcgagagagggaggaggagctctcaagtctcttatgcggaggaggtgaggtaagggctacagagctagagtcccaactaagtgttggctcggcggcagggctccaatctccaggttttcatcgatgcttcattcctcctttcatcggtcggtccatttgtctagtggtttacctcctcc

SEQ ID NO: 192714 - DNA, 331 bp, Zea Mays
cgtcaacaccaacactaaaagcagtacaaattcatgcgaagtttggttgatcctcgacaccaccagctgatgaaccacaccttccccaccttccagcatctaattaatagggcgatcatgagtgaaagaaagcgtaaggagatggaatatcgaaagcgcaagatgagaggaccaccgaccgggagtagaagccatcctcgtttctgaggcaacctagcccaacaatgcaagcatggtcactcatagggacaccaccagcagtttcagaggcaatatccttagtagctgtcgtaccgtcggaccaaaccccagggaaacagtcattataaat

SEQ ID NO: 192715 - DNA, 737 bp, Zea Mays
gtgatcattgctgttgagaaagatggttttagggtaattaataatcttataatgcacaattcaattttatattcttaattttctctaagaatgggttctgtgtagatactaaagggtggtcccgaaggatctgcggtgacagtgaggaagcaggatattaagaaaggctgtgtagacaaaatgtttacagctgttgatcatcataaaaagacgatatccattaatgacactgttaatgttgtggaagggccatttcaggtgaaaattgaactattaatctgacatggatctgcttttggcctctcattttgtaagcaatatgggaatttatgtgtcttttttacttttatttcaaggaaaccttcattttttatcttttaaaaaacctggtgtggattctttcactgagtattgccaatgatagttttaacattatgcgtgtattagtagtgctacattgttcttatctgttattgcaataacaggtagcacacttttgaattccagcatatgtgtttttggagtattcaagaatactgtttattccatttagcacacttgtagtttgattaaatatatttgcagggtaagcaagggctcgttaaacacttgtacttgggaatactgtttatttttaatgaaagtgaaagtgagaactgtgggtttttctgtgctcaaagtgggtcatgcgaaaagatacggaagggtctgggaagctctactactgaaaattcggt

SEQ ID NO: 192716 - DNA, 1138 bp, Zea Mays
gtcggtgacccggtttctggggattgggtaggtgccatagcacgaggagaggctggcgagcttaagggtgggcccaatttttccagaggtgactgggagggagctgaccacggtggggtggcggagctccgcggcgggagtcgtcgtcggtgaagtttgggtggtgatcgggggcaggggagcgttgttcagagtttgcggtgatgtggtgaagttactgatcctagtgaattgctcgctgaataaccagaggggggggggaaggagaaagagctcacctgagcggagggaggggcggcggagctggagcagttgagctcgggaattggggagaagagttgcgaggctggtgcagggcatggaggagcttggggcggcccttttataggcgcccgaagggaggggagcagcggtgttaggtggaggtgaggtgcacaacaatcggtgtaaatggtgcacagcggcgacgacgggaccgctcggcggggcagtgccgtgcaaggacgcgaccacggcaagcgaggacgaagcggtgtcgaacttctctgtgcggcgagtgcaggcggggaggaggagaggacggtggccggcagtgatcgcgttgaagccgtgcgcggcgagggagatagggtggctgactggcggggccggcttgtcagcgatgcgcgggcgcgagagagcgagggtgagtgcggctagcaggtggggtcgggcagcagcgatagaggcgcgcacgcggagcgggctagcgcgcgcgaggttgcaggtcggaggtgggccgagaggggagggagatcgcacgcgcggggagagagaggtcgtgggtatgggccggaaattggcccagccaggggggaaaggtttctttttttcattttctatttccatttcttttatctcctttcctcaattaattaactagataatcttaggtgctaaaaatataatctatgtgaggtgcttctaatcaaacaaagtgtatgcatatgatgagaagacctatggggtggagtttagggagagataaataggggggttagattagggttccaaacctcgggttgaaattttgggatgttacaaacctaccccacataaaaaatatcgccctcgagattcagacggggctcgagaaaag

SEQ ID NO: 192717 - DNA, 292 bp, Zea Mays
cggattatgcaggtatcgtcacagataaggatttgtgacgaatttgtgatgatttcaatttggtcatagaggtcgcgtcacatttgttgtgttgtgacggactgcccattttcgtcatcgatgtgtatccattctatgacgaaatacgcgttgtcatggaagtgatttcattctatgacgatcaggtttggtcatggaggaaggcacttttccgtcataatccgtcgtctgcccgggcaagctgacggcgtcgttaacgtcgtttgctttctgtgacggtacggtatcgtca

SEQ ID NO: 192718 - DNA, 541 bp, Zea Mays
aaagaataaaaagcaaatcaattcttgaaaaggttgatgtggttacgtctcgcagtgatggccatgcgcaatcatacctgtcaattcgttgctgccctagtaggctagcagcggtcccagcggacccgtacgatggtggtccccatccgacgctctctggtggttgaagtatcaccggcgtctccttttcctggatccatgaacgctatgagcatgagggcctgctgatttttggacggcagggacacggtctcatccacaggccctaagaaccagggagcagaagcatcgagatgcgtctggcgggctatcaagtgaagtcggggtaggcgagtagacagaggaattcattgaagacggtgatgcgacgggtgcttgtgctgctcttggcggcggtagcgttcttggcggcggtagtacgaggatgaggattggggagaagggcggcgcccacgatgggcgagtggtgattgagaattgagcaactgttcggagacgatgctgccgcaaataatagaacgcatgatttagttgtgtgtgg

SEQ ID NO: 192719 - DNA, 675 bp, Zea Mays
atcagagttgagactgtccatggtgatggcaatggatgcagtggaggcgcatctaagtgtgggactggtggaaaaatgctgcctcgggggctcccagcatggcggtttgagaggccagaagtaaggggagggcgtgttctggatgacaaaggtggggtgagtatgaaagcaagcagtgcttcaaagatgaaggagcaggtatcaagtttgggtgacaagagacaggcagagctgcagaaacatgaaagaaggacaccattgaagactgatcagggcaaagcaatcgattctggccaacaggaggttttaaggttgcaagggaaaaggggtgttttaaggatattgccaaagaatgataaggtgaccagggatactggtgatggtaagattctgtcaaggcaaactgaggtggatgaggagactggtaatggcaggattccaacaaagcgaggtgttttaaagctcctgccgaagaacaatggtgctgtgatggagagtaatgaatgcaagcttctgtccaagaaggttaaggtggatgaggaaactggggatgacaagatgccaatgaagaaaactaaggtggttgataaggagaccagtgatggcaagattcttgcaattacaactaacttggatgcagagtttggtggccataagttgccaatgaagaactgt

SEQ ID NO: 192720 - DNA, 546 bp, Zea Mays
cttgtctcactatcaatcaccagtggaggcacagattgaagccactctttcatcactttctcatcaggaaatttcctaaacacctctgagatggcagcaagagcagccttgcggatgctgactaatggatcagagcatgcagcacccattgcacaaagaagagagtcatctatgggtctcccaatcaaaccaatcgcctttgtgatgagcacaagcgcagccttcctcacagcagccttatcatcggtgcagcgtcgtctcagcaattccccaagcttcatgtccccaatcctcatcacctcctgcaaccggtcaacctccacacctctctcagacaaaatatcaagcgcctgggctgcatttattaatgcccgagctcgaacccctcccacactatctgagcacttctccaccaacacccgcagacacttcagcccccaagagccctcctccatatcacaggcatccccttcaaatggtaacagcactggcagcaaggcaaggaccaaatccacagcaagcagtcgtccctttgccttgcccctt

SEQ ID NO: 192721 - DNA, 489 bp, Zea Mays
gccgtttctgggctcttgcaaacaactccgattcagactcagatgtggaacaaaccagtgttctaccaaagacacgacaattgcaacagttggcaccaccggtatcatcagtggttccacattatttcccagccggatctgtcctatctccagtattgtcaacaacttctgggcataggtctgttagatctttttcctcgccgatgttggagtctgcgcagaaacgaaaagatcgacggccttggaagggacgcattccagcgcctcgagtgtcgccgtgtttaacaatgggagatgcaatcagcagggccaaaatcatacagaaaaaagcaaactcttgaccacgatctgggattactaagatgcattcttctttggatcagcgacagccatcaaccgtaattaggaaagaatttcaaaattcttctaatgggcgtattctcaggcgtaatgctgggtgcgttgatggtccagtgtcctctgtttcac

SEQ ID NO: 192722 - DNA, 397 bp, Zea Mays
atcagtccattgatagtgctattggcaagcaacagaatatcactaaggagcagtatcttattagattaaatacttctattgatgccgtccgatacttgttgcatcaaggcttagccttccgtggtcacgatgaatcagaaaagtctaaaaatcaaggaaattttcgggagttggtgaagcttttggcaaagcaaaatgacaaaagaaataaggccctggggctggggaacgcccaaatgttggcctcagaaatccaaaaggatattgcaaattgttttgccgaggtaagaaaaggtactgtttttttagtttgcaaaagtactgattgtctattcagctgagttaacaatgtttgtatattttttcagataatagtgaagtctatcattgaagaaat

SEQ ID NO: 192723 - DNA, 420 bp, Zea Mays
ctcaaaactccaaaaatacttttcttccaaacagtgctgaagctacattaagaaccgcgggtgcatacacacccacgaaaatttgtaaaatcagtgatttagaccaaaatttcaccatatatgcaccacttataaattattactatgcatcctcaagggatatgcaccctcccctgattaactctagcttcgacgctgcttccaagcatcccctaagtggtgcaccacaatattcgatatggtctagaaatagacatgtggtccatcattttacaagtttagggatgtgtgatgcactgtaaacaaatttagggacccaaaaacacatttacaaagttcataggctcaagtggcaccctttgacaagtttagacgtcgctgatgcatttaactcattatattatgtgcacccaattttta

SEQ ID NO: 192724 - DNA, 468 bp, Zea Mays
agaatgaaagaaatcatctaggatgaccagatagtacaggtaaccggagaggctgggaacaagggaggtctaaaggtcacagagaatgaggtcgaaggggtgagtagctcgggacatggaggaagagaagggtaagcgagtatgatgcccaagttgacatgcatggcaaagtgaggtggcgtcgctgcgagggtacagaatggctgaagtggacgatagacgagagaggatgtcgtgcccggggtgaccaatacgacgatggaaagtggaggcaggggcagtggaggcgagggcgtagggttggacaacatgggcggaggaatgtggtgcgagaagagggccaaggggggactcctatagagccaccaggaggggggtggaggcctgggacgacaatcatgtgaggtggaggcgttagggaggcaatcacgaccttgggaaacacaagaggccccaaagcatgacgac

SEQ ID NO: 192725 - DNA, 552 bp, Zea Mays
gaacccagaatctctgcggcacgaagcgtctgttcgagtacacggtcaacagctttgaagaatggccttgatacatagtaaccactccagtaatcctgatttctatctgcataggtaaaaaaatctcctgaaagtgttggaaaaccttgcagctcagcagaacccagttcacctggccgtgaatagtttatcttttcagcttcatctctcaatgtggagaagtaatcctccagggtaccaaatttgacttcagcattaagatgaggatttgagtttatgtaatcaaaaagtttctcataattgcggaattgtacctctgcttcctccatactaacatatcgaaaatcatcgcccaaaggaatgagaagtgtattcgttctgtacagggttgactttttcctatactggtctagaagcgttgttgctctctcctccacattgtcaggatttatctcaacaggatcagatctccatgggcaggattcatagctgaaaccacgcattcgagcaaagtcaaactggcagcagattgctggttctggtccacacgtg

SEQ ID NO: 192726 - DNA, 343 bp, Zea Mays
ggctgagcgacgttaacgcctagtagtagtcgcctagtgggctgtggtttgtacagcacatcctccagccaatatgtagctacgcctacggtcaatctttgccggtcgcacacacaaggcaaggcaaatccaattagtatcatccaacccttgacgtttcattccgggcaaatccaggccgggccctcgtggacatattgccgttgagagacgcaaacgaccctctcgtctcgtacctaactcgatcaccgaggccaagaccaggccctactctcctagctactctactctctctctctctttcctttctctatgtcagcagcagcatgtaggcatggcgagt

SEQ ID NO: 192727 - DNA, 312 bp, Zea Mays
acaaatgtttctttgatcattctttcaccttcattcttcttcttgtcccttagacgagagcttctaggcatatgagaattcttaggctccctataaaaggaaaatattgtctagattcaatctccagtaacatgatgacccagagaattacacaaacagaactgctatttgatatccattttttagatgctgtgatgtaactggcctctctagttcagaaatagataatactacaatgaatacatcctgagagaatgtggtgtgtgggagggagagagacacacacacaatggtgggtgtgttgtgatttat

SEQ ID NO: 192728 - DNA, 437 bp, Zea Mays
gtgatcatctcagtgcgtagctcaccaattgcacttaacacctcgtgaaaatatctactaatagtctcagtagatcttcggaaggtgaatttgagaaccctaaacctttgattatgaccaacaacatgtagaaacattgcaacttgttcttctacagaactgtgaatattatcccttagcaagtgtcgagaccgaaacaaaccacaaagctcaaagaaagggaccttagacattctaagcagctccacacattggatatcatcagattcatagataaatctaagatttgcctgcctctcaatgtccctttgaaacattggaccatatgtgacacgaggatgaaaaagtctacgcgtaaggcatgcaaacagccaacaagatatagcaacaaccaatgctgatgctctcaacttcagcaaatgacgatttggacccaa

SEQ ID NO: 192729 - DNA, 297 bp, Zea Mays
ccaggggatacccggtcgccggatccgattattgcgcgcgccagctacgggatgcgttcggccaggttggggatggtgctgatgagaccggcccacccgttagtgaggaggtgagacgagcgtgcgcgagagaccgcccgatgggtcagtgtgccgatgatcgaacagatgtgaacgcgagtgtgactggccagtgggccccgctggtcggtgtaacagcgcggtgcgtggcgcatgacgcgtgactggcaggtggggcactccagtcagagcgaagacaccaggcgcgcacgaggc

SEQ ID NO: 192730 - DNA, 1280 bp, Zea Mays
gaatccttagtgatggatataccattgctgtccgcagactccttagattccagggaattgagatgaaacaattcgacaatgaggttaatatactcatggagcttagacacaaaaatattgtcaatctcctgggatactgccacgaggttaggggtacgtacgtacagtacaaaggaaaacctgtattcgcagaaacctccgaacagttgctctgctacgagtatctgcactgtggaagcatcgacaagtacatttttggtatgattacgaagtctgatgggattaaccctttacctgctgcttaatggtagattcacttttctaaatgccataccccaccaaccatcagccaccaaagacgttctagttttatttttagtcagagcatcaagtttgataagtttaccaaaaaagtagaaatatttatgatactacataattatcattagatccattataaaatacactttcatagaatactgatctattgctaaattttgatacatctttctataggtttagttgaacttaagatagtttgaatttggatcacctacaatgactttttttcctaagagagagtatatacaagtggcaaatctgaactgttgtttgtttagtttttttatttaattaattgattgatctaacaagagaaaaaaattcttaaatcctctcatgaatggagacataagtggccgtgcgggcccttgttgctgtggaccacccttccttttggccatattttattatatttatgtatagttttatttatgtttgatatattaaatcactaaatatttactaatcaaatcaagtcatttttatagttgcaaagtaaaaaagatctaccacgtctaatagatcatgcatgcatcacttagatataggaaaaagtatttttcatatcaaactttgctttatttatcttatttaacaaaataaaaaattaaataactatatgtttcacatattacctcttaggaagtaatagatgatcctaaccttatgatatagttaaatgaatggttaacaatcgtttgagagtaccatagcatatatcataaggagaagaaaatcagaagtgccaaagatcctgaacaaatgtttagtgttgcagcagtcagcactatataaaattccaggaattgtattctttctcttgatttttagttctatttttttaaaggaaaaaaccatgaactagattggcacacgcgttacaaaatgattaaagggatctgtgagggtttacattacctccacgagaatgacagagc

SEQ ID NO: 192731 - DNA, 519 bp, Zea Mays
gttgaaggtgggaaagggaaggttatggtggtgcgggttgtgagggtgttgctgtggggggtatgcgctatggtggggttcggaaaagcctgggattggtgatggggggagtgtgggaagggtatccgattgatgggtatcggacacagagatgcccttcatggtgcatatcttcaggtgcgcccgtgagaacttcttagggcagttgaagcagggggctttgtgacggcgaatcatctcgtcgggcatcagcctggtcacgcgcttcccagcaagtggtcaggctatagtcggagcgtcaggggcagctgtcgtggtgggaagttctggaggggatggtgtagtcgtggtaatgctggtgtgacgcggtcgatgaatgatgtgcagatggtgctagtgccctagcagccacggtgttgtggtggatgtaggtgagccagggttgcttcctcctccagtttggcgagtgcgtcaagctcgacgtcggtcttcagtggttcgcccagacctacggtgaag

SEQ ID NO: 192732 - DNA, 286 bp, Zea Mays
aaagcatctcacgatgctgtactacttttagaaggcatggttaaaggtttcctcaacacctaacttcttgctttgctctcttcaacacagaataaatatgtggcgcttgcgtcaaatttatgcgatgtgctttgattttcttcgcccatacagatacaggtctctggatatgctgagaaacctttcatcttaaatggaactggtgtagcccaaaatggccctgctaaaaggtctgtctctggatatgctggctaccagccaaggataacatcttgattctgcacgc

SEQ ID NO: 192733 - DNA, 440 bp, Zea Mays
gtcatccccatctgagagccgtttctctgagccatttgaatcatggatcatattctttgcccctctgagtctttcacattctcttctgagtgcatccctctcctccctcaggctactcatctccttgaagagatcttgcccacgccgactctccttcacaatttgctttcggagagtctgcaactccatatctgaaacatccactttcctggttaaagtggctatctcacttcttagcttatctacatcatcctcttcccctcttaaccctgcctcaccagaattgcttgttgacccatccgtactagcatcaggagctgagcttcctgaccagtcaccagaactggtcaatgggttcctcacggtgcgattgttggcaaatggcgagagagcattgctactatcctgaagaaatgagttgtgtgtgcttgcgctaattt

SEQ ID NO: 192734 - DNA, 290 bp, Zea Mays
ccgtcttattgtcacagctaagcatggagtgaaccacatagtcttccatgctttgactttagattgttgttccaatgtataatatcatctcatctcatctgtatctatctattcttcgaatttgcaatgtcaattggcaactcattgaaccaaatggtttaaagttgcatatcataaaaaggccatctgagcatgttaaacactctccatttgggacaagtatgatcacacactaacccatagtaacgcctggttaaaaaccttgaggccgagctctagtcaagctataa

SEQ ID NO: 192735 - DNA, 412 bp, Zea Mays
gtagaactgtagaagtcaaatgatctgttgtatttcaggtcttcacatcctggtcgtatataatgatgtacttgcaaaagtatctagtgaaagatactgtccaaattcttaggtgagttttcatctttaaaaatgaggcctatgtatgctattggctcaaaccttgtttaatggcctttgccccatgattagctaaaccagttgcatttgttgttatccaatataaaatcagttgcatttgttgataatttgatatccaaattcagctatctaactgattgccaaatgccaactcattatcattgttgaaggatcacagcagcgttgagatatttcccgaaggactatgttagagaatttatggcagaatctgtttcatttttgctgaggaatgcacctaataatcagctaa

SEQ ID NO: 192736 - DNA, 409 bp, Zea Mays
gacaacttgggcatcgcatcaagcccagggtgtccaaggcggctgtgccaagtggttgatgaagtagcagcagtcatggcatgcatgatggagatcatggatgagaaggcaggcacacatagtgtgtacagtggcccgaagctgtcacatcacgcgagaagggtcctgatagcaagatccttcacaaacaaaccaaaggggtcaaattccatagaacaagagttgttagtggtaaattgatgaactggaagaacactctgaataatgttgggagcaataaggacgttcttgaggcggaaggggctagggaggaccccgtcacccactgaggtgacatagagaaccgacccatccactgatggtgatggaggtgtaggaccggcaagataatcagaggggggtgaatggg

SEQ ID NO: 192737 - DNA, 714 bp, Zea Mays
ctatataaagtccttagtttgtacctaggaggattagcaaagatcaatctaagaagagtattgctccttgccacattctgtctcagccgtgtgccagcacggctccctctcgccctcaatcctcaaggcctcgccctactacccactcatacaacctcagaagtcgagatcattacacaactagtcatgattcgtcgtcggccagaccgactagttgagcccagtcggtcctagtcaccctatatattccaggaccaaacactatgcatacaaatatacaatataaacctattatactatataataacattaacaaaaaagcaaggaccaatacaacatggcaagaagattcagcccttcaggttcaaggacatatgcacatataaacatacaccacaatcagatttttataccttcaggttcaagggcagtagcacaacaacaacaccacactaactatagtctactagagcagctcaccagagcatcaggtggctaggagggttgcataaaacagagcagagtatcagaggggcagtgacagcaaagcagagtagagacaggagagggcgaatcgcagtgggagaagacagaggaattccgaggttcgtgccaagttctggtgcctgctgtgtctgcctttttatgaatcctgggaagtggtatgctaaccctaccaggccaaattggtaacccactagttgcctcagagcc

SEQ ID NO: 192738 - DNA, 297 bp, Zea Mays
gaatgaccgtcggatgtgttttagtaagagagagtagacaaataaattgatctggaacgttggttgttggtttttgacagtgggatttgtctggggttaaaacgctgtgtggatttagcgggatcataagtgcgtgggatgttttgtgtggtgtacttagcctaagttgaacgggtgggtttaaggggtagagatacattcttgtgagtagtgagcatgtttagttgtgtttgtacattcgaattatggtatcatctgtctatcctgggttggtctacagctgcaacaatatgattg

SEQ ID NO: 192739 - DNA, 272 bp, Zea Mays
catcttcatcaatatacacgtctttgagcattgatcctaaataatgaaaggtatccttcatagacactgcttgaacttccaaactaacatctccttctcatatgtagtagtgccgaagtcgcatctcatatgtagtagtgccgaagccacatatcatgtattcagttttagttctactgaatctataaccttttgactctagtctcctgccacaactctatttcctatttattcctgtctggttttcatcaactagcactacatcattcgca

SEQ ID NO: 192740 - DNA, 454 bp, Zea Mays
ttcaagttggctgatatgaggcctgatctcccattttattttagatagcatagaacatggagttgttggctcatgcctctacgatcagcaggtggcaaaagcccttctgtgcaaaacatgatcaacgacatgcaagtctgaaagtattgcctcaagccttttgtgacatgcagtcgcaatgtcggttgatgcgaataggaaaggcttgtggcgcgaatacaaggcaaatggacataagaagaagagagcgacctgggcaggggcagaggtaggcagcagatcttactcaatcccgtgtcccctgtccacagaaagagggctggttctgggattccggcagccacccctaggatggtcctctctcctctggctcctccgtccgtagacctcacggcacagtcctgaccatgctgcccgtgtttgtttctctccttgtcaacactccagagtctgg

SEQ ID NO: 192741 - DNA, 393 bp, Zea Mays
agttttgcaattgctgggttgggtcaagaagggtcgtcaggtttaatctcagtgaatgatgcctcctatgttgaagggacacttcctagtggtgtcagtacatctctgctgaagataagtctggaggaaaatgccatcagcaatcaacatgggattactgacacccaggaaggtttgaaaactgctgaaatcaaggaaaatgctgatcatgctcttggcactaagttacctgatgattcgaacaccctgtttgaggtaccatcctttgagcatcttcaagaacccactaggccataccaaagcaacaacatggatataaaagtgggtggccatgctaattatccagaagagttgacattatattatctggatccccaaggaggtgtgcagggt

SEQ ID NO: 192742 - DNA, 390 bp, Zea Mays
gagagttgtatggcactaatcacggtgaggaagcctcttccgagttcgcgctgtccttcttcgcgtatttaaccttctggttgggtaattggggctcgggtgtgcgtattgcgtgatctccggcgatggtccaccgtgcgttccttgggtggtgccgccgtggcttcggcgtggggaggaagacgcacggtcaccgttgatctgaccatcggcggcccagattagatcgactggacaccggttcggtggatttgatctgaccgtagagtcttggatcgatggcccggatcggagtaggtgcgcaccgttagatggcgatctggtggccaagattggataccggttcataaagggtcctaacttaatccgatccgcagaactctaatcgga

SEQ ID NO: 192743 - DNA, 481 bp, Zea Mays
cagtagagtggtttagaaaagctctagctgttgaacctgtcaaggggaacctacggctcagtgggtactcagcttgtggtcaggatggaggtgtacaactacctcatgcgtatgttgaaggtaattttcagttttaatgaatcagtttagcaatcttgcattcttgcctgctaattgcctgactatgttttcatgtgaatctctcctcaattgcagatggtgttgctaatgctgatttagtcctcttagtaacaactagaccaacaacaggtaacacccttgcatgggctgtggcctgtgaacgtgaccagtggggtcgggccattgcaggtttgtgaaccaactcaattaagtacagacatccacatgccaggggtttctagtgttgttctgaccctacatgtattctttttctgcttttaggacatgttaatgtggcccctcgtcatttgacagctgaagctgaaacattactttcagc

SEQ ID NO: 192744 - DNA, 679 bp, Zea Mays
tgaagggctgtgataacatcctagcacagcttcacactgcacatccagaattttgtgacaaagttggaggaattctagccatgcatattgatgacttaagggctttagcacctctgtggctctcaaaaactgaagaagtgaggcaagataagtcccattggtcaaccaatattactggcgatatatatggcatgggttggatcagtgagatgtacgggtattcatttggtgctgcagaagtaagctgacttacactctccttgctatgtgtctttgctaaagtaaaaaattctcattatggactgtaaatttcttcctttagcttcattatctggtcatatgaacaggtaggtctacggcacaagataaatgatgacataatgatctacccaggttatactcctagacctggcattgagccacttatcttgcactatggtttgccatttaaagttggaaactggtcattcagtaaattagaacaccatgaagatggaataatttatgattgcaaccgcttgttcgatccacctccttttcctagagaggtaaacaatcttccaatcattgtttgggtaattgggtgtgctcatttatatctacttatgatgaagattttttttatgctctaaactttgtaggttgagatgatggaatctgacccaaatataaaacgtgg

SEQ ID NO: 192745 - DNA, 380 bp, Zea Mays
gcagttcacctatatcaccgtggccaggtaatcacaagcgattccccaactgtatagtgcatgttttgtgttctctgtagaccagtagagctcatgccgtttggttcttggactctaccggggtgtgtgatctagaacggagtcaagtcatcgtggaactggtgctgcgggcagcctcaccgtggaccgatcgactggagtcatccctggtcaatctcgcgcacgcaccgagactttggaaggtcagtgaagctctctacgccattaatttgaactcgaccacgagattaggatcgtcagagcaactgtccgccgccgctgacagtagagtggttccaaagtctctgcgggtaaattgagtgcacggccgagtttgccat

SEQ ID NO: 192746 - DNA, 521 bp, Zea Mays
ggcaaaattcaatgactactccagttacattcacaatattattgagctatatagaataaaatgggttggtctgccggcattttttacccacttggcctataagttgtcagaacctccctgcagacctttattgtgtagcccacaacaacttgagggctaccgacgtcgacttcatggattctgggattgtgtattgagtaccctgacgctgaggtcctcattggctagagctggattatattctgaaattcataggatacgccgcttggcaccatcggatgtgagatgctttgaaatcagtactgtcaagtactcgtcttaaatgtgattggagagagtcaatttcacaacatggacatccagtcctcaaaaaggttttaaggcacatccctgttgaagataaaatcaacaaaaaggttcaggagaatgaaggcgcatgcgcacgagagtatgggttgtaaaaacctgatgctggtagcttgtctatttttgcaagacaaataagcgaacatggaaagcaa

SEQ ID NO: 192747 - DNA, 1038 bp, Zea Mays
aaccagtcccctttcttcacgccacggtcactgtctgcccgtgtcccagagcacactgaccctgagaacaattgctcctccaatggtattgtgctgaaaatcagtgatatactctctggtgattccttcacaccacaggaggagttaccatcagctagcgttggggtcttgccgtcagatgtgtctcctcctattagcctgtgcacttcaagcaactttggcactccagcaattgtctacaacaatcccagctttgtttctactttcaatggcccatgccaaggcagttcatcagcaaccagcaatggtggtcgttcggctccaaaggaaaagcacaagaggctagggggaatatatcggaaatcatcatcgtgccaaccgacaacgtcgtctgcctctgtcagcaggcttcgcagttacgatgtgtacgttggatttcacggccgcaaggcttcactgctgaggttcacaaactggctccgtgcagaactagagatccatggaatcagctgctttgtttctgacaggtctagatgccgaaattctcgcagccatgatgctgtcgagaggataatgaatgcttccacatatggagttgttatcctcacaaagaagtcattcggcaacccttataccattgaggagctcaggaacttctttggcaagagaaatcttatccctatattttttgatttggatgcagctgattgccttgccagagatatcgtcgagaagcgaggagatttgtgggagaaacatggtggtgagctgtggatgttatatggtgggatggaacacgagtggatggaatcggttgatgctctttcccgggtggtagatgtgcaactagaagcgaatgatggcaactggagagattgcatactccaagcaatcattctcttggccacaaaattaggcagaaggagcgtggttgatagggtgtaccggggaaaagggaggttggagaaggaggaattccctttcgctcgtaacaatgattttgtcggtaggaaaaaagagctttccgaattggaactc

SEQ ID NO: 192748 - DNA, 587 bp, Zea Mays
tttatagatgcaaattaatgtggttagtgcctactcagatatttttaactaatattcgtttaatgtaaacgtgacgtatgtttagcttttctcgcgtgtcgcgcgtgaggatcgcgggcgtagccgcgcgtggtctgcgcactaagtcgggatgtcttcgcgctgatgtgctcatggtggcgtgctactccgcgtgtcattcacacgtgtcgcgcgtgctgttttggcgcgtcattcgcgtgttttacgcgtgcaaattcacatgttgtccgcgcgcgtcgtcgttcgcataaattgctatttgcacgctttactaaaaatcatttcgctaaatcattcatgttaaataattgattacttgtttagttgtgtattattaaaataacaattcaatcgaatctaattaaagattttgattatgcgtttgtagatacctgttagcgtgattatgatgacttaaatgttatatttaatatttggctaatataagaacgacataatttagcagtactcgtatgtcgcgttgttcacatgtgtggcgctcgtcatcgtcgcgttgttcgtgtgttgtttcgtgctgtttcgcg

SEQ ID NO: 192749 - DNA, 315 bp, Zea Mays
aaaatatatacccatttatgatgttttggttcacgttttacgctgaaatccgtctgaactcccacgcacgatcagctccatatcttatgttccgatatatacggtaacttctagcttcgtgggcgcgctaatcacgatggtgtgtggacccacctgaacgaaccaatgaaaagttggttgccgctctcatgtcatgcaagtctgaaccattaaatatgctagcataaacacgagtaggaaccaactacccgaccagcgaacacgacgctgacccaccttcgtatatcccaactcgaccccaccacgtgcgcacct

SEQ ID NO: 192750 - DNA, 529 bp, Zea Mays
cggaagggagggggagaatagtgtgggaggctttacccaagtgtaaagcaagccaaaggcacgctcccgcggccgggttgcttcaccggcgggttgctcatatacacggcaccactgcactgaccatggtcagtgaccgcaccgcaccacctgccctgcccctcctctgcagcagctcttgttcttcacgtgctcgttcgtcttcacgacgaacccgcacgggttagctctggctctcctgctatagatatgagatgcaagaggcggccaaggctcggcatggggtggcttcgctccgtgctctccccgctcaggaagctctggtgccgcgtcaacgcggtgcagcgcaagagtacgtccgttgcccagtcagtcacaccacgcgctctgctgctcccctcttccgtttctctggcttctgatccttcttgtcgctgctcctgcgcagagagagggatctacatcctgtacgacgacgtcaagtcgtgccaatgcgaggacgtgcacgtgctgtgggcgatcctcgttg

SEQ ID NO: 192751 - DNA, 1037 bp, Zea Mays
aagagccctgtgaaccaggctacctcaaaggctatgttaacccagatgatcagcattgtattcaggagaatggaatctgagcaggtaaagaattccacatatcttatcttgtgcctaggaaaatgattcattgaggttgtttctctaggtattattttactttcttggttccaggtttctgtattgcctgcaagctctgtggttaaagatacaccttcatctatcacaaatgaatctgaaaatggagaaatatctaccgatggccaagatgaggaaaaagttactccgggagatgcattgtctatgaatcggccttctgaagcacctccaacatctgttgaagagcttcagaatcttgctggtggagcagatattaaggtactgaaactggatctcgttgctcttggaactttcaaacgtgtcttaggtattgcattggttccatctaattacaagagatcttttacaggggctggaagctgttctagacaaggctgttgaacttgaagatgggaagaaagtgtcacggtttgttaagcttgtactaaggtttttttgcatctctaaggtgatgcatccgggactcagatgtggcagtagctaattacctttgcccctcccctcttctgtttttccagtggaattgacctggacactgtgaacataatacagcgggatgcactattgctctttcgaactctttgcaaggttggttgctttagtaatgttactttagtcggagctataagaaagtaacaattatatcctaactatgttgtgttatccttttagatgagcatgaaagaagaaagtgatgaagttgctaccaagacaaggctgctatcacttgaactgctccaggttagcttacttctttgaggttgcttatttttatttttttctttgttttgattttattcgtagccattctcttcagggattgctagagggagtcagcaacgcattcacaaaaaatttccacttcattgattcggttaaagcatatctttcatatgctcttctgcgagcatctgtca

SEQ ID NO: 192752 - DNA, 340 bp, Zea Mays
accgcatttttgacaatgggtggccgcttcatattccttccagaacaacatgcaattatattcgcacacatcaatcttcttatacttcatcccaagaccggacacaatctttttagactggtataagtcttttggcatcttatggttcgatgggatgagatcaataatcagattgattatatcgttatagcaattattcgagaagttatactttgccttcattgccataagacgtgtaaccacctgcaacacggtcacagtggtgtcgtcatgcactttttcctctgacgcgtgaagaagcttataaaactcctgcacttcatctggtgtagcctgttct

SEQ ID NO: 192753 - DNA, 386 bp, Zea Mays
cagatgtggttgctggtgcaggcttggtttgtggaccaaaatacatgcaaagaatgtgagatgaggaggtaaccaaactgtaacgagcttcaaggaagatagcatccgcttggaatggcttcatatgcattaagccaaccactccctggcacaatttggaaagatgtaggattagtatcagaatctcacctcttaaattcactaatgtcttctcatgatccatgccctgagcattaggtttcagaggaactagattttatgcttctgagctagccaatctggaataacttctgattatggtatcaaatttatcttattttggcagataagtaactcgtaggctttcactaatcagtggtgttagaaactagatcagcaatctacac

SEQ ID NO: 192754 - DNA, 619 bp, Zea Mays
ggagaggtgcgacggaggtgaaggccgagcgcttgaaagcgttcgttgaggccgcgaatgatgttgaggacaagggtcttgtcggagaccggctcgccaagatcgcgaagatcttcggcaagctttttgtagcggcggcaataatcagcagcggagaggtcgccctgagtgaaggagcggaaagcttggtcggcgtaaagggtgcgcgtcgtgcggttcccaagaaattgggactcgatggcgagccacaggacgcgagcagatgcaccacgctcggagattgtgtcggcgaggttgtcggtgatggagccgttgatccaagacagaacaacggcgttcatgcgagtccagtcgggcgagtggtggacaacatcggaaagcacgtggcaatccagagagaatttggtgagggttaggaggaaggactcacgccaccgagagtagaaggtagagttgacgtcgaggaggagtgggacgagggcccggatgttctgcacggcgacggcttgagcgtgcagattgagaagagcagccgcttcgtgttggagaagagcggcagaaagctgggcgacggagtcagcaccagtgccgtcggaggtgatgacattgatggggggag

SEQ ID NO: 192755 - DNA, 378 bp, Zea Mays
gagagcaggaaggaccatcgagatgccgcttagccttcacgagttgacgagcgagggcgtccacatcactgcactcctgttcccttacgagggcagccacccactcgcgctcctagacagcggctacaacagccttggtaaccacgagagacccaacgagggtggagtgggcaacagtgaagttggaggaaggagtagcggccgacgaagttaggtgaagaggagcagcaaccattgcaacactaagaccaagagcagcgacacctaggcttgcagagcacatagggggaggtggcagtggcaagagtagcaggtcggagcttaggccctgtccattggggagtggcacacccgaggcacaaagaccgatagctggtt

SEQ ID NO: 192756 - DNA, 387 bp, Zea Mays
cacccttaggtgtcttctgcatagacagtcttcgcggtagacttcggttttttcgcacttgttgtgctagtccggctgcacccttaggcgacttctgcgcggatagtcctcgcggtggactccggttttttcgcacttgttgtgctagtccggctgcacccttaggcgacttctgcgtggatagtcctcacggtggactttggttttttcgcacttgttgtgctagtccggctgcacccttaggcgacttctgtgcggatagtccttgcggcggacttcggttttttcgcacttgttgtgctagtccggctgcacccttaggcgacttctgcgcggatagtcctcgcggtggacttcggttttttcgcacttgttgtgctagtccgg

SEQ ID NO: 192757 - DNA, 459 bp, Zea Mays
gaaaaatttctcgaaacattgttgttggagagggatactgactcagatgacaaggtcttgttggatgcggctataacgtcctgcaaaaaagatctgtaccattattgccgattgtctggaaagcacatgcttgaagtagtcttggaaactgctctatcatcaattaagagggagcagcttcttgaggctgttgatgtatgtcaattttcaaggatgatactgtgttttttccctggtggtaggagcattccataacaaattccactagtctgttgactcattgatttatcttctggaaagtggttttctgcaggttgtttcgttgttcccccttctccacccactggttgctgtcttgggatgggatattttgaagggtaaaacaggtctgcggagaaagctaatgcagctgttctggacaagcaaatcccaaggtctacgactacaggaatattcaca

SEQ ID NO: 192758 - DNA, 462 bp, Zea Mays
cggggctataggaccgtaagaggctgtgctttcatcgtgcgcaatcaatttgggcgaaggtggagagggcagtgcgaatttgacttcgatttggttcactggtgttcgtgatgaccaagccttgccgtgatccagggggctatttatagccgcggaggtccggcgatcacctcgcggccgaggatagtatcgcaagcgcatgtcgaccacgtcggtagaaagtacagtgaggaagaattacggcatgagcgccaccgcggcggaattcgcaggcctcggtggccgccggtgaggtctccggctggactcggagtaaggtgccacgtatgcgctttttaactccgactctatccatttcttatcgcgcgtgaatccagatggcggcggcgcgaatcacggcggggagttaccggcggtgagatttttctaccgctggcgatctgatccatcgggacactgtac

SEQ ID NO: 192759 - DNA, 1288 bp, Zea Mays
gttcaaggatgaagagttcaagtcactgcagattcaggtgcaattcaattgttgggattagttgatcacatagctatgtcgcattgctatgttgctttgacctggttattgagtgtattttagccttattaccttatttattgttttttatttgaaatgaccgacctcaggtcagagaaattaacttgcttcgtgaaagcaacatacaacttagggaggagaacaggcacaattttgaagaatgccaggtaatatattaaattggtaatgtttaattgctggttcatatctggatgtgcataattttttattttaattttgtgcgttcagaaattccgtgaagaagctcaaaaggctaaaatggaatctgagaggttgcagaaccttctactggagaaggaggtagacgctgaaatgtgcaaaagagaactggaaatgcagaaggcagaaatagctaatctcaaccaaagtatttctgaggtaagttttagtccactttctaacagtaatgataaaatgccatgaaattcctttggcttcattaagaacagcagctgtggtttttgtcccaagcaagttttagtctgttggtttgtaatatgcaggttattgccataaaaaaattgtaaacattgtgagaaaacaatatgtgcataaaaatctatatattaattcattctattcttcatatgttgagttctgcagttgtgtattaatgttttcttggcagctgattgaaaatagcaaaggcattgatttgaacacttatgaagccatgaagaatgaacttcaaaatatcaaagttagtcttctgttttcctcttcgtttttctttgtgatgatgccattttgaatgtttcttggtcaatgatgtatacatgattggatttctttttctgcacaaaagagtttgatgactgtcatttttgtctagtttgactaaacatttgatgaatcactatagtgtcttgtttccctattttgtaccaaatatttttgtaccactttattttctttgctgtgagtttgtgacataaactgtatgagcttctgcactgtactctgtattacgattattgttatcttttggatggatgcttgctttgggtgaaagtgatggcgcaagtctctaactgtacatgagtcattaagtgtctaatttcattagttgtatgatattggatttgcttgacttttttgggtcatagtttaatcgtcttactatcacatacattaacataattatcgttttcaacagtcaaccttgagagagaattctatggagctt

SEQ ID NO: 192760 - DNA, 750 bp, Zea Mays
ctttttggtttcaatggcgggaggttaaggatggatgagagaatggattttggcatgagcgatcctgatttagttcccttgatcatccaggtttggaatacttatggcaatcctttgtataagtgttaatttttatatgtttctttattgagttgctactactacaaatttcattccaaatactgtgcacgaactatttatttttatactacctgtagtgtgtgtcacagctttctttatggcttcaaagctgggatgctcacatgtataataattaattggtgtattttgtgaattctgaaggaaattttgtcatttatgtttgccaaatgaatgtgtatcataattgtttaaacatgtatcattttggacttcatttgctattacctttttattgctgtgacttcagtccagtactgttgaattctactccattccaaattataagacgttttggcttttataatgcattgattttactatgtacctagacataagtgtataatgcatagcaaacctatgtctctagaaaagccaaaacgtcttataatttggaatggagggagtatttgtttttgagattgccattacctgatatacatggatcagcacgttctcttttttctgctcctgaccactgatatcttggaaatcaaagttcttgtgaagttcacatttaaaaatgtgtcccattgtaggaaaattatatcaattatcggcctaacaccatcggcaaggatgaaagtggag

SEQ ID NO: 192761 - DNA, 1446 bp, Zea Mays
ctcacctctcccccccgtctgcttccagtccccagaaatcaaaacctccaccaccacagagctccgagaccctcaccctcctccccgtctgctcgctgcgtggatctaccggcaggatgctctctccatcgcgcgcgccgcccggggagcgcctgtgaagaaggaacggaaggtgagagaactgccggtgttcttcctccgagttcgtgcgtgcggtgtggtttccgtgggcggttctcgattttttgcttgacttgaatccgcgcggtttttccttgctcttgcgcgtcgctcccccttaccagattcgtcgctggaactggaagattggcgtctgcagactggatctctctctcttcgggcggagctgggattcctcgtgcttctctcgctgcctgtgaccgctagatctccgctgcttttcgtgcttgcttgttttgttcttggctacggccaaagattctcgatcccttgcatctgctttctgcagatttggtacggattacggcccccccgttctcgaactccttcctctacgtgctcccatggctcctcgtccttacagaaatccccgattaggccagtgatgaagcgacgggaaaatcgtttcttttttcttgatttctcgccaaatcttagttattaagctccctttcctcttttcttcttttgctatttatttccccatcaagaaagcactaccatacaagctaccctccagtgcttggcaactgttcatgtctccttcactgctcttcccttactgcaaatcctttgcgagagctgcatgatccgtgtaggcttccccttaatctgctcaaagactcgctcgctcgtccaccttgccccgggatgatatttcatgtgctctgtgctacttcgagagcagccccctccgcgtgtctcctctcctctctggcatccatacctcacttgctgcatctatcagcataaaatcatgccattggattcccaaagaacagctggtttggttggacatgaaataatatgtgccttgctttctctctgcaggtgcctgatgagatagtggacggacaaggaagtgaagtttcttgttctatccacctgttgaacttaccaacttggtatgctggagtgcaagaataagagcaggcccaatcgcttcacagctattgggttctcggtgccgactgtagcagccgcagatctggagggagcagcgaaggcgttcatcagatgttatccagtgagcacccttcaggcccctcatgttcctccaagtctggtggcccgggtgtgagcgctgatccggcgacgtccgcggcggagcagccagcgtgccaggatcccagagatctgatccaatcgtatcccaagttctccataaggtgaaagatatatgtgtatatcctctttgattcaatacctttggagagagattatttttcggtgtttaagttcttg

SEQ ID NO: 192762 - DNA, 454 bp, Zea Mays
tgattcactgctgttaagagcattggataggtctctgtccaaataaagctgttgtgctgtcttatcaaaaccgccagttaattttccacaagttttttctcttggacctgtagaatgattgagacttgctcctaacttggattctttagctggaaacccatattgagtctccctgcaaccaatgcttggcctctgcatgaaatttttggtggagcttttcagtgcatttccatgctgagggtgtatcctgctaacatgattttgtctatgggaccagtcgttactgttgaattcgttggtcatctgcattgaagaatggccaacatattttttatttcgatcaagtgcaggtgtggatgcatgcgctccataactcttccacaatgacattttcttctcctttctggccctctttctagatattacaagacagaaatcattgtcaccagttgtg

SEQ ID NO: 192763 - DNA, 518 bp, Zea Mays
tccaatcgaactgccttttcttcagcagccttttttttctcaagctcaagctttaatgcaaagttctcttcttcaagattctgaatcctctctgcagtcttcttcctgttgccatccaccttggaatcaaccagccctttgaggcgcgtaacctctacagtgagatgctcaacttcctgggccttcacctcggaagccctaacggcatcatctacctggctgagggcttcattcttggcatcgattgcgtcggccagctcatacctggccttctccagctgctccactgtcgaccgcagcacagcgtcatcagcctcctgctggccatggatgcttgcctgctccgactctctggcagggagtttgtctgcctcctgcgcctcaatagccctcctttgcacatcaagcgcatcctgcagcttggcattggcctcatcagccaccttcttggcacgctccagctcagcaaaaactttgcacttctccttctcgttctccaccaactgctccttggcctt

SEQ ID NO: 192764 - DNA, 375 bp, Zea Mays
gatggaggtccagctgactcgtccgggtctttgcaacagcggcaagcgggttggagctctgcttcgggcaggggagaaccacgtggaggcctggagtcatgctgcctagactcgctgctgggtggattcgtcgcggtggaggtcggattgtgaacacgccgtccagttaggacgccgtcgtctccagatccaggggatggggttgctcggcatggcgaccaagggcccctcgcacacgtgtcgcctcctgtcgcagccacacttggttgtctcctcgctggcggcctccgtggctctgatccactgcttcctcaacacccggagatggttgacgtcgccttcgccgtctcctcgccagtggcctccaccagcccc

SEQ ID NO: 192765 - DNA, 356 bp, Zea Mays
tggccacatcggcaagctcgacgacaggagcaccctaggggtgttcattggctacgcggagggctcgaaggtctaccgcatccttgacccaggaacactatgcgtgcgcacgacacgcgacgtagtgttcgacaaagggcgaggatgggcctaggacaaggcggtggacgacgacatgactccgacgtacaatgacttcaccatcgagtacgtccactttgagggagccaggggagtaggcgacccttctccgagtaggcctaccccagcccccaagactccagcgccaagctctccaactccggctacaacgagctcttcatcaccacgcaatccagccacgactccggctccag

SEQ ID NO: 192766 - DNA, 399 bp, Zea Mays
caccctgttgcgcgtataggattcaaggattgcgcaccggggcgttgtgtttcagtcatcggccatggcgccgccgtgctgggggaagctgccgccggcgtcagaccggtcagggaaggggtgagcggggtgttactaccaaccgttggatgttccctcaatggatggatggtattcagaccctgctgtttgatccagagcgtcggtcaaaggatggagggcctagattagaagtagagtaaccgattggcctggggctgtgctagcggttggattgtgatcggacaggtgatattagattggcgctcatagaatctctaccgtagatctcggattggtcggtcggtagcgcttacctgttggggcaaccgtggatctaatcctaaccctcaatctcag

SEQ ID NO: 192767 - DNA, 303 bp, Zea Mays
gttacttgctggatttctgcagatgacagagagaatttgagcactatgacattcatgacagatagtacatactcggagaacagtggcgtgccggtgctggtagaggtttttggttgctcatttgatgagttttcatgacttggggtgcctctgaaatctgaatcctgcattcctgccaagcacggcatggtattatggagttcctttgtcctgtgagaactggattttcgaatttacatacatacatattgggctgccctcgcacgccactccgaggggtcggccatgttcatgtcatgaggc

SEQ ID NO: 192768 - DNA, 418 bp, Zea Mays
agaggccggagccatggtaccccagacaacagctaaattcgggacaacagcaagatctgcaggtataccagcagtgatctccactaccgaggactcctccaatatctcatagtttccagctgtctggacacactgactggcatcgcctcccttcctaggctgaacttcggaccgtgggcctagacgttcaagagcagaacgtctgcccaaaagtacgctgtcatccgtagaaccccctcggccatcacggtcccctggtggcgaatgcgaatggaaacgccgcctctgacgtgtggaaccattcatatctgatgggatttggacggggtcaaggacaacacgtggtccatccaacaccttaatctgaacacgataggcaagagatagcctttcagcgcatggtcctattcccagcggt

SEQ ID NO: 192769 - DNA, 400 bp, Zea Mays
tttaccggcaagggcttcgtgaatccatcggcgacctgatctccagatgacacaaaatcaatgtgcaacagttttcttgccaccctttctcaaacaaaatgataatctatctctatatgcttagttcgaccatgaaagaccggattgttggatagatatttggcacctatattatcacaccatatttttgcttgttgagggctttgaaccccaatttcccgtaacaaagtttgaatccacataatttcagctgttgcattagctacagctttatattctgcttccgtgcttgatcttgatactgtaggttgtttccgtgcactccaagaaattaagttagttcccaagaacactgcaaatcctccggttgaccttctatcatcaagacaaccagcccaat

SEQ ID NO: 192770 - DNA, 606 bp, Zea Mays
gcagtgtcggagcgtgacgtgaaatcaagagggggcgacgaacgatttggcttctggatgtagaatcggagatagatcgaagcgcgtggcggcgtgtttccgtttgtgaaaatataggagtgctgtatggtcgatggcgtgcgcgacggtggagcagcacggcgtagtggcgggaggaggccgtggccgcgccaaccattcacttgggactgtcgtgcaagctgcccatccctgcgctcttgctgaagtcctgtgttgcagctgctcagctgtatgcttgtgacgagcatgtggtgctgggggccggcggggcacataatttcaagcaagcagatgaggatctacaaccaggagggtgtatccatccatgaattctagtccaacacccgagcatttaaccaaactagcacctttgatttcatcctgtgtctggcacgattcgtgctctggatcgtgttcgtcttccctaacaacagctgggtccggtgagctgaggtttgggtttgggggttttcaccagaggttgcacaggattagagtggtggtagaagacaaccaaccgataggaaaggtcggggcgcgtggaggtgttacaccaagacgagt

SEQ ID NO: 192771 - DNA, 465 bp, Zea Mays
tgacattgctatctattggggaaatatcagcggtacacaaaggctcatgccatgtagaacatgtttctttaggcctttgtggttgggtacaactaggacttgctggttctctgtttactatagcatgaaaattctagacaatgcccttgcagcaagttattacattgatagtctttgtttgatttcaaaggcaggccatagtgttagcatgtgtttggtttggggaagaggagtgacgggacggacctaaccctaccgtttgggacaggttcaacctgcttcatgttcagtttggaaattgggttgatcccatgattttgtttgttggaggtatcaatctatgggtttggaggttgggttctctactcttttctttctcctctgtacatgtagctgcgtactcagactcccccaccgccacttgccatccagcctgttacttccgagcaactcacgggccgcccc

SEQ ID NO: 192772 - DNA, 337 bp, Zea Mays
acctgatcagagtgatgaagatattcatttgtcacaagacattcttgccagtcggaaggaggacatctgttttgacgagctatgtgatgcagaaccttctgttgataatgattctctgaatcccggagcaggaaatgaaacctggggtctactaaacggccatgtgttagcaagaatcttccattttatgagggcagatgtgaaagcacttatttcttctgcagctacctgtaggagctggaatgctgctgtgaagtattacagaaacatgtgtagattcattgatctgtcttctgttggccctctttgcactgattctgtgttttgtgatattatg

SEQ ID NO: 192773 - DNA, 272 bp, Zea Mays
gcaaaggagtacttaagctgcgacaaagtaatcaaagcacctaatacacatgactcttatgatcttttgtaccccgtcgaatttttgaatacattgaatggaaataattttccacaacatcgaatagtcttgaaaaagggtacaccagtcatgctacttcggaatctgaaccaatctgaaggtctttgtaatggaacaagattgcttataacttctttgggtgacaaggttattgaaggccagataatgacaagcactcacaagtcaaaaaa

SEQ ID NO: 192774 - DNA, 275 bp, Zea Mays
aagtccaagaacctgagatgataagggagttgaagcccctcttaatctgatcctgcacaccaacagagattgttttccaccgatcctcaaaggatgtttccagcgatgatgtcccaaagtgtaagatattcagagatgactccaacagtcaaagctccctgaatattattaacccaagcatgattggtgagggcctcgagtactgttctactggttgctcttcgcttggatactaatgcaaatacttgcggtgtaaggccagcaactctgtggcc

SEQ ID NO: 192775 - DNA, 408 bp, Zea Mays
taacgcttggggttcgcccctcaaatgcggtcgcttctgcgtgtctctgctcgtagattttgcctgtccatttcagcgatgcttctgttgcgccgtgtaagtcaccagatcagacatgtcctcgtggcaatttctaaactgttcgtgctcggtccaattcttcgaacagttgccaaatcggcaataggtaatgatatactgttcatgtttcgctgtcttggagatccagtgaaatggagcctcagattgtttagacccctgtgtttacccatgcctcaacaattccttgtcataattaccatggaccgacgatgaattagatccttctttgccctgctgcagcgtgcctttgttaatgactactacaccattgaattagttcatcttatgtaaattcgaaattacctt

SEQ ID NO: 192776 - DNA, 279 bp, Zea Mays
ttctataagctgcaatggtgctaatcaaggaagtaaatatgaaaccaaccttcaaccagggactgctacagaggatatgatggctttcgaagagcagaatgcagacaagtctcacttagaagtcagtggtatcaacaaggctaatcaagctctgcatgatgatggcggcgtcatgaaaaataatacagtacatggtgggttgattgtgcagactgctccagtgtctcaaaattgcaatgtaaccttacatgataaaacttcagagcaggaaaatgaaaa

SEQ ID NO: 192777 - DNA, 340 bp, Zea Mays
gcttgaaatgtataaacaagttcctgaccctttggtatgtgggatacatagaattatagaaagatgggttatgttggaacatgcagttcatttcttgttatgtcccttgagaacatgtttgtaagggttctgtatcttttgatactttggtttagaatagttatcttttttagatgtctacctctttaaatgggtaatatatggcacaacagttggcactagtaactttcatgccttcctcacaaatggagggagtgaaccattgtgtatcagcacaagactaagaaacagcacatgactcccttttttaggatatgaaaaccacagaaaagatttgatc

SEQ ID NO: 192778 - DNA, 929 bp, Zea Mays
gctcaacttcaagtgttttctgctgaagggcattctaactatcagtttcccttcattttcttttttcccttagtttggtgcttgaattccttttgcacaatttttctctgtcagtcagtgatcccaattagagtgttgtacaatatggccatttgcagttatattgcttcattgcttttggcacgacatacatgagttgacattatttttcctcatacaggcaacaagcatgttatctgaaatatttccaggaaggtcccccaaagtaggaccaacttactgggatcagatccaagaacttgctaccatatcagtgataaagcgcatacttcagcgtctgcatgacatcttggatctggtaagcttttattttgaaaataacaaactagacatttgtaaactgtgctccgatcactttgcttgacttctgcccctttagcttttctctgttgtgcctctaggaaagtggtaactgatgttatttgtcattttggcacccaaccatatattaagggcctctggcttctttacatggttattggtaacattaatccaatgacagtttctatatatgagtggataattaattatatttgtgtctttgattcctatctttcagcatctaatacattaaacagccatgcacttttaaatactgagatacattttgttctcatctaggatactcttccatctcttcaagtgttctttactgagatgagcatctcttcgtcaacggaatgtagcagagttggacaaaagcaacgtcctcttgggcttctgcaccaaatgattgatgacgccttcaaaggaaagcgacagttcttgagtggtaacatctcagttgatacatatgaatgttaagtcattttgtggtgatgttctggctcacaatttaacattttattttaggtaagcttcacaatgtt

SEQ ID NO: 192779 - DNA, 637 bp, Zea Mays
cccaagttaagtaagcgtgagcatgtcgcaccgccttaaatcattgctgatttaagccgattgctccgttagtagggtatagtggtcaccccaagttaagtaagcgtgagcatgtcgcaccgccttaagtcattgccgacttaagccgattgctccgttagtagggtatagtggtcaccccgagttaagtaagcgtgagcatgtcgcaccaccttaagtcattgccgacttaagccgattgctccgttagtagggtatagtggtcacctcgagttaagtaatcgtaccggttaacagtgaacaattcgagtacttttgaagtctttttattgatgatatatttcccagtttacagagtacattgtcgtcccaatagcttttgagatctagctaggggtaaaacttcctgagatgttctatgttccatgagttcccaatttccgtgccatccatttgagtaaggcgatacgatccaggccgaacgacttctgctactatgaacggtccttcccatagtggcgacagtttgtgccgtccctcccccgttagaattcggcgaaggacgaggtctcctactgtgaaggatcgatgccgtatggccttgtcatgatagcgcctcagagtttgctgatatcgg

SEQ ID NO: 192780 - DNA, 276 bp, Zea Mays
ttgtgctgtggtgaaaccctggctttcagattgaaaatgaacggttatgattaactctggtgcatacgggtcggctagatctcatcgggccgctaattggtgatcgcgcggtcaggaatagatcgacgtagcgggcgaatctaggcgggtggatgctgatccaacggcgggtgatggcgtgggggttgttaatagggccgatctaatcgggccgcgtatttcagatcgggcggccgagatcaaaacataccccttcggccgcacgttttgtaaaag

SEQ ID NO: 192781 - DNA, 288 bp, Zea Mays
ctaccctataatatttccaactgtaaatggtaatattaatcctgccgtcattttaaaagttataagggttagatagagtggcatgacttatttattctgtaaattcatactgtaaccgtgagataagcatttcaattttcttcccctttagtctattggagctgccaatttattgcacgtgcatccaatgtttctttgaagcactggcatgagacgggtggtgtcagcattgatgaaaatatcctcattgataaaacagtgcacaaggccatcgattctagatctgct

SEQ ID NO: 192782 - DNA, 599 bp, Zea Mays
taacgactcatgtcatattgttgagatccattctgataccctgatgaaaaagagtctctcatcctttacagtgcgagcatggtgttttgattttaaaaagttacaaaggcagatgacgctacacattattgagagagggctgcagagcaatgacaagggctgtttatcatacaagatcagtatcagtgcaaccatggtcaatcctgaggacacggatttggggggattgcactcctcgcccccagatgacgctcatcagccagaagattttgaagatcaggatattggcaacagtatgttccctcgtcctcctcgtctgggtgccccttctgctggtcggcagtcagtccattccaggctgggaccacagccgccacaaggaagaggaggggtctcgcgtgccaacagagagctgaacacgcctgccaccaccaaggatgcggctgatttcctgaagctggggcatttaaattccttggacaatgggaaggatgcggctggaggagatctcttgtgtattcccgaagcaacagtgctggacccaaggtcggctgatgaagatctcctggcgccggagcatttaaatatcttggaagacg

SEQ ID NO: 192783 - DNA, 440 bp, Zea Mays
cacatccatcttggagttttcctacctaatcggacccggcagcctggcatgatcacgttaattaattatgcgcatgtaataataacaaaatccggcatccatgttcgtagtggttgcgtgcgtgtgtgtccaaaataatataaacaaatgaaatcctttttgggtgaattatgaaggattaaccatgaacagtcacccaccgttatgtatagctaatacatgggccgtcgcgatcaaccataaattaaccgctgtgtctaatcgcactgccagccaccatggtggttgcaaaatttatgtggtatcagcaccgatggatgggattattcctccctccctgatctctctccctctccctctgtctgcttgtccctcgccccaccataaaccaaaccaaccaaccaaccaatcaaccaaaccggcgcctgatgcgaactagt

SEQ ID NO: 192784 - DNA, 357 bp, Zea Mays
cgcagggccacagcgagcaggtgagtcaaactcctcgtgccgcctccctcggcctcgctgctgctgctgggcttgggctaccagcccagccctaccatcatcactccaccacctgcatagtgcatacccatacgcatacgcatacgctggggagttgccttgcgttgcgtacgaggtgttgtttgccttgtctcactctcacctcgcccggtgcggctgctttgatcgctctcgcttgcatttctgcccaagctaatgcgtgtgtgtggacgcgtgtgaaggtggcagcgtcgacgaacaaggaggtggacgggcacatccccaactaccccaacctgccgccgcagctgatctgcc

SEQ ID NO: 192785 - DNA, 614 bp, Zea Mays
caagaattatctctgacgaacttcgatcagactcttgaagacatggttccagaagatctgttgtcagagccggcagatggtggcgcgatgaatgtttgtgctggtgtgcccgatgccgggttggggtcatcccgggcagcgtcccacgcctcatcgaccttagagcgcggtcttgagggtcaggaggctggtctggattgcactgctcccacagaagtgactgagggtccttcagccttagaggtggttgttgcagaaaactcggccctcaaggatggtgctggcgcttacccagcccccgagggtgttgccggagatgatccggctcggatgggtagcgcgagctgtgacccagcccccgagggtgtccaagtgggttctccctcccacacttccatggatgttcacgtagggtcttctcctccacattctggttgcatggcgatagcccaagccttgggtcaaggagtcgctttagaggccagcgcacctgatgacagagttctggcttctgctgatgacactgaattggttcccactgatgcattgcgggttgttccggttggtgatccttcgtcaagccatcaattgacttcccacgacttgggggttcc

SEQ ID NO: 192786 - DNA, 562 bp, Zea Mays
gtattcgaagtcatgaatctcttctgtagcatcaaacaagtctgataaatttctgtatctcagtggaaccatgcctgaactttcagtgttatcagaattttgaaggttgtttgcagctgaacctgaagctaatgttgaaggctgcacctgtggagtcagtggtgagggaggtggcagatgattcccccccgaattctcaccaacttgatcagatgtagttgggtcttggattgcttcatcaggagcattaaattgaaactgaaagactgtagtttctgaattttcatcaggcaactgagtattttgactatcctccagttctccccaattccatcccattccctcttcaaacttaacatctctgctaatcacaagtttgttagtagagggatcatacatcctgtacccttttgatcctggctcatacctcaccattaccattctagcagatctgtctaataatttttcaatactagggccatccttctttacatgtcctacacagccaaaagtcttcaagtgactgacataaggcttcttcccataccaagcttcatagggg

SEQ ID NO: 192787 - DNA, 365 bp, Zea Mays
gaaactcatggtggcgtccggttgctctagtcggccatggtttggcgggaacgtatgctcccaagctcggtgtcccgccgtagcccaccctcaccgtcgacctgctcttcggctcgtattctgcccaaacccaagagtgtgcataactcctggtgaacccgtgaatccttcctcagcctcaatttggtcgtccccgccgtcgtttggtcggaacgcgttcgttcctataaccatccgcctgtcaccatgaacccgttgttccagagctccaattcaaaaattgagtgaggggaaacctccggttaggtcggaatctggagtcagtcgtcggtaagcaccaatccttgcgtgctccgccccttcca

SEQ ID NO: 192788 - DNA, 835 bp, Zea Mays
gccgtgggctatatatatacatgtaatcagcacttgagaaggaaaaaaagaacaattatccatctctctctgtctcctctcaagcccagccaccgtaaggggtataaccttcggccctggaagacacggcaggagactacgaactccgtagtcgagggccgcctacccttgatcaccacgctcttgacatctggtatcagcgatccagccgatcctccacctcctcaccagccgccgccagccctaaatcaccgcccaacccaccctcgccgacctcttcatctgaatctgcaaccaacccagcagccaccatgtctgagccgtctctcgccgacgtgctggacatgctcaagaccatgacctcggagatgcagaccctcaagtccgacatggcagccatgaaggacaggacttcgtcagcgtctggcaccgccgatggcaaccagacggatagaccccacgatcaagacttcttcccgagccataagaagtgggactttccccgcttcgacggcacgatcgatccaatgctcttcctcaacaagtgcgaggcttacttccgccaacatcgcaccatggcggaggagcgcgtgcgcatggcgtcctatcacctggacgaggtcgcgcagctatggtatatccagcttcaggacgatgagggcaccccatcgtggggacatttcaaagatctcctgaacctccggttcgggcccccgctccggtctgccccgatgttcgagctcgccgactgccgacgcaccggaaccgtggaagaatacgccagccgattccaggcccttctaccccgcgccggtcggcttgaagaggcgcagcg

SEQ ID NO: 192789 - DNA, 436 bp, Zea Mays
atcaacctttggatacttagttaattcaagatcccagtacatactcatctaaataattatttcttccacaggcactgcatgtggatccttggacatgaattcaacatggtatgatttagtcaaagacgcgaaggatcgtgaatgtttctttaaagctcgcgatgatgatttttttgctagaacaatggatcagtttagacttatgcaaaactcacaggtgacagacaatgtttcacgatggaacattgaatgccagtgtgctccagatgcacaactcacatgtgacaaccatgctacaataccagacaaggctccagatgcacaactcacaggtgacaaccgtgccacaataccagacaaggcacaggttgtagagcctgcacatgcagagcaggtgcctatgcagtcagaaagagctgcagaaaagacatggcag

SEQ ID NO: 192790 - DNA, 346 bp, Zea Mays
tgggtacaggatcgtcgaacgggggtgcgggcatccggccgacgccattgtcgtcgtcgtcgtcgtcaaacctgtaggattttccgacacaaacaaagtagcaagagtgtggatggatcattacttcaatgcgtgaaattaaatcgaaatggtagtagtgcacagcatacgcgtagagacagccgggcgttttgcgacggtttctggcacgcagaacacgcaatcacatccaatcggcctcatgcaggtgccgttgccgttgttcaatcccttggcgcaactcttggcacacacgtcgggatcgcatggcaggtctgggtacaggatcgtcgaacgggggtgcggg

SEQ ID NO: 192791 - DNA, 357 bp, Zea Mays
gtgccctggcttccccttctgcgattccgtcgctcgcatatgtcgaccctcgatcgcaacttctcttctctccactcccccacgccaccacatcctacagccgtcacccagcccacaacaaccgccggccgccgccgtctctcgcgcttcgcctggtccatccgcctcgctcgcaacctcccacctgcgccagccctcatatgattcctccaccatgaaagccacgacgcatccaatccaccacgacaccaccgccccgccagatccgatcgagttgtgtgctgcagtcggtggatgagttggacacgagcaagaagagccaaggcgatggtgggggcagagctaaacgtgggttgg

SEQ ID NO: 192792 - DNA, 436 bp, Zea Mays
tgatttgccttctgcacaatgtcactttacatgtaatgttcagctgtgcccccattttaattgtcttctgtttgatcatttattaatttatatactaaaaggatttgttctgggggctttcgtaggcggatccagaaacagatgaagtgtatgcacaaatgactcttttgccagttacttcagtacgtatctcagtgctgctcctggtttgccataatgttttccttcatttcagtatttgtaacacaagtttttggacatcaaactgaccgttaacggtgatcagtatggaaaggaggcgctgcaactatcggaactagcgctgaaacaaccaaggcctcaaacagagttcttctgtaagacactaactgcaagtgacacaagcactcatggaggcttctccgtgcctcgtcgagcagctgagaagatatttcca

SEQ ID NO: 192793 - DNA, 334 bp, Zea Mays
aaccgactgagcttatcttcctataattctgccgacttatcatcattcagttccgacgcctgagggcgcagcgcgggagaatcggatcactgctgtggataatgcttaagtccattgcgctgcccgggctcgagttgatccagtcttgcatcgatccactctgccagacactcctccctaggcccacgaagggatggccttgcgaaacaatgggcccaaggcctttcgcgaggtcttctggccttctagtggacccgggggatatctgtcccccacaatatgcatgcatctttctggtggcacctctgtcccaatctctgctaaaaaggcaatc

SEQ ID NO: 192794 - DNA, 283 bp, Zea Mays
tgttgaatctgagctagcaatatagcacgatccaccgtagtgggaacctgaacttgcaccacatcctgcagttcaaacttgaggccacaaacaaagtgggtaacaaagaatgtttcatcatattgagcattatgcaccgccactccataccgagcctgctcaaattcatgaacatagttatccagcgtgccgaactgacacaacgaaaacagtcttcgcagcgctctaggataagcctcagcaccaaacttactgacaacagctgcaccaaattcatgccaac

SEQ ID NO: 192795 - DNA, 593 bp, Zea Mays
aaggagatacgtcctgcgcgtcaacctgtccaactgaaacacgttgtcttcttctactataaactttaagtgatgtcccgtagacatttggatgcattctgcagctctggaccatgggagagtttaagttagcttattctagcggctcactcaactccagcgacctgggagaaatgggcgggagggtggagaagtgagctgctacctgacactggggcgagacaggcctatcagtttcaagcggcccaacagaatgttggggggaaattaatgtgacctgccccagcggccctacgtcagagtgggtcaccggacccagagtgccctcttcctgctgcataggcccattagatttcagcggaccagcagattgttggggggaaagtaatgcgacctgctctagctgtccatcctcagagtgagtttcttcaagtctgtcatcccataaactgtcctgctccagctgcccatcctcagattgagtctcttcgagtctgccatcccgtaaactgtccagcataattgtttccttggaaaccagtccagcagtctgttcagtagccccagcaagcagttccaggctggatccgccc

SEQ ID NO: 192796 - DNA, 401 bp, Zea Mays
cggcaatggccacggcgggcagcagagggtggtgaaccagcccgacacaaccggtttccaacctgcccccgcgcctgccccccaccaaactcctgcgcgaccgccacctgcacctcagaatgcggctgtgcatgttcccatatccgcaccatggccgcaacctcaaggtgagtgagtgaggtgtcctgttcttctgctatcttgtattgcctctggaatggtgcaaatacgaaccgatgtgttcctttgattgcatgtgtttttctttgactcaccaggtccacaagtgtcatcttcatcagctgccagcgacaggccggctaatccgccattacctaaagctactcatgctgctccaagggctccaccaaaaagctctaacccaccccttcctcagggag

SEQ ID NO: 192797 - DNA, 716 bp, Zea Mays
gcgtgaccgggatgtccaagtcgttggtgccatagggtagatgcaagaagagcagaggccgggaaccgcagggggtatagtggaccagagctgttacatctgaagatctcgcgccgagtgggtagatccttcacagagcagccaaaaggatcaaattcaacagagcaattattatcagtggtaaattgacggacagaaatcagatccttaatgagggagggggaaactaaaacattgtgaagagaaagattatagggaagacgggtggtgccagtggaggtaacagggattagatgaccgttgccaacgacaatatgagcaggaagatgctgggaagaggggggatgagatattataccagcgtcagatgtcatgtgactggaggcaccagtatcaaaatgccactcttgttgaggcggctgctgaagagtgacagtttggaagttggcagcgagggtgtgttgatcccagacgggtgcaggcgtagaaggatcggcgtaggcagggggcggcccatatgctgcagcgggaactgcccactgaccaggagtgccggcgacgaaggcatgcggtggtgggggcgaggcagcaggtggacgaggagtcgaaggtggacgttggctaggccacatgtagatggcccccatccaagggttgtagtagttgtagttggaagatggtgcaggaccaatgatgccgctgctgctgtggctgga

SEQ ID NO: 192798 - DNA, 1118 bp, Zea Mays
ccacattgcatactaacatagggtcttagttctatgcactttatataatcagctcatggggctcaatgcaatataattttattctcaaacaatacctcctctaacatggtatcacaaatctaatgttgcttttgctcctcccctggtcgccgcctttctagggcagtggcccctctagggctgttgtcaccgttgtgtcgtgtggtcgtagcaacgtacacacatcttctccctctttctcccgcacccatgacaggacctcattgactgacgaggagcgcaccacgctgaggatgaggttgtggcctttcgcaagaagatcgacgacatgttcgctgcggctcaggatgcggacaaggaagctgccaatgcacacattcgtgtccaggtagccactcatctcctcgaacaggagaaggccgccgccctcgagtagaaggctagcgccgcttgacatgatttgttcctacaacaccccacgatcgcagcttacggggctgccgtcattgccaacctctacgtctaggcagctactgtttccaacgttcgagtgttggtgatggttgtccccgtgtcctcctttgacaattatgccggttggcttgattaggtgttgcttgctctcaagtgatacgcctttgtcaaccacatcttgtttgacccttcgttggacaccggtttgtgctgggatcgaatggacatcatctgttggatctccgacaccatctctctaggttgtgtcaggtggctagggagcgcaatggcacgacatgccatctttggctcactctcaagaatcagtttcttgggaatcgtgagatcgacaccctctagctcgacactaacttccacaccttcatccagggcgacctactcgtgggtgactactgttgcaagatgaagatgtttgactttcttgccgacttgggcgcccccgtcaacaaatggatcctcatcctcaatattctttgaggcctaaacaagaagtttgagtgcattggggccatcatccgacgctactccccctgttgcaagctaaggaaatggcagactccctagctggcttgggcgccgctgtcaacaaccagattcttttcctcaacattctccgaggcctg

SEQ ID NO: 192799 - DNA, 2033 bp, Zea Mays
gatttgatacttcacgatcatctcaatttcatcctagccttgatcctgctattttggaagctgatgcacatcgagctctcctcctcctcctggatattctgcgaacagcttatgcccatcgagggtccttcctagttggcaccatcaactcgtaagaatttctaccaactttatcgtatatgttgagcagaagtgatttgttacactcactatcctgccatttcatcctctctttgaactagctttctctgtgtatgaagatgaacctgaatttatttaatgaatggcatcagttcctagctatctacatgtttatcttgacttataaatatgctaacattatggagcaattgaattactttaggtgatcaactggtatcctaccctttttgttacacaacctaggttctttgtgatccactgacattattttgacctttgtgggcttgtgtgtttggctccttgcttgcttgctgcgagcccaggcccagctatgcatgcaggtgtagctatctttgaagcttgagacagtgtatcattttgtgctgtttatcttgcaaagccgcatagctgtctgagatgtatttatttgtgttctgaaatataatatatggcacttgtcagtcttgcagcagttgtaaagatccgaccgatttactatgaccgcgtgttgccagttttgcttgattttgaccctggcttggagactgcaaagggggcacattcagcaagcctgcggtatgctgtaagagcagcttttttggggtttctacggagtccccaccaggcaatgattgaggttagctcatctacaggttacacatgtagattatggttcagttgtcattaataaattatctgatttaatttacatacttcatgcctcgatacagctcaaagattcttaaactgttgctataattgaattttgcttgcgaggaagtataacttggctagcatgttaatgtgttcttacaccaggttatgatcaattaacggatggtagtacaaatatgattgttgatagtaaatatgccttgatgcatgaagctcatatgtaaattgaggactcgattcagccctagtatatatgtattataatttagaaatctatgtggattttgtcaaaactttaaagatgattttttaagcagatctttacaaccaaggatgttgctccttgtcatggggtggcagccaagggcatgaggcccatagggataggctcagggttaggattagtggataaagattagataagattgagttacttacttgggattagattagataagattgagttagttacttggggggcaagtcttcctatctatataaggatgagttgtacctccttaagggggaatcaatcaatgaagaagaattagtcccatatctctctaatagtctagtcccccccccccccccaagccgactccgcctggctatcattcccttatgaactaggaaccataacactcctcaatcttaatatggattcgtgcggtaaaaaagtgatactaacgaagtcggagttatgataagaaagatggaatcatgcactcactataggatttgaatgtatgacattaggtttttgtagactactagactcattctaccaaactcaaaccaagatttttgtggcaacggtatctggtctgagctgtcaagtttcctttcagggagccactcctgtgaagacaatccctactcccctctcttttcttctcgatctggttgcttgtttgtgtttgttgttgtaacttaataaaggactaatttttggagacatcttgttttcttttgagaaattgtacatcaattctgcattgcttttcctaaatgtgtgtaggatttacatattcatatttgttttttgatgtatattgcttgtcaagctaaccagacttccttctcttgacagtctaaagacatattggtaaggcggctgcgtgttctcagccctggtgaggcaatggaacaaaatattaggcaggcagagaagatgtctagaaatatagagcgtgctt

SEQ ID NO: 192800 - DNA, 491 bp, Zea Mays
gtgagatttgtgaatactaaaggtgaggtaattgaaagatttctaggtctcaagcatgtcaaggacacaacatcggaagcattgaagagagcactggttgaggcattaagcgaccatggtttatgtgttgcaaatcttcgagggcaagggtatgatggtgcttctaacatgagaggagaatttaatggtcttcaaaaaataattcgagatgagaacccgcatgctcattatattcattgctttgctcatcaattgcaattggtagttgttgcggtctcaaaatgttcctcatctattgaagatttctttgagtatgtttcattgattgtgaatagcactagtgcttcttgcaaaaggaaagatgtgttggttcataagcatcgcttaaatattttgtctaagttagagagtggacaaattgtatcgggaagaggtaaacaacaagaaacatcattggcgagagcaggagatacaagatggggatctcacta

SEQ ID NO: 192801 - DNA, 294 bp, Zea Mays
aatcacaaatgagtcgaagttagaaaccttttctttgaaatttccgttgatggctagcgcaagtggtggcgcgtcattcagatcaggggtcactttgtccaccaccaccatcggttcaacatttgtgggccagagcgttaggctgagcccagcagagttcctatttggattcgcatgagtaaaataggtaaagaatggctaatgtttatcgttccaacagagctcgtatctgtcttcgcaaactacgaggggctcgcgacgcttcccttttctgcgctttctcttttctcccct

SEQ ID NO: 192802 - DNA, 314 bp, Zea Mays
cctggtctaaccagagacaggcccccactcttgttaaattagatcatgtcttctgcacttcgagctgggaagggttgttcccagcttctactttattcagcaaggcctcagaagattctgatcattgccctttgattttaaagctgcgtgaagaagaaggtacggggaaaaggagatttcatttcgagagtggaccaaattgccagactttcgtgagttggtggcagattcctggaaccagccacttcaaatctgtggtcatctggagaggatctctctgaagctcaagaggctaatcagagccctgcagtctt

SEQ ID NO: 192803 - DNA, 398 bp, Zea Mays
atcatacacaaggatgtgatgttagttatgtagaccagtggacgatccaggattcaatacatgtggaaccaagcacattagttttaaatgaattaacacaaacattacatgattaacatatatataattgtgtattctgtgaaccccctaggctttacatggatccactgcgacctctctgtgtatgtccatgtgtttgtttgtatggttttggggtggggcattggagggaggggttccataaataacaaatagagagtagaggattggtatgtatggatgaaacatatatgccaacaagttcaggaatgttcttaatcctttcctattagcttgttgtggttgattacctttcgaagcattaaacatccttaaacaacagtttggcagatggatcc

SEQ ID NO: 192804 - DNA, 416 bp, Zea Mays
gttcttttgggatccaacgaaaccaatgcatctgatttgctggacactgagtggccaggtcattattcacaagtttgcttggactacggcagtcagtgagagttcaattgcacttgtgattgatggttctcatgttcttgttactcctcttattttgggcctcatgccacctcccatgtctctgttccaccttgcatttccttgtgcagtgaatgaggtttcttttgtgaccaataactcgaagagccatttggctgcttatctctcaaatggcagcctgtctgttgtggaacttccagcacctgatacctgggaagaatttgaaggcaatgggataagtgttgatccttgctgttctgacttcactttgaataactgtatgcacctcacttggatagatacacgcaccttgatcg

SEQ ID NO: 192805 - DNA, 403 bp, Zea Mays
gatccaaaagttcaatccaaataccccaatatgcccttagttcacttcgtttttagtcctgtaagatcctgacatgctatacgctttgttttttcataacattgcaggaaatgaagcagcaatgcgacatgaaaaggttcaaatacaactcaagtcaacctttttttctcatttatgattaattgatactttgttttactaatatttctttttcctttcatcacagagagacatatgaagctatgagggcatcctatacacaaaaaggaaggtcaaggcattccaaaactgaaacatactctgcagaacaactgcaaagcgctctcgctgagtaccaagaagacgcagcgctgttcatatttcgcttaaagtcattgaggcaagggcaattccatagcctttt

SEQ ID NO: 192806 - DNA, 309 bp, Zea Mays
cccgtgaagtacaagaatcacgttgtcctaagtagtatatatgcttgcttctgttacgtcgtctcttcatctttactgcacgctttacgccaaactgcggttaggaatcgtgaaagttgacgagtgacgatcatgacctgcattgccgtcacatgtgtgtgttgggacgaagcgatcatgacctgcattgacgatcatgacctgcattgccgtcacccttcgtttgatgatttctacttcgcgctgcgcggacgaagaccgcatccgctggacccaccggacagagggtgctgcccagacggaggccta

SEQ ID NO: 192807 - DNA, 351 bp, Zea Mays
tcggtgcgtcctcctcctgttcgtcagtcctcctgggcatcttctcgttcgggtccgtccttgtgcataagtccgtctgtctctttggggatctcatggtctaggagccaacatattccttttatatgccgaggaaggggccagccagcggtatctttcactaagaaggagtcaccagacgacgacaaaccaagcgttctaccatggggtgcagccacacgtgctcgtgggtcccaagctcacctggttgtcttgtattcttatggcggacgacgcagagagcgtggggcctgagcgccatcatttgggctatgccgacccatggccttcgtagcctagggctcaatgtgg

SEQ ID NO: 192808 - DNA, 1225 bp, Zea Mays
taattgaccaggacctggtaaaaatacttatgttaaaccatctcggaataacataagcgtatggcttaaaatcctcatgtggttacaggctccccaagaaatgccgtgtgcactagaagtgattgatgcaaggttacagagcacatcacatattcagtgcagcagatcatttgaccaaaacattggaagacgcttttcaaaggtatgcattatccgctatatgagcgagggttctcttgtgctttcatggcatagattcccaagcttcgcccgtactcattcggcgctttgtattctcatcagggccatctgatacaaaaacctgttgccatttgtcctgagaacaggtaattggctgttgccacttgctttaattaccaacaatcaacggtgggctttgtgtatctagtctgctgctgttatgtatactacgtaacaagaaattgtaaacgaagtgaacaacttataattgaatgaagagacaaagggttgatcatcaggaaagatctagttgatcttactgttgctggcatgtgtaaaaaatgcttaagctacctatccacacaactaaacctatctggaagtttgctgcccttgtttgacaactgtggaggttaaatcttaatttgctacaaagtttcttgcgcttggttgcgcaacagaaagtggtgggataactaaaacacaactgtactgatttttttcactaaaaggtccaatctagtgtcaccaaatcctttctggatctcttgtttgttgccttattatacgtgtcaattagtctaccactctaccatcattttcattatgaagcattttcacagtacaatgtcaccaaccagcatacccaaacaccttgaatcccatctgttcttccattttctaggagagctacctgtttaatgtgtttttgtgtggcagtgacacctcatcaacaatacttctgtttcggcacgatccagactggaaacaagcaccattcttgtctgacactcaagaggtcaacaaggtaatctctttgtcatcaggagctcttgatacagattgccttgagctattatctgaacagccaagaatactgttttgcttagatcagccaaatgaaaagaacatgcatgatcaggttgattcttctaaaccagtttccaatggaaacacacatgggggaagcacctttagacaatctcagcaaagggaaaacgtttgtaattcattgatggcagtt

SEQ ID NO: 192809 - DNA, 407 bp, Zea Mays
cgggaagtgggcatatgctttgatagagtacgatctaatttatgagtctttatcttctatgaaagggcaagttatagctgattttataactgaacatagggttgatgtagagcaggaaatctcatgtcttaatattcgtccttggcaattatttttcgatggttctgtgtgcaaggaagggcagggaatcggctatgttttagtgtcaccaaatggtttattgcatgaaacatcaattaggattgaatattgttgcactaacaatcagattgagtatgaggcgttgttgtttgggttaatgcatttagatgatatgggaataaaagatatagacgtgttcggggattcgttgcttgtggtacagcaggtgagaggggaatttcagtgtttagatggtatgctgcgta

SEQ ID NO: 192810 - DNA, 293 bp, Zea Mays
tgaactacgactgaagcagtagtaaaaggaacaaacatgcagagagggcaagtaaaaaggtaataaaaaaggcaagaacaatagaagggtcccagttccgatgggcacatgggcaggaaggcagacataagtttcagagtaacagcatatgtcctttgaatgcacaagcataaacatgaacctatcaccacttagaaactgaatctagatctagatttatcatagagcagttctactgatgaatctaaaaattatcgtaaaaagtgttcagctagctatcatcttcaggtcca

SEQ ID NO: 192811 - DNA, 1206 bp, Zea Mays
gctgcggtcgtccccgaagcggtacagcggcacggacccaccgttgtctctggcggggccgacgttggcggatctgcagaggacggccgagctggagaaggttgttctttgtctctgcttacgttttgcagctctaacggcttacttggcttccattgtgacgacgttccgtttattttgctgaaaaactgggtttcagttcttggttgaagcgggcctctatgagggtaaagaggagtccgcgaagcgggaagatgtgctatccgagattggtctggtaatccctcgcttcctgtttacccgctgtttacatgtttgtttaccctacccaacaagttgacatctcatacttgactgaagttgtgggttgaatttaagaagggaacatgtgatatatactacaccatttctcgaagttgtgagtcattttagttttatcctaagtcaaacttcttgagctttgactaagtttatttataggaaaatgcacagacatctgcaacatcaaacaatattcatttagataaaaccatgaataaatgttggtagtgtatttatttgatatagtatatgttaatatattttctacacttggttaaagttagacaattttgactaagaaaaaatataaaacgacttacaatttgaaatggaggtagtaatttccaattgagctttgtatggtgtgtactgccttgtagcattttgctaagtcagcgttgtgtacaagtacttgtatggtttttgttttgacatttttgaacaggaaagaatgctgatggttatcaacatatttatctgtccattgctgacataatctttagtacctatgtagttttgttctccattgcttatttgcataaacaatatgcctattttttttgtctttttttcttaatctatctttgcttgaaatgctgcataatacattaacatacacatatactttcttttgaattcacagatagtcaaggaatgggtgaagcagttgactcgtaagaaaggatatgctgagcaattggttgaacaagcaaatgcaatcctttttacttttgggtcttacagattgggggtatcggcttctttggttcttttatcatataacaacttttcttgacattcagatattgaaatagcacaactcattgtatctatagtcttattaacagcattcaagttccacttgctgaatataacctagatttg

SEQ ID NO: 192812 - DNA, 336 bp, Zea Mays
tgccagccttaggtagaggccttgggctgcaagtctgatcaactacagtggtgagatggcaagagccttgcagtggtgtcgaactactggcttggcagggagaggttgagaggaaatgcactaccatatcaggtttgtgtttggggaaatacacttgtccttgtgttcttacatgattttcattagttctgcaggttctgtaatgaaaatctagcatgatgaaccatagggctacaagagatgaatgcacgaaccccttatccatttaggacttgtgttcttgcatgaaccccttaattgtttcatgcctacaacatgtttgcctcttaattgttg

SEQ ID NO: 192813 - DNA, 591 bp, Zea Mays
gaggcttttctcggcatcctgccacactttggactgtggaaatatttgtatcactgtcggcctgggatggccggaggttagcatcagctggtggggggcgtgagcttggagatgcgccgcggaaggaagactgattatctcgacatccccctcaaggacagcattaaaggatggcgcttggagtggtttattgttgagaatcatggaaattctctccccccacggtcagggagatagccgtatgttcgcactccgagctggaccgaatcccccacagaccaggatgtggccgaagcaggagttctgctagctgaagttggtttgttgaaggagaggggtctgactgcagaagctgtggttgctgactttgtcttcaagaatattcagccattgaaggatagggcatacccggcctacctgtaccgaggcctagctgactccacccgggctaccaatagaagaattcctgctgtggatttggtgagccggcttgaaatgatacttaggggcaaggtgtcaaatgttggtgcccctattgcttactcggcctggaacttgcctccttccaagacctttactcaatgcgtgtca

SEQ ID NO: 192814 - DNA, 534 bp, Zea Mays
actctgtttgttggtcgatttgacatgcgtatgatgcaggtacatcactttttccctccgccatagtgcctttattgcatggtttctgcttgattccttatgcatttctttccgttataggcacataacagtactgatttatgtattgcactacaaagttattaacagtttttttactaaccttgaccaggctgctatgaataaaactcctgatgaagctaacagccatgaccttttgtatgatcatcttgatggaaaagatgagctttggtttgacttcattgcagatactggtgatggtggcaactctacatatgctgtagcacgattacttgctcaacccttgttagttataaactctgatgactcgaggctaacatttcctcgtgggcaactgcttctcgttggtggtgaccttgcgtatgtttcctgttgacgctgactactaaataaccaataaaaaatcatctagttcttggcaactcgtcatcccagctacagaagataccatgtattgctattgcccgtttcatc

SEQ ID NO: 192815 - DNA, 529 bp, Zea Mays
ctcatgtcaggcacaaatgaagcagcaaacaggagaacccagacaggaatggtcttgcccttccagccactttcactctctttcaaccacatgaactactatgttgacatgcctgctgtaagttattcttctaaaatgatgttcataaccagatggagaaaagttgatgaaacagaaacacatcaaagttagaacagaaactcactttatcaatgataatcttctgttgcctggtgcttctaagtcatgtgataatagtataatactactattttgaactaaggcagttgcctatacctttactactcaaatatgcaattgcaattcgtttgctaacatatgatgcggaattttgctttctaggcaatgaaagatcaaggtttcactgaaagtcgcctccagctgctatctgatattagtggtgcattcagaccaggcgttctgactgccctagttggtgtcagtggagctggaaagaccactctaatggatgtactagcaggaagaaagacaagtggaaccattgagg

SEQ ID NO: 192816 - DNA, 334 bp, Zea Mays
tgccacgtatttaagaattttgttatcacataagaccttgccagtttgatgactgaaacatgtttttgaaattaattaaacatcacaatgtagctatttgcaccgaataaatctccacacaccgttcctgtttttatacacacttatccaatgagttgtttgaactttttaaccttttgaacatagagaaatgtaacttgtaaggaaaatacatactgtttgttgccaccctactggcccatgctgttcttagatgcatagatgccatacatgaatttgttcatgacttcatgttcataagacctaaatccttgaaaaaaatcatcgagcactt

SEQ ID NO: 192817 - DNA, 479 bp, Zea Mays
gggagcaacaataatgtttttgaggtggaacagtcctggaagaaccgagtcacctactggggtaaccaggagggtggaaccgttccttacaataatagaggatggaagggatggatgagggggatgggagtgagagaacgtgctagcaccaggagtggtgcggtaggaggctctagagtccaccacctagtctgacgtggtgggaggtggagtcagcgccatggtgttgaacgagctaatgagagacgaccgatcctagccgcgacaccatgggtaccatgggagaggtgggggtccccgggagcggaaggagaggtggaggcggcgactggtgctgaagaggggacaccgaaggtggagggcaccgtaggatgtactcagcagagtaggctgtggtcgacgcgttgaggaagcacccatagccaaccccgaccaaatggagatgatcttggtccagaggttgaagaagggcgaccaca

SEQ ID NO: 192818 - DNA, 277 bp, Zea Mays
ttgacgttggctacagcgaccatggtggcagccattcctctgtgtccacacctcccccgttcgctttgtcgttgtctctccgattgccataggtatgaacattccttttcaccgtaacttcataggtttgtgtccccttagtgttagggttgtcttccagcctcccgcaatgtgcgctcccatgccattacaacacatcgagtagcaatcgccttcctcgcgtttttccatcgctcgctccccctgcagtgtagagtttgcttaggtattgcccaac

SEQ ID NO: 192819 - DNA, 320 bp, Zea Mays
cgacgacctgctccaagccttcgacagcgtcttcgccgagccttcgggtctgcccccacagcgggctcgggaccacgccatcatcctcaagccgggggctgcaccggtggcggtaagaccctacctctaccacgcggcacacaaggacgagctggagagacagagtgttgccatgatcgctcaaggtatcgttcgtcgcagcgattccgtgttctcctctccagtgctgctcgtcaagaagcaagatggggcttggcggttttgtgtcgactaccgcgccctgaacgccctcaccgtcaaggacgtctttcccatcccgg

SEQ ID NO: 192820 - DNA, 512 bp, Zea Mays
tgtcgttgaagaagatgaaacattgaacttctatttatgttgggaacaaatgtatcttagcttgatgtaatattgcactttaaaattttgctctcttggttgtatggtaatgtgcaacttgtgaggtacatgtgtcaatcctggtgtgacatgtactgggacgataagatttgccttcgttttaaatgggttgttgtgcgaccatgtaccttttgatgtggtgactcatgttaatagccaaggcgtgggcacatgtcttctctaatcatgatggagtggttaccaatctatttagaccgagtgcaaattggaggttcccccacaataaggcagaggcagaagactcaacatggctaggtagcatctctgccatagcttgattttagtgcatcatatttccatcttttgcatctcggttttccctagtactttcccatatgtctccaccataaattgagctatgaagctctatcgttgtagttgtgccacaccttaatttatatccgtcctct

SEQ ID NO: 192821 - DNA, 554 bp, Zea Mays
ctacgatcatctccgggtttttggttgcctgtgttaccccaatatgtcaactacggctccccacaaactttctccccgctccaccccttgcatttttcttggctactccgatcaccacaaagggtaccgatgtcttgatcttcattccaataagatcatatctcgacacgtcgtcttcgatgagacctcgttcccctttgccacgcatccagcctctccatctgtcgaggactttgattttttactggacgctaaccctctcgtgcctactcccatcggactagcacgttctcctctacttgcaggaatcttggcgacttccgcacaaccacgtgcggcctgtactgctcccctggcgcccagcagacccaccgcacagccacttgcggacagtactgctgcctcggcgcccaacagtccagactggttggctgctcccgcctcaaccccaggaagtacccaggcccagacgtccgtgagccctgcatcacctctggagcacacccagggcatgactattgttgcccctgggaacatctcagcctcgacgtccc

SEQ ID NO: 192822 - DNA, 571 bp, Zea Mays
gggaggtccgaatcgcaggttcaggagatccttgaaacgtccccatgttggtgtgccgtcgtcatcctgcagttgggtaaaccacatctgggcgacgtcgtccaggtagtacgacgccagtgccacgcgctcctccgccatagttctgtgttggtggaaataggcgtcgcatttgtggaggaagagcatgggatcggtcgtaccgtcgaagcgaggaaaatcccactttctatgtttgtggtggaagtcttgatcacgtaggccttccgcacgtcgggcagcaacgttgccgccggaggatgaagacgtgtccttgatggccgccatgtctgacttcaaggtcgtcatctccgcggtgagggacttcagctgtgccatgatctcggcgagggagggttctgccatggtgttgctgttggtgtctgaggcagtggatggtgggctagcgatggcagcagctgcggtggaggagcggctggggcgggtgggggaggatcggcgtgacctctgataccaggttgtcaagggcagtggtacccaaggcagcaggaccccggctacgtagttcgta

SEQ ID NO: 192823 - DNA, 842 bp, Zea Mays
aaagaacagcgtggtccgcaagaaagattacacttgaaaagcctgcgtagttctgttgatgctgagggtagctatcaagacttcacatttttccagtctttcctgtctccaattcagaaatggacggacaagaaactaaatgactatcacctacatttctccgaggtttgttttccaacctcctggtttggcttgtgctacactgtatgcatgggcagttattcaaaagaaaatataccctttactacttgaaagctaatccctttgtttcgacaattgtttgattttattaatttgtttactttatgtaacaatatttacaatacccttttactgaagattttttttgtaacgtgtcccacttcatgagttttttgttcatttgttatttttaacctaatccacagcacaaatgtgcataaggttggccatcgttattcagctaaatgaaattgcatgacctttctagtccgatcaatcaatttagttctgaaatctcttatgaacattgtcatcttcatctctttctcattttggccttttacatgtttcattttcacttcccatgcatagtatttaccacatgcttttctcttgatccgccgttttacccatgggtgcatgttgctattattcagacttcagtacctggctcctggcatatcctctacacattttagacattatattgttatatatatatataatataccacactgaacctttttatctctcatttggttgcaacaagagatcattattttctgcacattgggactttcttatttttacagggctccagcttgatggctgatgttgtgacagtggcaatgcttacaagg

SEQ ID NO: 192824 - DNA, 375 bp, Zea Mays
agaagccacaagcctgcaaaactgactttatactactataaaatcagataagcccagaagcaggtctggatgagcttttctaagaaacctgcttttggaaaagctccacccgcagaaactcaaacagacatgcaagtgattctccagatgtcgggaacccgtggtaaatcttttgttgctggatgttaccaaggcattttatattaacgtggacgctaagtcgctaacaagccgtgaactgtagagaggccacaaggaagaagataatgcgaagggatgtcaaataagctgggtttgaaccttggatgttagcaagttcagggatgtgaaactgcaaattaatagttccaggacttacatgcatctctggacaag

SEQ ID NO: 192825 - DNA, 2674 bp, Zea Mays
tattgagaaaaaaggcatagaagctgttcttcaactgtttaagttgccatcaatacctgtatctgtctcaattggtcagagtatttctgttgcattcaaaaacttctcacctcagcattctgtttctcttgcacgagcagtgtgctcattctttagagaccaccttaaaataaccaatgaactgttgggttcgatctctggaactatgctggttggtagtgaacctgcaaagcaatcagctcttctgaagccactttctacccttgaagggcttttgtctattgccaattttctcctgaagggaactaccattatggtctcagaactggcttttgctgatgccgagatattgaaggaattggggaaggtttatattgaagtcacatggcagatatctttactcagtgattctaaggtggatacgcaagatgcagatcaagatgatttggctgaggaagcttcaatttctgaaagggatagtgatgatgacacaaatacagcaccactttcaagatatatgaatcctgtttcagcaagggcttctatatcaccgtggagcatggagcaagattttgtatcaactgtgcgatctgtttcccacatgcaccaccatggtcgacactcattatcaaggataagtgggcgcctaaatggagtgttgaatgcaacaagtactgatttggatggtccttgttttccagcagagacatcaaggcgtcatgatgctctaaagagaatccctgatgatgttgtttctgaacttctgaagaaattttgttgtaccatgcgttccttcctttctacccttgtcaaaggattaccggctcatcgtcggcctgactctaaccttaacccaaattcgagaagtcttgtgactgcactagctcaatttttccttagtgctcttggtttctctgggcattctactgctggttttgagatgtctttatctgtgaaatgccgttaccttggaaaggttgtggaagacatggctgtgcttacatttgacagtagacgtcgcttatgcaattctgcactcgttaatagcttctatgttaatggaacattcaaggatgttctaacgacctttgaagcaaccagtcagctactgtggacacttcctttctctgtccttgctgctgccacagatcaaggttcctctattaatgagaaggtgtctcacaattcctggctgctggatacgttacagagttactgtaaatttctggaatattatgtgaactccacgttcttattgtctccatcctcttctcataatcggcttcttgtccagcctattgtaactgagctgtcaattaatctattccctgtgccttcagatccagaatcatttgcgcgcatgctccaatctcaagttcttgatgcagttcttcctgtttggaatcatacaatgtttcctgtgtgcaacccagcttttgttacctccctggtgtcaattatgaacaatatatgctctgttgttggagatatgaagcaaagccgcagtagtgttggagttgccaatcagcgtgttactggcccccctcttgatgaatctgctattgctacaattgttgaaatgggattttcaagggctagggcagaagaatctcttagaagtgtgagaactaacagcgtggagatggcaacagattggttattcaaccatccagaagattctgtccaggaagatgtgcagcttgcacaagcgttagctttgtcacttggaagctccattgaaacacccaaggaggatggaagcaataagaatgatacagtcattgctgaagaaaaaggtgtatttgtgcttcctttggatgacatccttactgtatcgaccaagcttttccagtctagtgattccaccttggctttcccattgactgaccttctagcgacactgtgcaaccggaataagagcgaatactgcaagcgagtagtattgtatctttttgagcagttaagacatttttcgtcagatgccacggatatgggtgctttgtattctgttgctcatgtgctggctttgcttctgagtgaagacagtggcatacgtgaaactagtgctgaaaatggtgtcatctcccaagttcttaacatattaggaagtcttaaatcaaggacagaccagacagatcatacttggaattctatcagtgctctgttgcttatattgtataacatgctacaatttaatccaaaactcagtatggaaacaatggatggtatatccaagtcaatttctgatgcatccagtgctgacagcgaggaaaatccattaccaactgctgaacatagaactgaaattattgattcagcagatgatgcaagtgcaaatgtttttaaaaagattttagggaaatctactggctatttgaatgatcaagagagccaaaaggcactggttttctgctgtgaattcattaagctatgtgtgcctgcaacagttatgcatgctgtgcttcagctcagtgctcgcttgacaaaaacacacgcgcttgctgctctattctttgaaagtggtgggttagcatctctcttaaatctcccaggcacttgcatctttcctggctttgagaccttagcatctgctattgtgcggcacctcattgaggatccccagaccttgcagagtgccatggaattggagatacgacagtcattaagtaaccat

SEQ ID NO: 192826 - DNA, 290 bp, Zea Mays
acaccaccctggggggtcaggttttctacatcagccgcctctaaggctgaaggctcccctgtcacctccatgggagtcgggcaactcggaccaacgtctcggctttgaagactgccctccaaagtcgatgatgcacaagacactgcccgggatacctccaatcccatgtccggaattcctgaacaaacagccatcatgtcatcagcagctggctctgatagcatatcctcagggacgacctcctcaagggtctgatcaaaatccgatattgacagttcctgaaggctgac

SEQ ID NO: 192827 - DNA, 795 bp, Zea Mays
acttgacaagtcaccatttcggacaaacctatacacaagaaccttttcttcttctttatcaaggcagtgacccaggaaaggaaccagcctttcatgcaatcctttagcaaacaaatctaactctgccatataggcatccttccgagccacgcgcaaagtgatcctcttcaccaccacggcagtcccgtcttggagcacaccatggtatagatcacctgagtgaccatgcttgatgagcctctcttccccaaatcccgatgtggcattggcaatttggtcgtaagcaaatgaatcgccgactttcgccatgtttgtggacaatgcagaagggtgtgtgccaccagtagctgcagctgtgccggtagctgacactaccgatggtgctggtgcacttggtgatgccccactttccctctgaccatccgtcctccctgttctcacagaacacacaaagcagaacacaatggctgcaaccccggctatcagcaggaggcttccaccaatggccccgatcagtatgtatttcagattcctgttcttcttccttgccggtgaaggtgcaggctgtggtgcgggtgggataactggaccatcatatggcaagccacgcttggcatagaactgctgacaatcagcctgggtacgctgtcccagaacgtcaaggaagcaattcgattgaaacgaaacattgccaccaggcccaccaccaccatcggacactcctagcttgccgtcgaagtagttcccagaaatattggccagcagcaactgggcgaacagccggcgaaaggtctc

SEQ ID NO: 192828 - DNA, 340 bp, Zea Mays
acctgctgctttccccgtccttctatgcccctccccgtggccagattcctagtgattggacgaactctgaaactcaagtaagaaatctcgtgtgcatccctgtttccttcacgtagctagtagtatttggttaggctatgggagcacttgaagcaccgagcttgtgctctagtaatggcggctgtggggggtctccctcaccaacgtgttagacagactaggggttgaagaagagtgtgaaccgttggatccacatggacggttcagattaaaacacaaatatcttttcgcttcagtaaaccatgatcgtagatcagtggatgtgcgggcagggtttggc

SEQ ID NO: 192829 - DNA, 490 bp, Zea Mays
cattcaccgaagagaaaaaaagatccctacttgctaaaagacatggtaaaggggctgatttcctgagagcagttgatgagataattgaagtttatgattctctaaaggatataggtagcaacaaggttgacttgcctgccgaagaagtaaagccaggtgtagaaaagtttgctgaaaataatagccgcatggatactgaagatctggtcagtagctcctatatgcacaatgatagaaagatagaagatcattatgtcactaccaggagtcatgacatggtcaattctgacaggccttcagttgacgagcgatgtgttgtaaattctgctcctgatgagcctattgaaaatgtatccatccttgatgaaatgagggatatttctttgcgtactaattcattttcaaataagcaaagggatgcacagccacaaaattgctacacacgtactagggttccatctctgcggaagtcaagaagttcattaagtct

SEQ ID NO: 192830 - DNA, 358 bp, Zea Mays
acttctctatgttgtctgcacacttgtcatgatgtaagcgtttgtagcaatctttcttctccttgatagccttttggacatcttcgttccaccaccaagtgtctttaacttcccttctgtttccttgactcaacccaaactctttgaagctatctttcggatgcatgtcgccatcttcctccacatgatgtttgcgtctccctcttctgcccaagggccctcctcgataactctctccttgaaagtttggccacatcccctttaagcttccaccactttgttctagtgaccttgttatgtttattccgttgtaaacgaatcttaaaatggaagtcagctacgacaagcttaggttggg

SEQ ID NO: 192831 - DNA, 1658 bp, Zea Mays
gttatcttctccggtttattttttcattaacatcacttcttgtgctttcatttaggatatcactatgaaagtctttgttccactatttttcaatatgttttctgacgtaaaagctgggaaaggcgaacaagtcagagatatatgtttggatacactatctgctgttgctgccaaagtgcagtgggaacactatagaacaatattgaagagatgcttccgagaattaaaccttagacctgataagcagaagatcatattgaggctgatttgttccatattagatgcattccatttcatgaaacctgcaaatgatgcctcaggaaattctgatgctttgagtgaagatattgattcttcccttacattctctttggtcacagtctcttctgataagcaacagtacatgcaaaaggtagtgtttccacaggttcaaaagttgttaggatcagatccagagaaagtcaacgtcaacataaacctggtagcactgaaaatacttaagttgctaccggtggattattttgagtcccaactttcaagcatcattcatcgaatctgtaacttcctcaagaatcgtcttgaaagcatacgtgatgaagctaggtctgctttagctgcttctgttaaggaactggggattgggtatttgcagtttgtggtcaagatattaagagctatacttaaaagaggttttgagttacatgttctgggctacacacttcattatttgttgtcaaaaaacattactgctgatatgtatggtaggcttgactactgtttagaagatttgttggcagtggttgacagtgatttacttggagatgttgcagaacaaaaggaagttgaaaaacttgcctccaaaatgaaagagacaaagaagagaatgtcgtttgagactcttaagctgattgctcaaagtattacattcaagaccgatttactgaagaagataatctcacctgtttctttacatcttcagaagcaacttactccaaagttgaaaaccagacttgagatgatgctacacaacatagccttagggattgagtgcaactcatctactgaaacatcaaacttgtttatcttcgtatattgtcttattgaggatactattacaggaagcagatctgaatgcaaagagaatacacaatctagtcctgatcaagacagtactgtaagaaagaccttcctgggactaggtgagagtggatcacagaattcttatatacttaccaagtttgcacttgacttacttcgtaatcgtctgaagagcatcaagcttgacaaggaagatgaacaactcgtgaagatgttggatccttttgttgaccttctgcgaaagtgtatgagttcgaaacatgcaagtgtcctctcagccacatttagatgttttgccttgttggtgaaacttccgttgccatctctgagggacaatgcaattactataaaaaatgtacttatggagattttacagagagctggaaactccaatggtcatttagtcacatcttgttttaagctacttgctgatctacttagaggattcaggatttcactttcagataatgagcttcagatgcttgttcatacccctatgtttgtagatcttcagacaaacccttcccctgttgccttatcgcttctcaaaacaatagtca

SEQ ID NO: 192832 - DNA, 410 bp, Zea Mays
ttggatgctttcccagaacagcgtgcaatggccgcttttgttatagcagtcattgtggatgggtataggatgggtcaagaggcttgtatgaatgctgggcttatggatgtttgcctgagacatctgcaacctgagaattctcatgcacaaacagaacctttgcttttgcagtggctttgtttatgccttgggaaactatgggaagatttccctgaggctcagttacttggtctgcaaacaaatggaccagaaattgtaatatgcttattgtcggagcctcaacctgaggtatgatgccttcatattctgtgtactctctttttcctgcttcacaagatacatattaaacttttggtcttgccaggtcagagctgctgctgtttttgcacttgggaatctccttgatacta

SEQ ID NO: 192833 - DNA, 731 bp, Zea Mays
gtcctgacatcagtcctcaaactgcacagccagcagtttcatcacactggaaggtctttgacgatgggaatgtccgtggttcttcgagttcagacatgtctatagatgaaccactagttgatctcagtgaatccaagaacaaatctacagtcagtggaagtggctctcaggtccacagactaagcaacatccaaggtttagaatctgctgcagcacagcaacccaagccaaccatccaacaagcagtagataaacaagaagcagaaacagatgcgtctcctgcaccttctaaaggagagctttcaaggcggctgagtgtgaaggacaggataaacatgtttgagagccagaaaaaggagcagactccaagttctggtaacagcaactctgccggtactggtagagtggttccagggaaaggtgagcaccgcagggttccttctggcgcctccatggagaagttagttagaaggtggagcagtgttagcgacatgagtattgacctcagcaacaatgagagtagtagcttaaatgacaaaaaggataatggaactcctgccgggactccaacatctactgatttggaggccgactctaaagtaagagctaatgaggactctaatggacagaaggattcaatcacgtcacactcttggccttgtcaaaaggataatgtaccaatggatctggccaccacagatttgtgcccaccctcaattttaagtaataca

SEQ ID NO: 192834 - DNA, 348 bp, Zea Mays
tttttgaccaaggcaaattcaacctatcgagaacattgccttattacaatgctatgatggaccaattgattttttagctttgggtttcataatatgcctgtttttatcattgcatacattttgtacaattttcctgatcaagccaaacttgagaatccatgataagctttgtagcttgcatatatttgggttccataatatgcctgttttatcattgcacgcaattcatagtttcatactgtctttctgttcaaactaagcttgagaattccctgatgagctttgtagcttatataggtgtcccaagtgtactgatatttttgttatgaacaaaacatgatttgattt

SEQ ID NO: 192835 - DNA, 562 bp, Zea Mays
gcagagacacggcgatggagatggagcagagaccggaagacgaggggagccgggagggagacgaggtgggtgaaatacctgaggctcgtggagcagagacgcgacgatggagatggagcagagaccggaagacgaggggagccaggagggagacgaggtgggtgaaatacttgaggcacgtggagcaaagatgcggcgatggagcatagaccggaagacgaggggagctgggagggagatgcgacgatggagcagagaccaggcggcggcgatggaatctagggttttatggaatcgccgtgagcgccagccgccaggcggttttctggaatcgccgtagcccctatagggttttcatgtgcctgagcgtctctgcctgagcgtctagggttttattttctcccactccgagtcgtgcccgagtcgggcctgctcgtttaacgggcgtgtgctcgtgccagcactgtgggtcgtcctattggcccaagcatggcacgggggcgtgccgggttggcacgggcacgaacactgtcgtgttgggctaggtttgggctgtgccgac

SEQ ID NO: 192836 - DNA, 724 bp, Zea Mays
gtcggtccaaaccagttttggaactggaaggagaagcaggaggccgcctgacagcatgtggtcggttttgtagcgctggcatgtgaggtaccccttgacgaattcctgcactgcagcacgaaggttaggggcgtagaagtcacggcagaggcgatgaagagttcgctagatgccctcgtggtcatcattgtggatgtcgtgcactatctcctggagaagggcggaggacgacatgatgtacagcttggagtcgaacgtgaccatgccgtccaccatgccccatggcgtcacatggcgcgtgtactgatgtcgtcgctgagggcggccagtgctggatcggttctgtgtgcttggcgcaagttgtcgatgaaggagaactgaggtgccgccatcgtgaatgctgaagcctcttccatgtcgcagcaggagggcatcggcgatgatgttggtgctgcccggtttgtactgaaccttgaagtcgaatcccagtagcttcccacccaatgatgttgagggatggttgccaggcgttggtcgaggaggaacttgaggctgtagtggtcggtgcggacgcagaaatgcctgccacacaggtatggcctccaatggcgaacatcctatacgaggccaatgagttccctcgtatgccgcaagggaagcatgtcgaggggccactggcctactgtagaatgccaggggtctcttgtcttgcagcaacatggct

SEQ ID NO: 192837 - DNA, 974 bp, Zea Mays
aaagtctcacatacgagattttgactgtgcactctcaattaagatctacaagcatgtaggtgcaagcagatagaatcatatgctcgaaagagaccccacataccacaacattcccaacaaatccaaagatataaagcatattctataccttaacttcctcaagaagcttcttctcccacatgtacaacttctgtagcgtagaggagaggttgccggatcccatcgccttgtcctcttcaaaacgcagaaactcctcctccattgtcggtataccacagaccatcattgcagagactaaatgatcgattgtgtcagattagagttcatacagataactgcacagtaaggctgagaattcttattgcaaatgtgaaataagctttaccaacctttgaaacctgaactcttctggtagtaaggcatctttccgacctcaagcatcttggatacctcactagctgattgtgaggcacgctcaaattgagtcctgatctccaccaccacctcagtgtcatcgatgtatatcttgtccgatcctgtgggtggcagaccggcaacatgctgctgtggctctgagtgttgaacttgctctccgacaacactcttctctactacatgcacgtcatgctccaagctgctcccactactgctggcctcagatgacttggacttgcggggcagttcatctctcgtactgctcctaccatcttcctttgtcgccttcccgtttcccatgtaacccttcattgggtgcttctcatcaccataagcttccttgactacctccatgtcttcatcctccaagtccggaatcccctcctcctcgcgcacatcctttgaactcctgctgggagagtatggagctgctgtagcagttggttgctcgtagtagctatcataagtttcaaacgggttcaggaagtcccaggtggacaccctgggaggagatggaggcggtggtgctgcggctggct

SEQ ID NO: 192838 - DNA, 298 bp, Zea Mays
atgcttaatatggcaacatggaaatccattcaatagaatctaagtagaggaggtagccagtaggccacatatcaaatccctccaaatctgcccaaaacctagcttctttataacctcaatcagaaaaggccaagaaacagaatcaaaagcttttgtaatatctaatttcagcagcaagctggccttgttttgttgatgaagcagcctggaggtttgttggaccagcatgaaattgtcttgaatgaatctcccttttattaatgcactctgattaggtgacaccatcacattgagcttg

SEQ ID NO: 192839 - DNA, 553 bp, Zea Mays
aaattacacgaaaagagttgctgaggaacagaggtacaagagggcactatcacgtgaagaggtaaaccagtagataacaatttcaagtttaacatgaattgaagcatgtcaccttttatatctcagcatccagatatgaaaatccactgtgataaaacttcaaaatgtaaaggaaatgttggcgcctctttctgtatggaaggtccctgtttttttacacagtagttctttttatgatgttcaaaattaagtcattgttaggttaaattcgctgctattaattagtggttatggtgtgatattggcttgcgtccgtaggcttctttacttggcaacatattggcattaatttgatatgtttctctggttatgctaacatattcatatatcaggttgaggtgcatgatgtgggcaaggagatggagctggatcttattaaacaatatagtcaggttgactgttgatctacactgttcattgtcgctttgcatatcttctgacattaaatcttcaggttgaacggatatttgctgatagggtcagcaaagctgat

SEQ ID NO: 192840 - DNA, 549 bp, Zea Mays
ggagtctcactcgtagtgttccccatcagcttgtgtaggctgccatgaatgaatgtgtcacgggctgcaaagcgacagccccaactcctcagttcttctctaatctgtttgctctgagatctagtactgcgctatggttttaagggtcgcgtatacatctcaactcatataaaacatcagttcccatggtttcgttttcgtaagttgtgtgtgtcggtgtttgataccgacaacgtactacagagtgtatcacgtaatgtttttagtaggacagtgaagctcgatggtttatgctagacgcgacggaatacgacgagttatacagattcgggccaccgctaggcgtaatatcctacgtcctgtgagtttctggtagtcatgttgctatgagttcgagggtttacaggtgggtactgagggtaggagatgaaggtcgtctagcaatctagcgggatctaactttttgtagaggtaccatctcagccttatatagccgagtgaggagatatccttgtacagatcaaaataattatgcagtttatccactac

SEQ ID NO: 192841 - DNA, 359 bp, Zea Mays
ttggacgatacccataaagaagaagatgatggcccaaatagttcagtggcaaatgcgagtcatcgtcaatagcgcgccacacacattccatagaattacgatggtgtgttgactgttgtcgatgcacatttcgtagaactagatgcttgattgttgtctgttgatacgtttagcatttatttcttgaattgtgattagaattagcacatgatctctgatatggttttttagtgagacgcggaaaaaagactaagtaaagagatgcagacgggtgagaaggaggacacacagagagtagcgggcgagcctagttggcaccccttcccttcacacagcatgtgggccacacatcaagcagc

SEQ ID NO: 192842 - DNA, 749 bp, Zea Mays
ctcgtattttttattaaggttatgggagatccttctatgggtgcaaagcaaagaacatttattattgatgctgcacgagcactggacaaagctaagatgatgcgctttgatgaaaagagtggtaacttctactgcaccgaacttggtcgaattgcaagtcatttttaccttcagtactccagtgtcgagacttacaatgagatgcttcgacgtcacatgagtgaaagtgaggtattggtttacctctttcatgtctttgttgggcttgtgatgcttggacattttactgacatgcctgggtacaacctcagttgattactatggtggcccattcctctgaatttgagaatatcgtagtaagagaagaagaacaggatgaattagaagcccttgcaaggaaagcatgccctttagaaattaagggtgggccgactgacaaacatgggaaaatttcaattctcatacaggttagtactgaggactgtacccccctccccccggttaaattcgaactaagttttttatttgggtatttgatcaatttgcaggtttatatttcccgtgctccaatcgatagctcctctttacattctgatgctcaatacattagtcaaagtttggcacgcataatgagggcactatttgagatttgtctgcgtcggggatggtctgagatgtcatccttattgttgcaatattgcaaggccgtggaccgcaagatatggccccatcttcatccacttaggcag

SEQ ID NO: 192843 - DNA, 1143 bp, Zea Mays
cttggccccatccttaatatgccaataacagagtctaagagacagagagtgttggttgcttcctctattctctactcagaggtaagttccttttgcattatcacttaatcatgtaatctgtttcaatgaatttgaagtcatgcgcctgagtagactagtatactgaacatagagttcctttttaacttcttttcttcatgcaagtgctacggattgtatggccccaacattaccttttttatttctggaatttgttggtgattcagtatgcaactcacatttttgaaatatatttccttatccgttgtcctagtctgtttcatatcttcctaattgagttagccctgcacctagtatgtagccttagccttgcttagaaattcttggaacaagaatcaatcttataaagcgctttgcctaccaaactcggctatgatcggagcctcttctcaatgggacaaggctgtagattagatggctatcatccattttcttgatgtgacatctgctatatatagtgtttatcttcaatatggcaatattatgtgctaactgctaacatgcagagtatgctcatgcgtccaccttccttccctctttttcattttgatgtcatgtttgtgtacttttcaagtgaagatttccatgatgataaacctggaagtttttcgtggcctgctctaaatcccttgacttttatgctatacattcatgccttttgctcatccatttttttgccaaacactattattattaacgaatccatgaaaacattgtaaaaaatgagcataccttattcattttttaggcttctaatattttattcatgtatttttgtaatgatattattcaaggaatataaagaagttgtttgttagtcataagagtttgtgccacttgcctatttatccttgatgcaggtatggcacgctattggcagggacaggaaacccctaaggaaacaatacattgagctgattttaccaccgtttgtagcaattcttagaagatggcgaccccttttggctggtattcatgagcttacttcttcagatggacaaaatccactaattgctgatgatcgtgctttggcggcagatgcattacctgtcgaggtactggctgtctacctggaggctaatc

SEQ ID NO: 192844 - DNA, 343 bp, Zea Mays
attttatttcagctccactgtgattgaagtgggctgttcaaccagtccttggcccacctcaaccttgtttctctttggtctccagtaagtacctttactgcaactgttgtggtgattggtatttaagcatatgggatgggtacaacaatcttgtcgtcattttacaggacaagtggaaacttgtttaacaatgaccccgctccaccacctccaccatcaccactagcaccaaatacccctccctattggcaacctgatgttccagcttacccatccccatacttatatttaaactctactcgcgaacggtgcagtctacgatgcagaacaatgtaaaatagta

SEQ ID NO: 192845 - DNA, 490 bp, Zea Mays
aacacatgtccaatgaagaagaacgggtatttttgtttcccttcttgctttgtcctgcctttttgtatgtaatttgatgaaatactgagaggctatatactgagaagctcgtgtacctgtaagtcagttctctcacctataggctaccggattgtccaccgcacgctggatcggaaggtgctgttgctgctgcttcgctgccgtaggtgcctccgccggtcgccgattgttgttgggaaactccagagcgattgggttcttcgccgctgcgcgctgcacaccagggcctgctgcttcgctgccgctggtgcctccgtcgctcgttgcatgttgttgggatcgatcgggtcgttcttggccgccccgcgctgcattttttaactatgtttgattgatttatgtatatgcatgcatggtcaatttaactatatatatatgtaatctatttgttcatatcaagagaagtttgtccccaaattttttatatatg

SEQ ID NO: 192846 - DNA, 371 bp, Zea Mays
tattttcaccagtcagatgtacaaagatcagatttgtctagtaagaagaggatagtgaaggaatgggaggagagccagcacaattcagtagctcatgtaagcaaaggagctgtcaaagaaacctatagggaccagaacttaaaggaagcaaagttgaaatcattgaattctgaagagctgttttctatgacgagcaccaaaccaccaaaagttcaacatgctgatcaggttttgtcttatgatggggggcgtatgaacagtgagttagttgaggataacacactctttagtggcaaaagaggtctgcctgaacaagaaaagagcctttctgatcaggctttggacttgggtgaacctgctagtgatgtggc

SEQ ID NO: 192847 - DNA, 339 bp, Zea Mays
gcttcctctcgctgtgctcgcgctcactacctctgttgccctagctcccgcctccgcaccatcagccgctggccatgcacccacctactcacgatgagtttttatgcactattaatttaattggtaaccgttggatatgacttgttagggaaaagatccacgggcccttggagtccacaggtaagagagatcgcatgatataagaacgtccgaactactacgggccacccatcagcgagggagtaggagaatcgtctaccttttgtgtgctaagatcagatcaagcgtttaagccctttctccgtgcgtgtttatccatctaaactcgcggttaatgtt

SEQ ID NO: 192848 - DNA, 401 bp, Zea Mays
cgatggctatatatgcggcacagggagacaggaataaaggcagcaaagaagttatctcttctccacctctctctaccaactaagcctacggctgtgggggataaccacaccggagaagacgacgaaccgcggctacgaccttcgtagccgagggccccctgctctagacgcccaggcccttgacaacctggtatcatgagtcaggcgatcttcgtcctctcgatcccacacctccgatcagtccctcgacgtcacccaaccaccacccaaccctccaccctcaccgccgttggcctcctctattatgagcaccaaaaccatcgacgatctggctgcgatgattgagaagctcacgggcacgatcgctgtcctccaaaatgacgtcgagtcgttgaagaagg

SEQ ID NO: 192849 - DNA, 1969 bp, Zea Mays
actgtggccatgagttttccgagttctatcctgagaggactagtgcatatgtcagtcagtatgatctacacaacggggagatgactgtaagagagacaatggacttctccagaagatgtctaggcattggtgccagatatgatatgttgtcagaattagctagacgggaacgaaatgctggcattaagcctgaccccgagattgatgctttcatgaaggcaactgcagttgaaggaaaggagaccaatgtcataacagatcttatactcaaggtgtgtccccgtatcttcttaagttcactttcacgagcagattcttttaacctagcctaaaattcactctcatgagagtcgaactcaggacctgaggggtgctaaccaactcagttagaggtctttcgcttctaactactctttttatgaagtgctttcataacaactatttcataactactcttttatgaagaaattgttatgaaagcacgtttccttaatatatacaactttcttataacaggaactaggcttatcactgtgacagttacacataaatttaatcttgatatcacccatggtttgttccatgatgattgagtttataaatgaccacaggttcttgggcttgacatttgtgctgatattattgttggtgatgagatgaaaagaggcatttctggtggccaaaagaaacgtgtgactactggtatgcctgcatcatgccattttatcaatataaataaatgatttgtaatttctccaagaaactctcaaactattcactacatgtataatcatagctattacagccgttaaatagaggatagagggccgtccatgaaatgcagcatagctatcagttattttctgaaattgcagagcttatgtttattgttcttttctgtagtagcagacctaggtaccctttggggtctagttacaaacacagagccccatggactctaattcgtcacatattttaattgatcggaagcttaatcagtatgattagttaactaggaattctaaaataaacctatggattggtttaagtgatgactctggcactgctttcctctgttatttatacattgtttctgtcatatccagcataaagaatcctgatgttaacttccttggacttcaataattggtttggctgtaggtgagatgctaactggacctgcaaaggctttgttcatggatgaaatatctactgggcttgatagcaacagcacatttcagattgtcaagtacatcagacagacggttcatgtgatgaattatacagtgatgatttcccttctccagcctccacctgagacctataatttgtttgacgacatcattttactgtcagaaggttacatagtctaccatgggccacgggaagacatccttgaattctttgagagtgttggtttccggtgccctgaacggaaaggagtggcggatttccttcaagaggtgacttccaggaaagatcaacagcagtactggtgccacaaccacgaagattaccattatgtgtcagtcccagagttcgtgcaacatttcaagacattccatgttggccagaaactccagaaagagttacaagttccttatgacaaatctaaaacacatcctgctgctttgactacccagaagtatgggctgtctagctgggagtctctcaaggcagtcttgtctagagaatggttgctgatgaagcgcaactccttcctctatatattcaagttttttcaattgtttgtcctggcagtcctcaccatgacagtgtttttcagaacaaagatgcccagtgggaagttttctgataacggaaaatttatgggtgctttggctacttctttgatcacaattatgttcattggaattactgagatgaacatgaccattaaaaagctacaagtattctacaaacagcgagactacttgttctttccaggatggacctttggagttgcaac

SEQ ID NO: 192850 - DNA, 427 bp, Zea Mays
cgtgaccaaatccactggatagcacttggagatcatcgtcgtggataactccggccagtaaagtattccggccaccgtacaagcattcaccgcggcggaactggataattacgccgatgatcaccgcccttcggccttgcgccgcgtgtccgagcctcgccactgcaccgccacgattcactttagctccccgttgctcaccggaatagctgccacgacgttgaacacgtattcactgcgccagtgttcttctccacctccgaccgccgcgcgtcttgctcgaaattcacggccaccgcccatcctccctataaattgagcccgtgtccagctccgtgaggtagtcaactagctaaccaccgctaatcggccacaatcatccactcgtgtgctcgaatttggaattccccccaaatccgatttccgc

SEQ ID NO: 192851 - DNA, 272 bp, Zea Mays
ccgaataccgacgcaccaacctagtaggacatccacacgccgaaaccgtaagacggcctaggtgaggacatccacaaaaaagaggtcgagagattccatggacggaaccctcagtaaggtaggagcggagaccgcaggtgtcgccatcgtccgctagcaagcaaccatggctttcgccacgggacctcccaccacacgtctcgtcgcatggatccagtcatccaccgactgaacaggaggaggagagatggatcttgccggagaggctcaag

SEQ ID NO: 192852 - DNA, 1946 bp, Zea Mays
agcatacgaggcaaaataaataatttgctagacagtacaagtcatataacacctaataggtcagttagcatttcatccaaaatttgcgatatttctcttgcaagcttggatttaataatttaccataactgaatctcaacttggcgcaacagaggcagatctcggcgcagcaggggcattagcagtataattatttcccggtatgaagatgaccttccgtcgtctagctgctcagactgcaacacatctgtctgtggtccagttccaaggcgtgaccaggagactgctctactcaccttaaaagaccggcttcgtgagcttgggcagcgactacatgaggtgaatcagctgttctcaaaaagtattggacactatttataattatggtttaattattattgaatgttcactctaatttaggacagatctgtcttgctcgagctcactgtttaagtttattttagctttgtcacaattttatacccccgagtctttgcattgctgatatactaaagatatagctgacgattttcaatttgcaattttatataatctttttgagatatccaccccccacccccctaaaaacactacttcttggtttctggtgaaggttttcattgtatttgactgaattacaatacttgtaaaaaacgcaaagatttttctaggaaatctacaaaatgtaagatgcagatctgtgatactataaatagaatgctttgtaatttgattgcgattgctacatagttcaattgtaggaacaaacaccagagctgttgctctgatactgtggatatgttttggcgagataacacatatcacttgattaccatgttctaattggcagagtaaccattcctccatctctgtgactatggtgtagctggatacatcaagattgtattataactgttttgtttcttctgaacctatgtttggtgattatatttgtagcatattacttggtagatgtacttcaaaagaatttggtgatccatttcctgggttcaaagcttatttaatcttatactgagattatacgtattctgtagcacttctatctatcagctatcctgctgctttatttagctgacagtaaaaaaacttgattaatttgtttgcatttatgtttgtttcagaaagaaattgagggcagggaactgctcaaggcccatttggaaaagaaggcagctgctgaggctgcagtggattcatccttagcatcctcatccaactccttagaaaagactccccaggttctgaaggggccagatcaatcctcggtaattgttggtgatgcaaaaattaatgcaccacttccaaaggctgtacctgtagccataagtgacgacaacaatggagttattccagcaacggcaacatacaccataaacaccaaacctgtgcttgtcagtcccactccaagtaaacttgagccagttttgtgtgaagaacatgtatcaagttcaatccagcaaacaaataaagctatcctgatgccttcaagatcaccactagttgataatgaggctaatccaactcccccaaaatcacccgtgccacaggctgatacagttgctaaagctactccagctccacccaaatcaccaatgctacagattgatacaattgctaaagctacagcagctcctacaaaatcttctacttcacagcttgataaagttgctaacatccaagctgcccccaaatcacctgcaccccagcctgatgaagttgcctcacatcataactcagtatcgggacagattctgtccacatctatctccaagcctcgagaagatacggtttctaagagggctgcagtcgttactgtacctggaactcctacaccaatgtcaaggcctacaagtgcacctctgctacaggtaccaaaatcaactatgctacctacaccgtcagtccaagtttctccaatgctttca

SEQ ID NO: 192853 - DNA, 370 bp, Zea Mays
ggcgaaggcagggggttctcacctacgaggctacgattgtgctgttcagtgctctaaccacggagaatcgtggtccgtggcggactccttcgctccggtgaacgattccctggactccgatgacttatgtgcccaagcgaatgatcacacgtgaccttcgcacgctggcgaaccttcgcgacctctccccaagcaccatacgtcggtggatgcgatcaccgagcgtggcggctccctctcctttctctctcttgctttctgtcaatggtggccctctctattcggtggtctaaatgaatgggtgaggaggtgtggctgaggactatatacccgtgaggcagggttcatgagctggcgaccagatttcatg

SEQ ID NO: 192854 - DNA, 670 bp, Zea Mays
atttcatccccaatccctctatatatatccctacccgggtggagctcattccacacaccatttcatctcatttctctcttccaaactcgtcttttctactcatcttcacatcatgtcttcctcgagcacaaactcaagtgaaggagccgaagggacaatgtgcaatgcattgcaagcagccatggaggaggctatgctcaacctcaatgaagagtcgttgagccggcccaagcgtcgtcgacgctacatcaatcgtgatcgtgagtctgcccatgatcggcttcatcaagactacttcgccgatgactgtgtgtatcctccaaattactttcggcgcaggtatcgcatgaggcgacaactttttttgagtattatgcttagattaggtgaatactctccgtatttcacccaaagagaagatgctctgggtcgactcgggctctctcccctacaaaagtgcaccgcagctctgcgcttgttagcctatggatccgctgcagattcgatagatgagtacttaaagctagctagatcaactgcattagagtgtctagagaagttttgtgagggtatcattcattgttatggggaggagttctgtcgtcgaccaaatgtcgcagatattcagcgtctactagcaaaagcagaagagcgtggctttctaggcatg

SEQ ID NO: 192855 - DNA, 401 bp, Zea Mays
ccctgtcatacccagttatcacctcctgtaaccatgtgggagcacactgaaatagagcaaagcaagaaactggtggatggggcatccgagaaagatcatcagcagctgtgttatcggagccctttttgtacacaatgtgatactggagtcccatcaatttagtgtataccttttgctaccatggtgtatgaagtcgctgctcattcagttgagtaagactgatatgatcagtgtgaatggtgaactcggccaactgatggtatgagcgccattgattgacggccaataggatagccatatattccttttcataagtagatagtccctgatttttaggccccaaaacccgactgagaaaggccaacagatgtgactgctgcattagtatagcaccgacacca

SEQ ID NO: 192856 - DNA, 294 bp, Zea Mays
gaagaagcaggcaaacagcagcagaaggcagaagccccgtcccatccccggcagccccctccatccaagtgatttcaagtagccaccgagaagcggagaaggtgaccgcacctcacgcaatttgcccctgcccgtcgattccatcgcctcccgccgtcccttccctcctctagggttgtcttgtgggtgcccgtgcttcccaccctaggggcaggtccagggccgggccttctcttcgccccgcctccgctgctcttttctttgctgctagggttaggttagggttcgacgctg

SEQ ID NO: 192857 - DNA, 352 bp, Zea Mays
tttagagatacgaatggcagggagaaagagaaacagggggttaacatgttagagcccaataatgacagtgatgaagagacagatgtatgtgtggctgaatgggtagatgtgccaaagggtaggcccatgacgtgtgcttttttaaagccaagtccagggaaaagggaagacatgaaatatacatttgatgtgtccaagtgtgataaattgtttgacatcttattacagaataacatcattagattaagggaggggcatgtgattccaccccctgagcaattggctaagaaagattattgtaaatggcataattcattttctcattctactaacgagtgtaattattttcgtc

SEQ ID NO: 192858 - DNA, 326 bp, Zea Mays
gcacctgagcctctgcactcgcatttgttggtcttgcatgaggaggattttgagcatgaacagccgtctgatgaaatatatttgggcaaaatgcacttttcatctgagggcttctctggttctgcattgccttgtgtattttgacaatccaggttaggatttgaatggctagacactcttctctggtgttttttggctttcctggtcgactgtacccagtctgaatcggatccatcactcatattctctaactcatccgagtgctcactgtctgaaatgtccatatcatccacccaattgaagttgtccttactataaccaaaatg

SEQ ID NO: 192859 - DNA, 355 bp, Zea Mays
ccaagcaaaaagcagcagcagcttctccaacagattcagattcatcagaattcagacaataggaaagataggaaagggggagaaggggggaaccttgagatgaggagctcatctcgtcgctagtgttttggagacgccgccggtgttctggagctgctgctggtgttctagagccgcagcctgtgttctggactcggcagaggagaggaaaagtttcaaggggtgacaaggggtggtggcgcattgcctttatactactgtagatgggccgaaaaaatagaagcccagtagcccactagaaaaccctagccgcctggacaaatcctggtcgatttaccatctagtcggacgacta

SEQ ID NO: 192860 - DNA, 771 bp, Zea Mays
aacgctgccactcaatgaaccaattagggccgccagaattccaaaggtgcaggtacgccttgaatgcggagcaggaataggagcgtaaatgataaactgcaaaaccaacaaccttgcaagagatcgaaaaacgaaaaacccggtccgcaagttgtgaaaccctgaataagccagcctcgccaccaataaacgattgaagcagaagacccacagaatctgggcacaaacgcatggagcatctgccaaaggagacgactaaaaagaactcgtgacgataaatttacccgggatggggttgatcagacggttaaacttgttgaaaatccaatcctgaaagcggagaccgtcggagaagaccaaggacgaagcagacgaacccgccaggggccccccatggccacgagcaggggggcgccaagccacggcgcaccggtggacaccgggggcaaccagcgctaagacgccatgctcagccgcacggcatcgtgagcttggcgacaggcttccctttgagggatgctacttgccggtcgctgcaaggtggatgctgctcaccggtcgctgtagcctgcagccggtccaccccggcaatttgaatgcaaccttatcgatcaaagtagcaaatcagttttagttggtttagcaagagtaaggggtattccaaggtaggagcacgggaagctgcctaccgagcaagagaggatgtctccagtacggctaatgtcttcctcagagcatcggatgagaatggcagagcttttcaccaagttg

SEQ ID NO: 192861 - DNA, 912 bp, Zea Mays
ctactctcagtgactgaagtatccgaagagcctgtgtgtcaaagcatgacaaattgatctctccattactgctgtttttggcaattcttaaagcaacatcaacaaggacaagttcttcaggaatatatgatggagacagcttttgttggagttgcttagcagcagttatttgcccaaattccagtaaagagagcacagccttctccatatctacaggcctaacattttgttcccaaccagataaagatgcttccatctttacaaattcctcttcagagagcaaatttctagcttgttcaccaatctttgaactatgtaaagtgttagaattgttatccagctcattagctctactttcaatattgtcattgacacctcgtttaagtggtgaatttgttttcatccttcgctttgctcgcgtgttatttattgttgttgaagatgcttcactgttagactcaaagagttgcacatgttggtatgataaactgtcccgtgtgctattcctttctgtaattttcatgtgcggcaagctcatgttactgtctatttttgtgatgatatcagcagtatgttctataatactgctactgtttccaacagctttgttatgagcaacagcagaagtggcaaattcaccatcaaccttggattgactctctgactcaacagccaggagccacaccctagtctcaatttcccgcaaaagatgaagaggatagaccctgcaaaacggaagtgctaatcggcaaggagaagataagattgagcacaatgtgaacataaataaaaagattaagcttacggagaggatttagtcatagttccacttagccattgtaaagagagcaataatatttcatgaagctcttgtgctggtatctcttttcctactgcttcggcatgcttaag

SEQ ID NO: 192862 - DNA, 386 bp, Zea Mays
cttatgtagtctccaacaggcatggttcttgtgtagtcgtgtacacatacctgatagcaatggaatgttcgcagatgtaggtacatctctttgcctttttaagatgatctgagcgcataagactaaactccagctgcctttctcatctcttcactacagccatcttctccagttgtaccattgccatctctggcagtgttgccagtgtctccttaccaaccacatcatgtcccatctaccatgttggatcgatggcttttttctgacacctctgctgtagagtcttacattacacttttagagaacttcagcaacgtgccgatatattgccaatttcagcattctgtagtgtttctgatttcacaatattagcatgtccatttgcc

SEQ ID NO: 192863 - DNA, 716 bp, Zea Mays
ggagggggtatggcctgctatgaactcgtagagcagcccataacacctcttgtgctgttgacatcggcctcagacctatgttcatcctgtggccagtggtggcctcgtgggccaaaaaggcccagcaaccagccccgtaaactttttcgtttcgatggaaacaggagacgaaaagggccatagtgattgctcgtcgccggtcccgagcgccagaggcaagagttgcgttggatgaaagtgaagaagcttcaggaagcagttccatccatcgtttcctgggcaggtgcaggtgcatcaagccactgtcaagagatccgtgcggcggcggcggcgtctggactggtggacgctagctgctgtacaggcacgagcttacgttgagagacggatctgaccgccgccgccgtggagctggagcgaaagcaaaacccgggcccaagcgtggagcaagagcaagatcgtcccccatggactggttcgtcgagaagaatccgcgctggggtttggttttatttacattttgcatgcacgcctaccaaaatccactctactcactctgtcactcaactcactcgatcagctagctaggtaccagtaccctgtacaacaagacgtataagctactgctacaagtaggaggcggaggaggtgggcgtggcgacggcggcgcgggcgtcggaggggaggagcacgaggagtagcaggacggcgaagat

SEQ ID NO: 192864 - DNA, 399 bp, Zea Mays
ggaaaggacactagaaggacccgcctttgttaaagaagccgaagagaaagttgccttgatccgcaagaggttacttgaagctcagagtcgacagaagagttacacagacaacagacgaagagaactcagatttgaggaaggagatttcgtttatctcaaggtctccccgatgcgtgatgtcaaaaggttccaaatgaaaggaaagctagcaccacgtttcgtcggtccctaccccgtcattagccgagtgggacccgcagcataccgtcttgagctaccagaatccatgtcagatattcacaatgtgttccatgtgtctcagctccgcaaatgcctaaaagtaccagaaaaccacatcgaggcagaggcaattcagattcaaaaggatctccagtaccg

SEQ ID NO: 192865 - DNA, 326 bp, Zea Mays
ccacctcgcgacagcacctccacggccgtgaacgcagttggtgggtgaatcgtccgccgagttgtgaatccacactggctgtacctcgggtcccttggggcaatcatgggcgttgggcgaagcatgcagagggcgttggggttcttgtcgtgtggaggtggaagccgggatcatcggaatctaaccctcaccaccatgtcactgcgtcccttggatgatctctttggtgtagcacctaccctcggtaagttctctattcgatgcgccacgacctatgaatcgattaactccgtccgcttcggtagccatgcgcctgggcgggtctg

SEQ ID NO: 192866 - DNA, 618 bp, Zea Mays
cggagatgcggcggtctcgccccggtacctccggcattagtccaccaagtcaccgctcccgcgccgttccgttgggctggcccgcgctcttgccctcgttccccatctactctcgtctggggcatggccgtgcctgcgggcttgcgtcatcacgctctcctcgccgtggctgaaattcgggtgtccatgatggtttatcgcaggggctcgtcagcaagtttgtttcgtcgaacaagaggacgatcaatatactcaatgatgtcagcgggatcatcaagccatcgaggtacgttacagatcctcatgtcgatctcgctcgcttatatatggagcattctaaattaactgttgctagtttagattgagatacatgaatgtcaataaaaggggggaaaatggttcatctaaaatcgcaacctctgctttactttgtaaaccttatacctgctacatgtatctgaagctacttcttagtcttatgctgttgtttctgataaacagatatacgtttttattgctgtttgtttcaacttttttttttggcatcgaactactatatttcaggatgacgcttcttctgggccctccgtcatccgggaaaaccacacttatgcgagc

SEQ ID NO: 192867 - DNA, 347 bp, Zea Mays
gtaagcgtgagcatgtcgcaccgccttaagccattgccgacttaagccgattgctctgttagtagggtatagtggtcaccccgagttaagtaagcgtgagcatgtcgcaccgccttaagccattgccgacttaagccgattgctccgtttgtagggtatagtggtcaccccgagttaagtaagcgtgagcatgtcgcaccgccttaagccattgccgacttaagccgattgctctgttagtagggtatagtggtcaccccaagttaagtaagcgtgagcatatcgcaccgccttaaaccattgctgacttaagccgattgctccgttagtagggtatagtggtcacc

SEQ ID NO: 192868 - DNA, 519 bp, Zea Mays
tctgcactggatggtcttgacaagagtaagtttgaggcaaccaccatgggtgggacaaaattatgctcccggcgcctgctgcaagaaataatctattgtgttggtggcgtttctgtatttttccctcttctgatccactttgatgatgctgtggttcagaatggagagtttgccaccagagatcaattggctggtcaagttattgagcttgttgcatctgttctagatggaaatatagcaaatcagcaacagatgcatcttctttctggattttctattttagggttcctgttccagtctgtttcaccgcagctgctaaatatcaagactctttcagcatcgaaatacatgtttactattttgaagacctctagtgagctctcctcctccctctccctctcttatcttcctacttgtttggaagaggttatatcagtagcttatctgccttttttcaggcatgtcagatattctattgagagatgctctttcacagttttacttgaatccacatatctg

SEQ ID NO: 192869 - DNA, 354 bp, Zea Mays
aattgattgaggagtgcgggtatatgccgtaatatggttatactcgcgacgaggaaagatgtatgcattgggtaacacgacgcttaggttgctgttgtataatcgaataaaggatgtattattgagcattagtcaaacgtggggtactagtggtacgctaggcaggcggtgtccaaataaattaaccggttgatgtggtagttgtcgtgcgtgatttattgttagtgagtagtgggattacgagttatgtaaggattatgttagaaactagtaggcggcgtgtaactgtgttcgtgttgcgaataatagatcagtaggtattattggtgtcattagcaagtaggatgattcctg

SEQ ID NO: 192870 - DNA, 284 bp, Zea Mays
cggcacagcatatggtttctcccgcataatctctccctctctcctcgatgacgcgtttttcggtggagcgcggatgaccaattcctatgtctcaggttggacagcagggcacttcgtaaagcagaggggagatgaagaggagcgaggacgagctccaacaacccggtcgaagcgcgcaagtggttacgggagcgggatctacgacgaggagatcggcaggaggcgttcttcggtcagcgcagtccgatcctcgcggggaagaaggtttgtcaggcgagggggcc

SEQ ID NO: 192871 - DNA, 586 bp, Zea Mays
aaaatggttgaaggtcttcgtaaaattagcaagagctatcctcttgctattactaaggttgaggagtctggagagcacactattctggggactggtgaactatatctggattccataatgaaggacctgagagagctttattcagaggtcgaagtgaaggtatgaatgatgcacttctctaatccccctcctttttttgagggggggggggggggggggtgaactaatttgatttttagggtggaccaaattgatttgctttgattccttttggcatgcaggtagcagatcctgttgttacattttgtgaaacagttgttgacacttcttctatgaaatgttttgctgaaacacctaacaagaggaacaaaattactatggtaagcattttcttgagtgcactctttgtattttcttttgacatttcctgtgttgatctttatttgtaaatgcaagcaactgatatgttattgtaccttttgtctttatggcatgatacagcttgctgaaccattagagaagggcttagcagaagatattgagaatggtcttgttagccttgattcaagacagaaagaaattactg

SEQ ID NO: 192872 - DNA, 383 bp, Zea Mays
gctagggcgcctcgggcgagtgctgacaggtttctgaacatccaaaattgtatcaacttctgggagaggcaccactgccaacgtaccagcaggagcagcgtcgggagaatcctcagctagcagatcaagcatggcatttatatctgcatcactagggttcaagggcacctcgaaatggacctctcgttcgtcagcaggaatctcaccaagcgaagcaaccaaaacactgacttcttcagcagagggtcgcactctaaggcccagactgccatcagtaacaggtggatttgatacaaatagggtgaaggctttgagaggaggcaggttccaggccgagtatgccactggagcaccaacattggacaccttgcccctaaggatca

SEQ ID NO: 192873 - DNA, 389 bp, Zea Mays
ctgatttagaagctgttttcaagatggttgaggaaaaatgccttcgctcacacaagagcctcccacctgatttttccatagccggtctcatcaagcagatatgccagtgtgtcgcacgactaggcagtgatcatgctgcagaacataataaacaatcagatgcttttggcaagatcagaagctcacaggataagccaacaacgagtagtgctccatccttggaaccaattgattgcatgaacagcagaagcggggaatataaagctgtagaagaatcattgattgtggaagcttcagagaatggcccaccaaattcaactacccatcagcaggcccatttggtacttcctcccaatgggtgtacccatgatttatctgacatatcaaag

SEQ ID NO: 192874 - DNA, 358 bp, Zea Mays
cttccatgaaagaacacaagcacgcaacatgtcctccaaagtttggatagtccactctgactgaccatcagtctgagggtgaaaagcaacactaagagaaagcgtggtacccaaagcactgtgaagactctcccaaaatttggatacaaatatggagtcccggtctgaaacaatggacttaggcacaccgtgaagccttattacttgtttcatatacaacggaaccaactctgaagttgcatttgtggtcttcatgggaataaagtgcgcagacttagttaggcgatccactacaacccatatagcatcctagcctcgaggcgaacgggtaagtcaaccacgaaatccatggtgatat

SEQ ID NO: 192875 - DNA, 335 bp, Zea Mays
ctcaagggaggcaaaatccatcctgctattgacctgcgcatgttcagacctgagcaaaaatatctaccagaagtatccatctccactaccgtttctactgagtttcagggggtagtaaatggatggggcagggcctgggcaagggcggtcatctgaaatatgccttgctgtacccagaataggataaggaggaaaagaattcaggccatttactagctgcgtgtctatctgatgacttgctgtccagtggagatttggccacagctgctactctcctgtacctctatcctacatggggaccatgcaatggaagggtggaacatgtaaactggtgt

SEQ ID NO: 192876 - DNA, 630 bp, Zea Mays
cactatcttacgtgagaggtgcgatatgtgtgacaccttgaatgtgtcggtagaagaaaaggttgctatctttttgcttgtagtgggtcatggcactaagatgaggatgattcgtagctcatacgggtggtcacttgaaccaattagccgctatttcaatgaggtgttgagaggtgttctatgccatgaatttatcaagcttcctgatcctttagttgtacaacctgaagattctaagtggaggtggtttgaagattgccttggagcactagatggtacacacattgatgtttttgtacctttggctgatcaagggaggtataggaataggaagcaacaaataaccaccaatgttttgggtgtttgtgatcgacacatgaagtttgtttatgttctagctggatgggaagggtcagcttcatattcacgtgtgctacgtgatgccatgtctcgggacgatgcatttgctattccaagtggaaaatattacctagtagatgctggatacaccaatggaccaggctttcttgctccatatcgatccactcgctaccacttgaatgagtgggctgcccaagggaataacccatccaatgccaaggaattgttcaatttgcgccattcaacaac

SEQ ID NO: 192877 - DNA, 681 bp, Zea Mays
ggttgaggtgctgaacactgccaactacctcgtcaaccatcttcccttcaaggtggtcaaccattccactctattctttgacctcttcggcaccatccccacatacgagcaccttcacgtctttagttgcgcatgctatcccaacacctctaccaccgctcaccaacaaacttgcacctcgatccactcgctgtctattccttgggtactcctcatcacaagtggaaccggtgcctcgatcttctcacccaccacatcatctctcgttatgttttgatgaggatgttttctccttgatgctgagtatgtcgatgtacctcctcttccctctgcctcttccgtgccacgcgtggtcacgtcaccttcgcctccgccacacacgaccttgtcgcctccacctgcgccgcgcgtggccctattgcctctgctcgtgccgcatgtggccccgttgcctccacctgcaccacatgcggcctcgttgtctccacccgtgccacgtgcgaccccgcctccaaccacctccgtctcgcttcattgatcctactcgtgtctaccagcgatgtgtgtggcctgatccaacagtccccttccaatgacaacccaccctgtgccctggcctgctctcgtgacgagctgtcggtgtaccgcctggtcgccatccactgtgaccctcgccacgcc

SEQ ID NO: 192878 - DNA, 358 bp, Zea Mays
cagtatcgcctcattttaagtcaatgttttgataatatctaaactttaaaaaatgacagatatatgtaccatacccaagataaataccgatataacaaaacccacaataaagcttatcaagatctacacagatgcagttctctcagttgttgatggagggagggacatacgagacttgcgaatgatattagaccaattcaaccagtctttcccttccatggcaatgtgcttctctccttacacttgtaccttcagtctcactatctccatggattcagattacagaactacataagcatactacatattttggtcaagtacaatctaccatggagatactatacgagagcactctcca

SEQ ID NO: 192879 - DNA, 635 bp, Zea Mays
gatccgtgatggggattctctgagtcaagaggcgctggatgaatatagtcgcattttcagcaaatctctttcccaggtgcagatccaagctcttgcctctcttttcggttggtctctaccagaagagatgatggtaggggaggtgtctaccttttgaggaaggttctcttccttgggttgcgggtttgttggtcgtcttaagctagtgttttatggacccttcaaaaattctcacttggaatgtaagggggcttaatgcctcggctcgccaagatgttgtaagggctgaggtcgtctcctctggagtggatgtggtttgtttacaggaaactaaaatgcaggatatttctcgttttttggttattctgatgcttggaccagattttgccaactttgtctttcgcccatctattggtgctagtggtggcattttggttgcttggaaagatcatataaattggtctggtgtttctagagtggatgatcattcagtgtcaattctttttcatcctgttgatgatgttgagtggtggctgacttgtgtgtatggtccccagtccaaccatgacaaaattgccttccttcaagaattgagagatattcgtgcttcctgttctggcccttggttggtcctt

SEQ ID NO: 192880 - DNA, 282 bp, Zea Mays
aggatatatagacaaccacaacaacaacaacctgagatggatcctccatagcctccaccagcaggagttgaccccactgttgcagcatagatgaggataatgcaacagatggcagacaccatgtcggatatgcacgcgtagatacgacaggaacgccaggagatgcgccaagagcgagaggatatacgccaggaaatgcgtcaggagcgagaggaaatacgccaggagagaagggcgcaactgcaatagcaacaacaacatcagcaagcgccactacctcca

SEQ ID NO: 192881 - DNA, 399 bp, Zea Mays
ttcttttgttggcctcttctcctacaaaccttttgatgagcaactggactggagtttgacagctaaagcttcgccttgttatataactgtaagatatcctcattgtaccttagtttgcatgcatttgctctactatttcacgatttgaatttctgttcttatagtatttaaaggattcagttgatcaaattgttggcttcttcaagagtagccctaccattagccagaacctggcactagagactgctgctgctgtacaggtaactatgagtaaaattgatttgaagcaagactgtttcatgtgatcagatgattgattgatcattctgtgtttctgtgtgaagatgacactagatgaagtgaaacggactgctcaacagcaaatgactcgggtgctaa

SEQ ID NO: 192882 - DNA, 589 bp, Zea Mays
tatgaatctgggagaaaatcaagctcaaagaatggtctgtcagaacggctgaatgccaattgccatggtacagtgcctgtgcagatcagaacgccagcgcggcaatctcaccgccgaagaccgatctccgccgcgattcacgtcgccgccgttgagatttacgccaccagtgaccagataaggccgccaggtaaaagccatgcgcctaaggataactccggtgactcgccgccgtgcctcccccttgctcaccgaacccgtggataagaattctcaccgccgttaagccatcaccggcgtccgccgcgtggctctaactttccaccgcatcgccgtaagccttagtggctccccgttgatcgccggagcaattgccacgacgctggacaccaagccactgcgccagtactcttcttcctcctccgaccgccgcgcgtccccactaaaattcccggccaccgccgttgatccctataaaattgaagcccccaccagccctgcaaggtcatcacacacccagccaccaaaaatcactagcaatcgttcgtcagagagcttgaattttagttttcccccaaactggtctccg

SEQ ID NO: 192883 - DNA, 738 bp, Zea Mays
taataatcaggatctggagacatgaagcagtcgatgcacctagtaagagtgtgccctaacttacagaagccccactatctcgctcaggtgcaccaccgctcaccactcttgcgcgtcgcctatcgcccgtctacacgcaacccactcgcgtcacacgtcgttggactcatcactggttactattgtgctctattttctaaaccgaccatataccttcttatacgtgtcatgcctcgtgccatggcctaggcggcccgaggcccaaatctatccatgtctgtctccattaaccttaaaagaactagcccgaacgtccaatctagcccaagcttaggtcctgatctaggccacacgtcgttaatatgcgtaacacagacatccatctacacacgatcaacatcgacaacatatatttgactgtcgccatcatcaattcacatccatcatcattgatctacatgttgtcattattgatctacatgaccaagccatcaatctacatgccactgttgttgattcgcacgctaccactagatctgcgtgggaggttgagagagagagagagagagcacaagtagatgagggataaagatggaaagggaatagatcttacctgcttttagggttgataatggtctttgaccagtggcgaagctagagtaaattaggggagggtgcatataccttgagggtgcatgataacaatttacaggtggtgcatatatggtgaaaatttgg

SEQ ID NO: 192884 - DNA, 498 bp, Zea Mays
ggaggcggtgcctgcctcggacgctatccggaatgaggctgcagctgcggaggcgccggcgaagaagaagctggccatggagcggaagaaggagcggaaggagatggataaggagcgccaccgccagtcggccgaatttgccaagccccagccgccggcagcggagtctgcggctcctgtgaatcccccggccgctccggtggctgtgggaccgggactgcacatgaacgtgttcagagacctggcatcaccagaggcatcggttagagaggctgcagccgaggcgctggtggtggagctccggcaagtgcagaaggcgtacgagaagagcgcgcggaatggggagagggatgctggtgatggggatacgcagatggaggctgagaaggacgacgggctggataactgcgccccatcagtgcgttacgccatccggcggcttattcgtggcatctcttcttctagagaggtagaaatgtttttccatgagttcaggac

SEQ ID NO: 192885 - DNA, 564 bp, Zea Mays
cggaggatctattgctaacaccaggtgggattggccggaatgggcacatatgaaaagttctccagaagagcacatattgaaaagtcttgcatcaagaaacagtggaacaggaaaaatggggttgttaagtagatatggaaaaatcactggacatatgaacaaaccggcttattccaatgatctgtccgttgagggtggagggcacactaatgttgagaagctagtaaacaggacagatgaaacatattacagaaagagtgttgatgtgcatgaaacttttacaaagaactctgctttacttcagaattccgctgtggtgaatttagggcccgctaaaaaccatccagttcatgcattcgacttgaacccacttaccactcctagtggaagcccacactttgaagcaagcatgggaagacattacaatggaaatcatttggcccatagtcatggaatccatttggagaaaaactttgatgcgtcattttgtaatcctatgccacgttttacaggagttatgaaccatgatagtagggcgtgcagaccaaatttctccaataaaac

SEQ ID NO: 192886 - DNA, 309 bp, Zea Mays
atgagacctacagtccggtcactcaaagcagagcccaaacctatgatggaatgtctgctacagcagcttcgcgaagtgtttgagacacctacgggccttcccccagttaggtgttgtgatcactggattcagctcctcccagggacagcaccagtagcagtacggccttacagatatccacagctccagaaagatgaacttgaagcctagtgtaaggccatgctccaacaaggcatcatccgccacagcacatcggctttctcggccccagtattgttagtaaagaaaagtgacaattcttggcgcttt

SEQ ID NO: 192887 - DNA, 346 bp, Zea Mays
gagatatcatgctttgctagattaaatgattactagaggtgtgatgaattgcacatccgagatttaaaatttttaaagctttgggttttgtatacaaatcagctattttgataacaattttttggtatggtggaccattggtatttacatgtgtctaaattataaggcctgttaaactgttcaagcttatcgagcaatttgagaaaaacatgacctatacgcaatatgcagttgatttcgtttctgagtttcagttactgtgtggtgaccgtggttgttcatgtatctaaatgtctaatagccttaggagttatatggtgtgtggtttcatactttggtcttagct

SEQ ID NO: 192888 - DNA, 673 bp, Zea Mays
gagcggatccttcgcacgctgaataacatcagccgcactctcctcatacatgcccacatgccgccaccttactgggccgaggcgctcgtcaccgccacctacctcctcaaccgccggccctgttcctctgtgaacaacgtcgttccctacaccatactatataacaagacccccgaatacagtcaccttcgtgttttcgggtgtctctgctatccaaacctctctgccacaacaccacataagctagctcctcgctcggcagcctgtgtcttcttgggatatccttcttcccataaaggctaccgctgtctcaacctcaccaccaggcgcgtcatcatctcccgtcacgtcgtgtttgacgagacatcctttcccttctccaccacactcctccctgtgacggatatggattttttgattgcccctaaccctgcagcagttgttcccgtggtagctccgtcaccacgtgacgttgagcgaccacggtcgtcacctgtcgtgcatgaggaagaccctgctatcctcatgcgcggccctgtcctccaggagcttgcctctaggacacctccttcgtcagctgcgccaccgcctccgccgactacacttccggatgcaccacgcgaacgtccgcgtgtgtacgctcgacgcccgcggactacaccagctctgcccg

SEQ ID NO: 192889 - DNA, 413 bp, Zea Mays
cgaaaggccacgattagatcgcctcaattatgaactggtatgctctatcagccattggatctgtatgctacagttgtgattagatcttaataatactcgaaccggtatcccacgacgaccattgaatatcagatcatcggtgcatacctaattaactgagatcgatcttataaccgtctgattcggcattgctggccccgattaaagcccatcccacacaaatcggtatgttataaggcccgttagattgaagatcaacaaccctgattcgtttacgtgaaggggtacgcatccatcaatcaggaccacccacacggagatcaacggcactcatctcttcttctaccttcgtcaatccgagcacagcggcaacaccccccgcggcggtgccctggccggagtaaggctcccta

SEQ ID NO: 192890 - DNA, 468 bp, Zea Mays
gttcttcatggacaaaaccttcaccaatccatttccatatgagacctcttgttttaattctgtagtcttctggaaacaaacttaggtatagcaagcaagtctttagatgtgaaggtaggtcataataactaactgatagtatccttctcatattcttcacattagtactgccatttagaccagaacccatggattggtacacatgtgaccaatagttatgtgtatttatttcctttccagttttatcggctagcatacttgccatggtaatgatagctaatggtacaccaccacatttctgtaagattttaccagccacttcagctaaattatgtggaggacatttgtcttcactgccaaaaattctttggcagaataactttgttgagtcactgagagaaagaggttccatttgataaacacttccagcttgttttgcaacatcaatattacgagttgtgataatta

SEQ ID NO: 192891 - DNA, 678 bp, Zea Mays
cagattctgaagttggaaagagtctcagatcctttgagggtgcaagaagccatgctggaaacgaagtcacacctcaaggaacttgaactatgttggagcaatgatgatagacagtccgaagtacaagaagaaaatgctggaacacttaagaacgtatctgattccctttctcctccacactgcttggaatctctcaaaatagtgagctattacggaaaagttttccctgattggctacctaatctctcaaacctccagcgccttgttcttactgattgcaaattctgtgagcatcttcccaacctgggccagctaaccgaactcaagttcctgactataacagcctgttccaagttagttacaatcaagcaagagcaaacaggtcaggcgtttccaaggctagagcagctgcaccttcgagacatgcccaatcttgaatcatggataggattttcacctggtgatatgccttcccttgtgaaattccgtctggagaattgtcctaagctgtgtaacctgccatctggcatcaagcactcgaaattcctgacaagcatgcaactacaccatattgatagcctgcgaatcattgaggacttgcctgcgctcaaagaattggttatccaagcctgcaatgaacttcaaaaaatctcaaatattccattgcttgaagttttg

SEQ ID NO: 192892 - DNA, 395 bp, Zea Mays
cctcatatcttgctgacgagggtgcaacacttccaaaagtcccttcagaccttcaacttgagaagccgaattcttcctcaagatactatcagcagaatttgattgaatttcaaaccattgaaggggaaacttatggagctggatgcatcacaccttgccttaatggctctgcaaatcaatctcattcaagagatgacataattcatgaggaacatgcacactgtcattcaagatctgacttaagttgggaagaatatactggtggaaccattgatgtatacccttattccacagaagcttcaatgtatagtagctgtatgccacctgtatgcatgactgttcagacacctaaaagttcacttgccagtgcgagaaaaagtacaccaggaaatttg

SEQ ID NO: 192893 - DNA, 418 bp, Zea Mays
tcaatgtcagacgacgagtgactgactgcctggccttttcgttcgtttcagcagtcatgcggggtgtgtgtttcagaaatcgatcagtcagaaccgtatcgtttccagtggagtacgtcgcatcacagtcagttcagaaccgtgtaactgctttcagatcagctgcgtcatctatcggttgcatgcatgaggccgtagaatctctacagttttacagatggtgggtacttgggtgccgctggttgtatccatccatgcagtaattaataattgggatgcgcaggtattcatggcttggtgttgttgcaaccgtaaaaagctttggctgaactgaactgaactgaaccaccagtgacaagagggtcgcaaaagcatgcaggtgcaggtggaggaggcgatggcaatgggtacccgctac

SEQ ID NO: 192894 - DNA, 330 bp, Zea Mays
gtcgtcgtcttccttgcgtccgtccgtccgtcctctccatcaattgcaattggttggaaggttggagagatttgatttgctggttgtactactgtcgaaccccagcccgtccgtaccctacgcatcttcctctcccatccatccactctttgcttcatcgatccccactgctgtgctgtgctgtgctgcgtagcttatccgaggggacaggtgagggagtcgagggggacggcgcatgaaagaaagagaccgagggggaggcggcgagagcgagaaggcaccgccgacggcgagacctaggatgcagacaaggccaaatccacatcgatg

SEQ ID NO: 192895 - DNA, 334 bp, Zea Mays
cttgggatcaatctgcaccaacttattttcacattgctctcctcctcccttttatagtgcaagggaggagaaaggttatatgaaccttagaccccacctgctaagtcccaactatcttcttatcctattcttggagtcgtaccagggctcatccctcagtcatgatacaatgtcaagtataacttttccgaggtgggtccattccttatactatcttcgatggccccgataggttcacacttgggtgtgtcgagtacctagttctcatagtgcattgggtgtcaaaagtctcgaggtctagctgcttttttgaggtggcaccaaagagtctaat

SEQ ID NO: 192896 - DNA, 272 bp, Zea Mays
caaaagcctgtgatcataaacagttgagcagaagaaagataattcactaatatgaacaatgaaaggcaagaagtcgactcacctgaagattggagaggaacagtggtagacccaaggcaggaggagctgtatcatggctcgatgggggaaggtcagcaggaacaatctgaagggcattatcaggggcgatctcagccccaccagcagaaagcaggctcctcgcatctagttcaccgacctctaaggtgacttgtccggttaaaactgtggaa

SEQ ID NO: 192897 - DNA, 283 bp, Zea Mays
ccttggatgttggctggggacttcaatctcatctacaggacctctgacaagaataccaatcatttcaacagagctatgatgaataggttcaaaagattaattgaagacctagccctgaaagaaattcccttgcatgggagacgatatacttggtccaactagcaagtaaatccagttcttgtcaagctggatagggtgttctgctcagtggactgggaaatactatttccaaatgtcctccttcaaagtactgcctcccaagattctgaccactgccctctca

SEQ ID NO: 192898 - DNA, 299 bp, Zea Mays
aaaggatgggttaaaaactcgcaagcgacaaggaagaggatacgaccaagggaaaagtaggtaaaatacaatgctcagattgagatggaaaagagggtattttaaaggccggtataagataaacatcaaggtaagatatagaggtgataaggataaaggtactaatgatgaaaaacataatccatggacagagttaaggcaagactcacaaagtgacgaagtggagaaaacaatcaaggatagataagtgaggttccgacagaagagttgaagtaagaattcattactgaaggaagtta

SEQ ID NO: 192899 - DNA, 445 bp, Zea Mays
cgatactgaaatctgagaaaatgacctcaggtaatcaaccaaagatgccaacttatggtacacaggtatgacaacttcgtagtgttggctatcttcatgtattgtggatacttggctagattatgaaatgaagtttcatcttatatgcctgcaggtaactgtacaaacagagtctgaacgccagcttgataagattaggaggaaagaggaaagacgtagcaagcgcagtgcagacagtggcaataatgatattggtgttgatgatttttcatcccttcttttggcaagtgaacggaaggaggcatttgatgacgtgattggtagtggagaagggtcagacagttttacagtaacttcccttcctcaaggaaccacaaggaaacacatgaagggttatgaagaagtgaagattccaccaactccaacagcatcactgaaacccaat

SEQ ID NO: 192900 - DNA, 531 bp, Zea Mays
gctatatgtacctttacgaaacaaagtgggacatcaaagttgctacagaaagcgtcgctcattatttgggacaagacatcaatggctaagagacaatcaattgaagcgttggacaacatcatgcgtgatatcatgggacgccctggtctgccctttggtgggaagactattgtgtttgggggagatttcagacaagtactccctgttgtacgtaaggggtcaagggctcagatagttgctgcctctctacgaagttcgtacctatgggaatcaatgtgccacctaaagcttgttcgcaacatgagagcaaagagcgacccatggtttgtagaatatttgttgtgtgtcggtggtggaactgaggaagtgaacaacgatggtgatgttcgtcttccagatgaggtatgtgtgccatataccggtgatgaccgcgaccttgacagaatgatagatgacatttaccccagtctaaacgaaaacatgtctaatacaagctacatcacttcaagagcaatattgactactcggaac

SEQ ID NO: 192901 - DNA, 314 bp, Zea Mays
aagtggcaacataagttcaagaatgtaaacaacaccaccatgcttggcagcagcccaggcaagctctggtgtgctggctaaagaatatagtacagcaagagctccatccctgcaaggaggattgcagtggagtatctgaaatagcaaaatgaggctcatcctttctgcaaccatagcctccaaacaaggagcatgcttagtcaacagagaaagaatacttaaacagatttgtgggatgctgctttcaggagaaacatggagtgcaaggcattcaaaaagaggaaccagacgctccttggtagcaaaaacagcag

SEQ ID NO: 192902 - DNA, 349 bp, Zea Mays
cacggagcgcaccctctgtcgttccctcgtccccagtcctattctcacggctggagccccgctagtgagttcgtcgggccctcctcgtcggtcctggccaactccggtgacctcaaatcccttggagcccgcacccaccccatctcccgtgacttcgccacagcggataggagtagcgccgcccaaagccgttaacccctgtgcgccagatctcagccacatgtccatgatccaacaatctagatcgctggataccggttcggacgcgcaccctgccttttggtcccaaccatcgattgattgcgccccctggccccgaccggtcagcccgcctaaccccccagtcgct

SEQ ID NO: 192903 - DNA, 365 bp, Zea Mays
agaggacctctactgtggatgatagctcatcgtcttgttcatctgactcagtgccttcagttactgtgaatggatcatataaaggaggtgcctggacaagcgtcagatcctcatccaataggtatatctttgtgagctcctctataggttggtattgatcatgctgtagtattgatcatgctgtactgtgattcaggggaaacaacaggaggaataaggatactgaagcacgggcaggatttgcacaaggtggatcatgttcatcgcataatggttttataggctctggcagcaatgcctctggccactcaaaggaaagacacgaacctgaggtatacatctcttggatatctcagataatgctt

SEQ ID NO: 192904 - DNA, 293 bp, Zea Mays
gtgggcccgggcccccgtgtcataggctgggctgcttcagtgcgcgctgagcgaggttttctgcggtgtctcggggcgtgagcgggagtgtcttccttgaaaagggattcaccccgcgtgcagtagttatgctttcgcattttttccaactgttgcgccctttcgccttctagttctccgtgccccattgcatttgcgctcctctgctttccgccgtcgtagttgctgtggctttgccagtccatcccgggcgctcctagtccgaggtggcactcaaactggtgcgcaacctg

SEQ ID NO: 192905 - DNA, 532 bp, Zea Mays
ccctcccttctccttgcttgtcagctcgcacccatggaaccctcgtcgccggccaccacggccaccttccctgctgccgtagaagaacatgagacgtaccctcccatggtgtcatcctctctattcccacttttccccttcgccgcctccacctcctctgctccccccgccgaatcccaatggctttcaaaccctagcttctccttcgatgcctcctccctgaacatcccggctaccacctcatcgtcgctcccgtcgccgcagagccactcgtccgatgaggacacgccgctgcaggccgctcctgcgaaatacgagctggtgccttcttcgccgtcctccgacgaggagagggggtcgcggaggaagagaagtgggaggaggaaacggaagcgcgagaaggagcgctatgatggggcagcgacatcgcggaaggctgggattcgtgcctgggctggattggagacgaagccagccaaggattactatgtcgacgcgaagggcgaccatgataacctggcttttggatccc

SEQ ID NO: 192906 - DNA, 339 bp, Zea Mays
cgaagccatcgccctcgtcggctgacgggaagccgccgaggcggtgcgtgcagtcgaaactctcgtgggggcttgtcaaaccagccggcggcggccgcgaaggtggaggaaaaggaggcggcggtgaagcaggaagaggagatgccgaggctgttcctcctgtgcctgcggccggggaggcggcggcgacggaagttagagaggggctggagaaggggaagaagaagagaaagccgcggaaatcagaggatggcaagaaggtacattgcccattttagccgctgttttgtgtcttctcgttgaattgcgcaggtggaggattcaattcctttttggtag

SEQ ID NO: 192907 - DNA, 297 bp, Zea Mays
caggaggtggtcatccacaaattgttgaaggggtgggtatcgatttatacatgcatatttgatgttaatcacaaatattctatttcttttctttttatcctgtctgtttcatgcttttctttagtatattcttgaacattcatgtttctttctggtaggcatattcctggggattcgatatacgtagctggcaacgtcatcttaatcttcttacatggcctgagatattaagacagtttgctttatctgctggttctggaccccaattaaagaaaaggactgtggaagattctcact

SEQ ID NO: 192908 - DNA, 499 bp, Zea Mays
ccccaggatacttcgcccctcgttccaccgcgagcccttccgcgttccgcctctgttccgccgctcgggacccgggagacgagaagtagtagccccatccccaactggtcctaacccacggtacccaatccttgactcggttctctccatgagcttactgccccatctccatttcttcaatcattactcgcctttccgttcaagggcgttgcttgcctggataaccacggcatcgttctacccgccgggcccgagctaaggtactttgtttctgaacccttcgttggtttcaggatttgtcccaacccaaggttggtaatcccttggtgctggtgttcctctgtgtttgtttcgtctgtagtcatacgtgcaaacaaagagcagcaaaagaagaacaagtggggcgacagggacagggaggaggggaaggcagaggaaatggaagcctctttcttgaggaaagatggcggtgatcaagccagtgcggcgacaatgtccg

SEQ ID NO: 192909 - DNA, 1256 bp, Zea Mays
actgcactggcactcctacaaagtgtgatgcggtttttgatgcatgagtccaatgttgttcattcatatgctgcaacttttatcgagaacctgttgataatcaaggatgctgtaccggtaccaggggtgaccacagtgatcaggtgtaaaatggcaccctcctgttttggttttcatgtgatatatcctcttttctcgctgtttatatagtaggggttgcctttcaggttggaacacatagcctatcgatgatagtttcgtacgcgcagtaggaataagtgggcttttggtgcaatcgtttattcaatgctcaaatatttacaattgaatttgtttgatctttgagccagtgtttttttccagttctagaatagagggtcaaccggtcaatggagcaggtgactttgtgcctttacgccgcatgatttagttttctttagtgctggattgcttcttttctttctaatctggattaatttgttgagtagacaaaaacaatgctgttgagtctctaatgctgacaatctagaaccctccttgattgcctttttgttagccatatgttttattctgttttttcagtccatgtgctctagtgctgcatcagctttcagactgagaataagaacatctgcaccctttagtgcccttgcattttgacatggtaatgccatattctgtacactgaatttcttataagttggtcagttaatctttccaatgttggctgactgctagaatatgttggtctgcaagctgactggtttactctatgtattttacttctatacaaaatcatgcttaattgttttcatgacatgcaaagcaattatactaattctggttataggcagcttgttccatgatgtattatgtttatgtggtgccattttacttccatgctatgttactgtgcaaataaataggaaataaaaatgatgaattacattttagtctaatctatgtactgctttatttcgcaactccaggtctccacgttatgttgctgctgatatcaatccatttgccccacagatcattcagaacctgtccacagcactaggtttccctgattcacaagagaacccctacctgatgaagtgcctgatgcgggtgcttgggattgctaatattgctggtcaaattgttcatgagatcacagctcaacttgtgggtattctcatggaagtgtgtaataatcccaagaaccctgacttcaaccattacttgtttgaggctctggcagcagttattgg

SEQ ID NO: 192910 - DNA, 341 bp, Zea Mays
ccggactagcacaacaagtgcgaaaaaaaaccaaagtctaccgcgaagactatccgcgcagaagtcgcctaagggtgcagccggactagcacaacaagtgcaaagaaaccgaagtctaccgcgtagactatccgtgcagaagacgcctaagggtgcagccggactagcacaacaaaagcaaaaacgacaacaccaaactgtccgcgccaagaccgactatacgcgcaccagcacaacataacaaaacacaccagaccaagtacacaacgccttcgcaggcatagacaaacgagggcatacaacctcatcatacaagcctttacacatatacaagcgagggc

SEQ ID NO: 192911 - DNA, 379 bp, Zea Mays
ggattttgaaggagggcatcttcccattccacgtatgccatttcctaaatttgaaggggaggaacctcgtatttggattgatcagtgtgtcgattatttcactttgtatcgggtacctgagtcggtttgggtgatgtcagcatcgttgaacatggaggggaatgctaagcggtggtttcagatttttaaaattcagtatggtccgtgttcctgggaggaattttgtgaagcggtgatgctgaagtttgggtcggaggagtattcacaggctatgcagtccttgttggaaattaggcagaccggatctgtggaggagtacaaaaaagtgtttgatgaggcgcggtatgcaacttctgtccataatcacgatttagatgag

SEQ ID NO: 192912 - DNA, 337 bp, Zea Mays
aggtggcttctcccctcctctgcctcccatttactattcttgtacgatgacgtggttactagtgaggcgggcgggcgtacttgtgctctctagtagcgattgcgagcgtgcatggctcctggctgctggtattggtaccgctccatccttggccgatgtgcagctgctgacttgtcctgttacacaagttttggtaggggcgtgttgtccctcgaatcggacgttgtatagatcgagttgcagaacaaagcctgaagcgtaatttatggaagttacacaaaatgagcagtgatgtgtgagaatatgtccgctacttacactatcaatgttttggctg

SEQ ID NO: 192913 - DNA, 350 bp, Zea Mays
cctagaccttggtctgaatttcaagttcagatttgtgatattgtcaaaaaacttgtttcagtggctgtgatttcgcaagtgggcaaacacaatgatactcttttttgggctgacaattggttacatggaaggagtgtaaaaggctaaaagctcttgctccgattgtttttgctttagtctccaagcgtattgctatcaagaggctggttagtgatcatatgtgggtcagtgacattcgaggtgcccttacggccagagttatttgggagttcgtggagctgtttcagatagttgatgatgttattctccaacctgagattcctgacgctcatatttggagtctttccctt

SEQ ID NO: 192914 - DNA, 375 bp, Zea Mays
ccaggaatcaacactatgtaagatgattcttgaagaagacatgattaacagatctgagaggactggtgaacttcaaagaatggctgaggagattattgttctgaaaaatgagaaggtatcactgcagaaggaggttgaacgggtggaggagagatcagcattgcttagagagaagctgtcaatggctgtaaagaagggcaagggtctggtacatgagcgtgaaggactcaagcaagctctcgacgagaagagatctcaaatagagaatttgaaacaagttttggaagggaagagctctgagatagagaagttaaaacatgctctggatgaaaataagtctgtaacagagaatgtgaagcaagttttggacgggaa

SEQ ID NO: 192915 - DNA, 332 bp, Zea Mays
aaagcagtcattaaatggataagagttgtggccaatacagctttaaccactaccaatctgccagcacgattcaaaagtggtgccttccacccaggaagcttggccgccaccttgtccaccaggggcaggagcacagcttacggtggtttgcgaagggtgagtgggagacccaggtaagtgcatggaaaattagagattgtacagggaagttcaccagacaccaaggcaatatcctcctcagaacattgtatgggcaccgcagcgctcttaagcaggttgcaacggaggccagaaacatgaccgaaacaatctaaaatccccttgaccatgcg

SEQ ID NO: 192916 - DNA, 439 bp, Zea Mays
ggatgatagtggtcgaggtggtgatgaggttagtggtgatgaggttagtggtgatgaggctagtggtgatgaggctagtggagcttcaggaggggtgattgttggaggtatgatttcaccagaagtggagaaagggataactacgcagatattgagtgatgatgaaagtagtggggatcatgatgatccaactattgatattcaggaggagacagaggatgatgaggcagtgattgttgggtcaatcccatgtcctatggcagggaagttgaatgagaaacaaggggagcaacatgattgttccattggggcaaaggtgaatgacaaacagggggagcaacctatagtatattatcgaaagcggacgaagaagcagggggagcaaccacaacctggatgtgttgaagctccagtcccatatctctcttcagactcctct

SEQ ID NO: 192917 - DNA, 822 bp, Zea Mays
tcacaagacggccgtcatatatccttcagtattcgagtcgatgaggtgatcggttgtctttaagacagacagcagacagtttttatgtatttttttaataattgttaagatttttgattttttacaataggaagacagcaaaagtggaaagctgagagtgtggattgctgatgtggagtctggagaagcaaggccactttttaaatcgcctgaaatatacctaaatgctatttttgacaggtgaagatgaatctctatgcatggtatattttctagttattgcttgtaactaacattgtttctgccgttgttgcagctttgtatgggttaatgattgtacactgctagtctgcactattcctgcgacacgtggagatccaccacataagccatcagttccatctggcccgaaaattcaatctaatgagtcaaagaatgtagtccaagcgagaactttccaagatcttctgaaagatgaatatgatgcaaaactatttgattactatgcaacctcacagcttgtgttggcctctttggatggaacagtgaagccaattggccctccagctatatatacatctgttgatccatcaccggatgataaatacataatgctttcttctatccaccgcccatattcctacattgtaccttgtgggaggtttccaaagaaagttgagttgtggactgtagatggaaagtttattagggaactttgtgatttgcccctggctgaggacattccaattacgatgagcagtgtacgcaagggtaagcgctcaattaattggaggccagacaaaccttcgatgctgtactggt

SEQ ID NO: 192918 - DNA, 307 bp, Zea Mays
ccttaatctaaagtacttacccttgtacctctattgctcatttaaacagttcagtttaggtgtccatgaccttcttgtcttctgggatcatttcttattcggttgtaagtcgctatctttcgacaatttctatgcccttggtcttggtatgctcgtaccattggaatcttgcccactcttatttttatatgtgcttacctttataacccaatatatgtttaagacatttcagttaatgtgcccttgaccactcttgttgcttaatgatccatgagcggtcattctactttgcatatccttggtgatc

SEQ ID NO: 192919 - DNA, 491 bp, Zea Mays
cttgctaactggtctcagcaagaaaagcataagctcactagaagctatggaccatctccacccaatactagcaggtctgtactattcccatctccatcacattcttctccaagccccagcagcagatctcttgagagtaatcaatctaccccaatgagtggccatcatcattcatccatcagagcacagcagaataggctcacagataaacaccatgagagggccagatgtccacctagcccaaattctgcagtactgagcttattgtcaggtcatggcacacatccctgtccagagaacggtcataattatgttgggttgggtctcagcaatgtttctttagcctcagactctctaggttcttcctctagaagttgtggaagacatgaaatggttggagatgaagagactagacggaagactgaagacgttgtccatcattgttctcgtaggctttttgcagacagcgataacattgggaaacatttctt

SEQ ID NO: 192920 - DNA, 550 bp, Zea Mays
ggtagattcactttttcccccttagcgtatagaacctggcagaacgtgtgttggggcgttagtgcgtcgatgtgcgtgctcgccggcgtattgccaccgctatctaagcgccgcgatcggtgggtgtggctggaggaagaatatggatgctgaccgttcgattgtagttggacgatggagattgggtctggagaacggctcggccaggagtgctgtgggtcgtagatcaagggagggacggcacggattaaatctcgcgtaccggttcggccaagtcggtagtggccattgatccttgatcggatggctggaagatcgtgtagttcattatcttttatgggccgttggatcgggatccgatgaccccggtcgcgtactgatttgagctaggcgtgatctaatctggatcgtttaaattggatcggacgactcctgtttcgggataccctttcgtgcgggaacatttgcagaagagccccttctcttttcacaaatcaacctgccgtctatcggtaggttaatctgtgtctagggaatctttcaagctatc

SEQ ID NO: 192921 - DNA, 288 bp, Zea Mays
atcaatatgggcctcatgttgcacttggatcaaaccatccctgatcctgcttttgaagatttcatggccagaaagcgttcctcctcttgggctgatttgttccctgacaatgatggctcagtttctgttccaaaagtttgggctgctttcttcatgggccttttaatgaggcctgattcgtttgattggaccaggaaattcctattgtcgggagctatctcggcattcgtcgcacccagcatggacaccatttcaatcaggattccccctccacccagtcaggactcc

SEQ ID NO: 192922 - DNA, 1353 bp, Zea Mays
cgtctccttctcctcctccccgtcgccgtctccgagtctccctctatttctctccgcccttgttcttctcctctctccctctatcttattacctcaagtagaagtagtatatattttttgtccgccttttcaatttttccttttatctccctgcgtctcttcgtcgtcctcctgctgtggcggccgccggcgatccccgatcggcgatactcaggtacccatcgctcttcgactcccaccgatttccgctgcgtggacgcatacgccgctcgaactcgatcgtctcccgtcctgccggtgccgctggttccgattgagtctgtgcacacgcccgcttcgcgggtcgccccctcgcttttcgtatctagtactagttcctgcccgtgccggtagcgaaaagcgtctttggttgttttttttgggtggggggacggacaacggacggggattttttttatctcagtcctgcctgcatgcttggtctgctacggcgccattgctgacggctgaccccaagttttagctcgtactatttctgcgtcgcgtcgcctcaagtagagggagggacactctcgtgcccatcgaatcatttctgttcacctccaattgattactactggaatagtgggggctacttggagcagggcgcagctaatgctccccccacaaaccctttacttctgcttctgctgcatactggttgttgggtgggcgctccactgcgaatctatttatgcagtattgcttactgcagtgggatcacttcattcaatcgaaaaaccgtggtgccgcatagatcctaccttaccatgtttcgtactacaactccgtgctattgctgcagctggatgttccgttgtcagactggctgtccatgcagttggttggtgggaggcaaggccaacctcctccttctcctgcgctgactgattttgctaatgttataagtgtgacccgggtctatagttggctagtccttattacttgtagcatagtaccgttgatttatgcggaccaagagctctcggaagtatcatgacctcaactacgggcctgatgctgttcatgacttgctcttttggatcctccagtgttctgctactcatgtcatatccttcgcactcttgatgcaggaaccgattcatctcattgctactgtccccttatctttgctactctgttaacttattattactgccactgattttatttccatactgaattgccattgtaacagtggtctcttccatatttgcagattctagttgtccattgtgctgcactgcagcagtagacaatcgtgtttttcggtgttttgtctgtctctccttgatcattcagatgcctgtacag

SEQ ID NO: 192923 - DNA, 326 bp, Zea Mays
ccattcagggtgtgttacttctctaataaagcctgcagctactaggagggtcaactcagctcatatggcctcccttttatctggcgtaaagcggcgcagcttctgccggataggctttgcttggggatacacctttagtttgtgctcgaccagctccctagggactctgggcatgtccgcgggtttccatgcaaacacgtcccggttgtcctgtaggaaacggacgagtgcgtcttcctatttggtggtaaggctagagctgatggtcgtcgtcttgcgctcgtcagcaaagccgaggttggctttcttggtttcttcgaccggcc

SEQ ID NO: 192924 - DNA, 306 bp, Zea Mays
cctttgttctcactttgtttgtttctgactgctttggtggttgtgaccgaagcgcttctcttgggagaacacgtagagtaattgttagcttgaggaaggagcagccttttgtttgtacttgttctgctgggaacttgggcgacaacaatgaagctaagcagaccaatattctttctgggcactttgattttgctggtttgtgtaataggtcaatacatctcattaaagaaagaaggacttcgggtattgtacctataggttcactgcaattaggtgtttgtaggcaccaagctgacctaatgaagg

SEQ ID NO: 192925 - DNA, 318 bp, Zea Mays
atctgaattgtctctgcctcgatgtggttctctggtacttgcaggcacttacggagctgggacacatgaaacacattgtgaatatctgacatggattctggtaattcaaggcggtatgttgtgggtcccactctgccaatgacggaataggggccgacgaaacgcggtgctagctttcctttcatttggaaccttttgatcccacacatcggggagaccttgaggtatacaaagtctccttcctcaaatctgagttctctccgtctgttgtctgcataacttttctgtcgactctgagcctcaagtaatctcttgcgg

SEQ ID NO: 192926 - DNA, 320 bp, Zea Mays
cttagctctggctagagcagccgaacgctaagcaaagcacgtcagaggagacaaagcaagagcagctctgccatcggccaccccgacctgctcgccggccgaccgcaacaccgaagactctcccaccttcacgagaacgccagggttagcaaagcccttaagcctcctaacccgagaccagtgtcgtcgcctcttgtcagacgtcgaagccgggaaggactccatggccaccgacagagatgagggcgccgtggcagttgacggcgtgatcatgcgccacaccgacttgcgagcctgcccagccttagactcacacccag

SEQ ID NO: 192927 - DNA, 313 bp, Zea Mays
gtcacgacatcagtggagggcgaaggggaaggggaacaggcatccatggggttcctccactccagcagacgaagaggtgacgaggagtcgaggagtcggtggtggcgcttcagagatgaaacggtggcggcgttgtgtcaacctcaaagagaatggggaggagaagagatgaacaggtggatgggcccacctgggagccggttgaacgaaggagagggggagatgaacgtgaaggtcggctggatcgctggcatgggcctggctggcagagcgagcgtgcatgcatctcgtgagctttttgttggaattcagt

SEQ ID NO: 192928 - DNA, 410 bp, Zea Mays
ggcaaatatccatcgttcgataaacattgacaatttctccctcctaaccatccattccgcctagacatcaagaactttacgaaaggtgtcatagtgacagaccacccacctgcaatgatgactggtgccaaaattcgtcaaaagatagatgggctcgtggcaatccataaggtggttttgtgggatatggtgagcaacatatgttgacacataagtcaggcttgacttggctccccctattatgatgacctgctcattccacacaacattgacgtgatgcacattgaaaagaatgttgccatggcactttgggcaataattatggacattcctgataagtcaaaggataatgtaaaggcaagagtggatctgacagcattatgtgatagaccaaaccaagagatgaagcc

SEQ ID NO: 192929 - DNA, 493 bp, Zea Mays
gttggctgatggaggagggcgccttgggggcgggtgctgaggtattcttggggccattcaccgagttggagtaagcaggtcctgatgacttcaactgggggcagttgttcttgaagtgactggggtctctgcagtgccaacaagcatttgctggtggttggttgcttgcaactgagggggcctaaaaggagctctgactctgctgactgaaatgtgacggagtgggtccagctggtctgttgaagcttggtcccttgggtggaaacccaaaggatcgagttctctggtgccggtcttgttgctgagctcagaggacttggaatttcctcttgaggtgacctttttcttcttcccttgccctatccactagtatggatttgtttgagagatgcgagaagctgaggaaatcttggctggctaggatggtcttgagttctggtcggagtcctttcaaaaagtgggccatattcctggcttatgtgctgacgtcgtc

SEQ ID NO: 192930 - DNA, 438 bp, Zea Mays
ctgagtggaaacccaagcgaaaaagtggagaagagtcgcaaaagtatcagacttcgaacgcaaagaaaaagtccaggaataatgagaatatcgtcaagaatcatcagataatatttataactcgaaacactagtaacaggagaggtccataaatcatagcgtatgagatcaaaattgtacatagcctgagaggggctagagaaaggaagtcgaacatgatgacctaactgacaggcgtggcatagatgctcaagggtgcccctagtacaagaaaagactgaaccactacacagcttggacaacacagctaggctaggatgtccgagtcaacgatgccaagtactggatgtagtggaagtagtcagagcatgcggctgtggcgaggacgaaggcggtgatgtagcagaagcaggatatggtgaggtggacataggcagc

SEQ ID NO: 192931 - DNA, 276 bp, Zea Mays
tcaaggggacactccttggccctctctctacaacctgtggatggaccacatctctatgtggcccagcctgccccgggtggaccttcaccgcgcctgccttcaccctggtcggctcacctgatgatgtcggccaagggtatcctctcggcccactcccctcggcgtcgtcggcacctcaaccatttctccttcccttgccacccacctagttctgttctagaacctgttgcctagtaggtgggattattagtctcttgctagctcatttagcatgat

SEQ ID NO: 192932 - DNA, 345 bp, Zea Mays
gagaagaggtggctgctagggctttaggtaagagctgtgctattcactatgtccaggagcgctcgaggcgtaaggagcgcacgagatcctttgatctttgggcttggtgttcggatccttgtgatatccccaaagaggtctcgctgtctgttgcagaacctgatagggagccccctcctcctggtgccccgctacctgtggttggggtttttcatgagttgccaactgatctaaaggaaggccatgtttacaccattcgaaaccacattgaagtcgtggaagacctctcattcattcgtggaagggatgctagagaaggtcccacttgccgtaggccacgcagag

SEQ ID NO: 192933 - DNA, 1053 bp, Zea Mays
atcaagggcagcacgcgtgggaggggaagaagcctcgtaaaagggaaaagaggcttcatcaaagatcacgtggcgcgagatgattatgcgattggattgacgatcgagacaaaggtagcccttgtggtgaggggaatacccgagaaaaacgcagagggtggagcgaggggaaagttcgtggggggctgtggctgaaaggttgggataacaagtgcaacaaaaacatggagatgctcatatgaaggatgtttacaaaatagatagaagtgaggcgtggaatagttgagggttttggtggtaggatgtttatgagataggtgacagtgcctagagctgcggcccaaaaggcgaggggaacactagcgtggaaaataagggaacgaacggcattgtttatggatcgtataatgcgttcggctttgccattctgggcggaggtgtaggggcatgacatacgaaggtgaatgtcgtgcaaggagaaaaatgtgcgggcacgtaggttgtcgaactcacggtcgttgttgcactgaataccctggatggtgatcccaaactgggtgcgaacataggcaaagaaagtagtgagggtggaaaaggtgtcggatttgaggcgcaaatgtccacaaaaaatgggagtaatcatctaaaatggcaagatagtatttatgactagagacactagtcaaaggggaggtccacaaatcacaatgtattaactgaaaaattttagtagccctggaggtggatgtatgaaaagggagacgaacatgatgtcctaattgacaagcatgacataaaggagcggtggcactctattacaagaaatgactgacgactgggctagatgggataagacagcttgaccagggtgcccaagacgctgatgcagaattgcgtcttgtattgataagtagaggtgctgttacatatataggggaagagctagaggcaaaaggaaacctcctaaacaaggaaacagcaggaccctaattgatccttaccatcctggactcttccccaaatctctctctatcctaacctgctatacaaggc

SEQ ID NO: 192934 - DNA, 503 bp, Zea Mays
caaccatgacaaggcctgcagaagcgctcataccaggactgcgcccagagcgggtgtgtaacatgtaccggtcggccagaacccagaaagagagtgagtagaccgtgaatcgcaaaatgtaaccaacactgaactatcttatttcccaacacgcaacatgtcctcactgacactctgctgccggaactctgatctctattcctctgttcttcctgcgaggttgctattaatcctggtatcaaagccatcggttctcggcttcacgttggattcagcatcctctcacgaccactacacccatcataaatcatgtggtgccatggcgctgaacatcaaacccagattgacaactcttaccgaatgtcgggtgcgctaaaccggatatctaggttttattcaaaacatttttttgaaccagaacgccttgaccggatgtctgattcgcaaaaccggatgtccaagaatattcaaaagctattttccctgaatccgagcacatggat

SEQ ID NO: 192935 - DNA, 501 bp, Zea Mays
atattcgttgccttttccagatcgtgatccataaacaaaattgtatcatcagcgtattgcagaatggatagccccccatctaccaaatgcggcaccaagcccttgatctggccattttcctttgctctattaatcagggtagcaagcatgtccactaccaagttaaagagaataggagacagcggatcgccctgcctcacccctctatgggtctggaaaaaaggacccatgtgatcattaactctaaccgcaacatggccccccttcatgaaagactcgatccacctacaccaggtacttgaaaaacctttcatacgaagggattgttgaacaaagctccacttcaccttatcataagctttctcgaagtcgattttgaaaatgaccccatcccttttcttcgtatgtagctcatgaatagtctcatgtaagaccaccaccccttccatgatatttcttcctggcaggaacgcagtctgcaggggactgattacattctgc

SEQ ID NO: 192936 - DNA, 385 bp, Zea Mays
ggctgagttgtgagcttcatcgagcaagacttctcgtgcctccccttttggtacacacagacgattcttgaaccaaaggactccttgttcatttgtcctgaggtccagaagttgttctttgcgagctttttccataagtcttactatctccgagacaaggcgttgagctttgcatatgaggtcttctagcattggcttgacttctaggctgccgttgtttcccagacatgcattcagctgagctgattccttcttccaatcttctaaaaagctgatccccttcatcccgaaaggttttcggctgagggcgtctgctaccatgttggcctttccggggtgataatgaatctcaaggtcataatctttgatcagttccagccatctt

SEQ ID NO: 192937 - DNA, 602 bp, Zea Mays
acaccatcatcggcaatttgctcgagataatacaccagcctaaacttgtgttaaacagcctaatggtacacttgacaacgatgataaaatgacagaaaaacgaattaatcacattggaaaaagaacagattcaagaccacagtctgcctcagtggtagtgacaatttgtggatcgtcatggaacaattccgataatacgtgcattttttatgcatcatcggcagccaacgaacatgacaagaagcaagaccccgaaagaaagatacacagagaaaggagatttagttttggaaaagctaaagcattagagggacggccattgaaggcgagttttggatttggaaaagctaaagcatcagagagattcccattatagacttggtctatcatgcccggaaaagggttctgatgtccctgtcttgttctcatcacctgcttgcatccaatctcaatccaaatcgacaagaagaaaaacgataaactcaagcaaccaaagatctcagagcataaaagaaagaagagcaaagaccagcccgcagcacgaatagaaggatgcaaacaacatagtggagagtatcgcatggaaggcgcggctgccgtcg

SEQ ID NO: 192938 - DNA, 330 bp, Zea Mays
gcccacttgtcaaccagttctctagtatttgtgtcagctacttcatctaccacttctcctatgtagtgacatcgtcgtctaggccatctatctaggtctagattgtccacttaaatttgtagtggtgtcttaggtcctgtttccggtgacactgctctccattgtatgggttgtaaacttggcaaacagttgtaacatccttatccttctagtgagtcgaagtcttagaaaccttttgatcttgttcattctaatgcttggggtcctgcacctttcgttttaaaatagagataattttattatgttctatttcattgatgactacttgag

SEQ ID NO: 192939 - DNA, 386 bp, Zea Mays
cacagctagataccaaaccacagacatgctatgttttcaccacgaagatgaaaattctgatccgttcatggctggcgagtttcaatttggttatgaacataacttttattatggtttagtatatttctgacaaaaaaattaagaggcaagtacacactcaattcaatcagcaacaccgttcacggggacggattgaaatgatggcgcgaacagatccactgaaccaaacattaacggaatgcatgaatacatacgctggtaaatccgaagccaacggccaattgaacggaatgcaactctcacgcaactactagatcgaacaaacaagcacataatcaaacagattagacccaatttcgtatgcctggtagcctggtaggcctgaa

SEQ ID NO: 192940 - DNA, 340 bp, Zea Mays
ctcccgccataccacaccacaactgtcgtggaggtcttctctgttggtccctttagacattgacacttggttggggccttctacctagtacgtatggtactggcaacaccgacacgtgctttcgtctacgacacatttccacgcgcggcaaacctggaaacggctcgtccacggcgggttgactgcatcgtcctcggcatcagctacttcctctacggctatctcgacattatcgacacaaagggctatcatctgcatgggctactccagtcgcagcattcacatcgatgttccgattgtagggggatatctccattgttctccagtctgtctgttcgtg

SEQ ID NO: 192941 - DNA, 1533 bp, Zea Mays
cagaaaatggtttcaaatcagaaaggtaaaccctggtcaacgggaagtgtagtcttagtgtcaaaggtgtagctctcatcatagcgatactagcaatcaagggcaatatgccctaccttgtcacagacttgacagatcttgtcagtgcgccaagattgtggacgcagacgaatatgacgatggatttggtagccaccacaggcaccaggagggccaccacaccctctgcctcgaccatggttgcagcaacggttcatgttttcgtgccctcgcccagcagcattagcagacgcttgataacctccataaagtagatccatcctaatgtcaaagctaagaagctagaaggtggatttagctatggtgacctgcgcaacacggaccattagagtagatatcaccaagttatactcttcatcaagtctcgatagaaagtataggacaagttcttcatcattatcagtcttctatgcaaatgccatctcacctacaagagatttcatcttgacaatatattcaaccattatcatattacattttcttgaagttgtcagggcaatccatgtgttcacgattcgggctcgaaagcgacgtgtaggtcttctgcaggtttgaccacacctcatggggtgtttcgtgtgtttcatagatggcaacctaacccacgacttcttgagtcatggatgacatatggaagccaaggacccgttgttggagcgtgatccatcgaatgtacattgggttgacatggtcgatcatcttaccatcctacttgatagagatcttggtgaacgttacaactgtgccatttaggtagccttgtggctaggcacctctaagaatggacaaaacttgcgcttccaaaacgcgaagttggtctcgttgagctttacatcgacactttgtccttggagaggtgtcggtactgcagagttggatgacgccattggagcttgtcactggtgaggttgttgtcgactcgctcttggtcaatgcgtcaggtaatagatagaggagctggcactgattaccatgaaataaacacagcacgaggatattaaattgcttcattgcttgccttgacctctagggtcaacgaggttgtatatttatatagatatgagttgtctattacaagagtaatcctattcgattacaacatcccaaccgactctgaatctaaatgaactggatgcatacagtcatgttccattttatcactaacctctattccaatctagtccaagaggatcatgaacaactagaatggggacgacaaaggtggataaccagggtccgactagagtgacgacggtgtattaatgatgctcatacgggatagaactattgtactatctagtcatggctataggggttttcccatctaaagcaggtagaattgcaagaccagatatggtcataaggttgtctccaacaaccttcttatcccaccttctatctcactcactatttcaagctccactttgtaaacagtacagtctacagtgcaaaacaatattttgcacgcccata

SEQ ID NO: 192942 - DNA, 811 bp, Zea Mays
agggaggagaaggtgtttctgcaacgtcaagaagaggagaaactggaggagggaacctggatcctggacactggagccacaaaccatatgtctggatccagggctgtcttcactgatctagacacagaagtgctgggcactgtccggtttggtgacaattcggtggctcggattgagggacgaggaaccatcaagtttgtgtgcaagaatggcgagatccggtcgttcgttggggcttatttcattccccgactgacgacgaacatcattagtattggacaacttgatgaagcgaagtacaagatccatgttgatgatggggtgatgcgtattcgggaacccgatagaagattgctggcaagaattgtgcgggctgaaaacaggctgtaccttctccatctgaagatacagcagcctgtgtgcttagcagtgcgtgggcgtgaagaggaagtagcctggcggtggcatgagaggttcggccatgtcaatatggctgcactacggaagctggagaaggaagagttagtccgaggcttgcccaagctcggacaagttgaaagagtgtgcgaggcctgccaggcaggcaagcaaaaacgcacttccttcccggcgcaggcggagtaccgggcaaagcagcgtctggagttggtgcacggtgatctctgcggtcccattacaccaatgactccaagaggtaacaaatacttcttattgttggtggatgatctgagcagatatatgtggatggctgccatctcgtcgaaggatcaagctgctgatgctgtgaaaagaattcagatgcaagctgaag

SEQ ID NO: 192943 - DNA, 503 bp, Zea Mays
ttaggcgtttgtgttcttttcacttgggttgcctgaaaatggaattagtgggttcactcagttctttgctcaggcacttcggctgttttgttaaatggtgtccctggcaaaaatttcaatgtagaagaggggtgcaccagggagaccctttgtcccctttgctctttgttttggctgctaagcttcttcaatacattattaacaaagcagcatgtattggtaccttatcagttcctgttatgacccacagccagtcagagttccccataattatgctgatggtaccttgatcattatgaaagcatctcaacgagagttattttgcctaaaggggattcttcattccttctcaggattgacaggtcctaaagttatttacagcaagtagtgcctccttcctatcaacttggacgctattaaaggcactcagttggctgctgtgtttagttgtcaaattggttccttccccttacttatcttggtttgccaattgggacctctag

SEQ ID NO: 192944 - DNA, 330 bp, Zea Mays
ctcgacttctcctggactattctgatttgctcgctttgaatctgacagtgaggactagctcatttgaaagtagacttcctgatctttccaacatgtccttaatcaccttctttggatctcgtatgacggagttatggtcatattggtgagtttattgctgctggtttcgggaagagttgggaacatcagtgcgttggaacttggacctcctcttaatgatgcttgctggccaatcttgaccctcctttatcctttgtcccgcagccatccgctgctgatttcaatcttatacttggcttggagtaaagtcactcgtcctaaagatttggg

SEQ ID NO: 192945 - DNA, 281 bp, Zea Mays
cgaagggcggttgtgaagcgtagagtgagtgaggtggatggcggtcggcttcgtgtgggcaaggctggcaagcaggaattgttgtcctcgccggccgttgcgagtgtaggtgagggggagttgtgaagtctttttgagggtgaggagctgaggataatgctatttaactatagggagatgggaatcattccgaaggttgaaccgatgtaaggtgtgatgccctcgctgtacataagtaactatagtttgtgtgatgaggctgtgcaccttcgcgcatccag

SEQ ID NO: 192946 - DNA, 802 bp, Zea Mays
aagaataaaattccacacagtgtggcatgcttagcttaacaaccaatattcttctctaatctatgtttatctatttgttccttcaggttactgctcaaagtttggataaaaagcttggaagaatggttactcgtgttgtcctaccacgagttgtcatgcacgcgagacatcattatggagtaagttctaactaaagatgtggaaaaagttaattgagtcattggcgacagttatttattttcatgctctttacttagaaaaccccttcatataaactaaccaatttgttttcatgctctttacttagaaaatcacttcatataaactaaccggtttttgtcttgtactcttgtgctaggcattttcccaaaacttcactgggttagaattggaagacgggggaggccggggcacctcaggtagataacatgcaccctttatggtcttaatttttatttttctttctttccttttttcatttgctgttatatgtatgcatcatgcaagtttccaaacacattcatttgttttgatgtttgatatactattaggttcacattgggagaagaggctcttaatgaatgagatcatgactgggtcagtggatacgagatctgtggtttcaagaatgactttagcattactggaggacagtggatggtatcaagctaattacagcatggctgaacatttagattggggtcagaatcagggaacagagtttgttatatctccttgcaactcatggaaaggggcataccattgcaatacaactcaattatcaggatgcacatataatagg

SEQ ID NO: 192947 - DNA, 409 bp, Zea Mays
gcttaatgaaattctccatgaagttaaaaggaaaaatcaaagtggagtagttttaaaaattgattttgaaaaagcttatgacaaagtgaattggcatttcctttacaatatgatggagaaaaaaggttttggtagtacgtggtgtgattgggtcatgaggatcgtgagaggtggtaaagttgccatcaagactaatgatattctaggcccttatttcactactcacaaaggggtgaggcaaggggatcctttttctccccttttgttcaatttagttgctgatggtttagcttgtatgattaaaaaagctcaggaggaaggtctgattgaaggtctgatccctcacatcattcagaatggttgttgtttgcagtatgctgatggtaccatttttcttattcaagattgc

SEQ ID NO: 192948 - DNA, 340 bp, Zea Mays
aattcaaaatgcaaaattaggtctaattttatgattaaacaaaaggctagggtactttctacaagaatataaggcctacgcatgaaaaccagagacagcgggttgattctcgaaaacctgaggggctatttaacaaaactaccgcgcgaaggggtgtcgactgatctcgatcgcacgatcgcgaatgaatggtcaagattagatccgagcacgagcgggcacacgtggatgggtaagcacggctgataggtggggccggggtgttagcgacctgaggcagggctggctgaccggtcggccccagctgcagaggcacaggtgagggcacgcacccgagcgg

SEQ ID NO: 192949 - DNA, 830 bp, Zea Mays
tattctcgaagcactcggtgtcgacaaccgaactcctcaaggcatcctttgacaaggagtggctcctcatcaagcgcaattcatttgtgtacatcttcaagaccatacaggtaaaacacattgtttttgggagtctctcccatgaaactttccaagactcccagtgctaattgactgaccttattgttgtctgtcctgtgaactctgaagcttatcattgtagccctcatcgcgtcaacggtgtttctgagaactcacatgcatacgacgaatctagatgatggctttgtttacattggagcactgctctttactctgattgtgaatatgttcaatggttttgctgagctttccttgaccataacaaggttgccggttttctacaagcaccgggacctgctcttctatcctgcttgggtcttcacagtaccgaacgtcattctcagaatcccattctccattattgaatctatagtatgggttcttgtgacatattacaccatagggtttgctccagatgctgacaggtaaatgaaggagtagtccttttttctaaaacatttctggaatcagaattctgtaatggctaattgtattatgtatatgggcaggtttttcaagcacttgctgctcgtgttcttgatccagcaaatggcaggtgggcttttcagagcaacagctggactttgcaggtccatgatcattgctcaaactggtggagcactatttcttcttatcttctttgttcttggaggctttgtcctgcctaaaggttcattgcttgtcttcttccttttttattcacacagatcaatattttctttgctgac

SEQ ID NO: 192950 - DNA, 504 bp, Zea Mays
gttcttctatgtgcaggtagcttctttgacaactatggaaatattgatgtgtttcatacacaaactcttatctggatgtgctgcatatccatactaatatctgcagatgggacaagaagaaatcagtgctagtgggacatcgtatctcaatagaactgaagctgcaaatgttgaaaaaattgtaacaacttttttaagaagtggtgttgtaccaagccaggtattttttcactcattgtgtgtcttatcatctcatgacctgctattctttactttatatgaagtcaaaatccctgatggtgtgtctcatgcatttttcacacagatcggagttatcacaccttatgaagggcaaagggcatacattgtaaatttcatgtcaaggaatggctctcttcgccaacaactttacaaggaaatcgaggtcgaccataaaatttataaaaacctagttttaatctatattatagaaggttgcttgcttaagttttatacctcttgcag

SEQ ID NO: 192951 - DNA, 616 bp, Zea Mays
gtctttgtcagggagaaacacacttcttcgaaaggcacaattgagaggttgcatatcagtatttgttactccatttgcacgtatctgttcctttttctttttcttattattttgtcttaatgcatgagtatgctttcagggagttcaagattctcaatctattggaattcaatagcaaaagaaaacgaatgactgtaattctgcaggatgaagatggtcaaattcttcttttgtgcaaaggagcagacaggtaggatttgtaccattttttaattttttttggtgatgctctttgaatttattattggctaagcctgtacatcaggccatctgcactcagattttgatattttttattagcttaaaaatgttaataagcaaattttacacctgattacttggtgctgccaacatgcttggcttgtttgctctatctttttcaatgccactactttctttggcttcaacttgactatccttgaccgttctttgttcccaaccaagcagcatcatatttgatagattggcaaaaaatggaaggatgtatgaagttgatacaactaagcacctgaatgaatatggtgaggcaggcttgcgaacattggcactatcgtac

SEQ ID NO: 192952 - DNA, 352 bp, Zea Mays
cgtcgttgattggttgtagtagttttagtgcactaaatgacttgaataaaatttgcaagttgacttgttggtcctcatttgattgttttaactctaacaaatggtaaagtgttagaatacttcaaatatctagatcatgacaattcttgaattatatagaaactgaaattcattgattgctgttttgggctgcacgcgctgtttttgtcgtgctgtatgtttgatgaactaaattgtattttctgtagatatgtgctatagaaaagtggtagataactttattatcttgctggtgttaaaatttgacaggcataagtctgatcgtttaggagttaggatttttgcaaattca

SEQ ID NO: 192953 - DNA, 350 bp, Zea Mays
taccatcttgtcaacaagaaaaacaactatggcattgcatttgttgatggcttgctagagtttgtgaaaaagccgggaaatccatttaaagtgcaggtttttgatgaatctattttttctgatgcttcaagacttactgttaaccatatgaaatgggacaattatacttacttggatgtggacgatgatgtgcctttttctgtgagggatagattggcaagtggtgcaagttctcaacatgtaatcatcaatgttgacaagattgtttttaccatcactcatgaagtctctgatactgatatttttttcccacttgtccaaacctgcataagtgatatccgtgttgttac

SEQ ID NO: 192954 - DNA, 290 bp, Zea Mays
cctaaccctaatcccattcggatctggtgattggtgataccctaaccctaatcccattcggatctggtgattggtgatgctcgttcatcgttggtgctcctcgctggtcggctggtgctcctcgcctcctcggatcgagttgtagcttgatagctggtcagctggtgctctgtgtggtgcgggtgcgtgtgtcccttcctgattcttcactgtctccagtccagtggtccgtggctccgcgccttgtatggtcactggctcactgcctcacttgtgcggtagtgcactag

SEQ ID NO: 192955 - DNA, 524 bp, Zea Mays
tccccttgttggcctctgatgttctgaattcggtagtcttcgtagaagttgtcgccgccttgggtggaggaggtagaggcatagggccacgagcataagatttgctcgcgacagtagattccagcttcttatagtccttggtccgggaaccatcgacgatctcctcctgcaactgagcaagaacgtaggcagtatccaaatcttttggccattgaatcataacagtggatttaatatcaaaacgaaggccatctagaaatcgcatggtgtaatacagtgggtctgacatttcctggtaactattgagctgatcgaccaactgagcaaaacgttccacatattcccccaccgacccttgctgccggatatgaaataattgacgcactaggctagcatgctgatctttcccaaatctctcacggatcaagttcccaaactctagccaagacaaactagcaagcttatgctcaactgaatttaaccaacgtgcagccgccccagcgaagtgcatggttgcaacttta

SEQ ID NO: 192956 - DNA, 500 bp, Zea Mays
gtatttggagagtagtatctaagcaggcagattttgataaagccataatgggcgtatttggatagcacaccctcgcaacacatccgaccccaagcatccaaaaacagacacctgggaacactttcctaggccaggcaggtttttcggtgttgaagcaaacacgcccaatgtgcataaagatgaataaaatttgtaggaaggctcagttgtgctacatcagttgtgttaaatggtattgctatgaagtggaagtgtgtgaaagcatatgcaatacaaacggcactatcattgtgaactaaggttctacaactgcagtataattctggtggacagcaaaccagacaagcatttcacctttgcctacattcaaacaaacaattgcattgcctacattcaaacaaaaaatcttagtcaaatataacatggtagtctagtgatcgaccaacaaaacgtgtatagcacgttaagaataacatccgtcgcacattgtaacactaaat

SEQ ID NO: 192957 - DNA, 1179 bp, Zea Mays
ctttattgagatgtaccttaggccgccttttgcttctgaagaaatgaagattgatgattggattaaggttaggcaatgtggaataagatactatctatctctcggagaccaaaggattgttgacaagtacttcataatccgtccaaaagctgagtttgaggtatacactgatcttcaaaggatctgttttgtgtttccttaagttgccaagttactgaaaacttgctttggtttgtcattctggtaaaccaataggtgtggcttactatggtgaagcattatatactgcagtgtttagagcacactgcaaactgacggcatgcttcactcaggcatgtaatagatgttaggctattttcctcatatatgaaggagagctgttacatgcgcaacaacagatacccaaaactatgattacattagtttcctggaaataaaatgaattatctcatctagtaggcattgatgaacttcacagcatgctgtacttgtcctttggatacttggtgatgcttcgtggaaaatgcaattgttgcctttttttcacatcaaccaagctgcccgagttattggaaagagcagtgctttgaattgtaacacggggcgactaagggacagagtcaagccctgactgctctgagcttggtggaggagattcagggaagtagatttgaaagcaaatgttaatacacgggaggacagaagattgattggggggggggggggggctgtagagacatgggtacatattatcatagaagtttgtttgtgctgcaaacctgcaaaatattggtagcaaatgatgaaaactaaaacccaaatattattatgtattttctacagtattacattctttaagatgaaatgtttatgttagatttaaatctctcgcaactagcaattgtttttcatagttcaaaacttcaaataggtgaagccctcctttaatgaagagttaaattgtttcatagtagcactttgtatcacttaaaaattgcagcaacataatgagatgttctaaatgtgctgtatgtttctgaattatttcaggttggacgaacaactcttggaggattgttggccttggggtacaatgttgttgttagctttaagcgtacatgcacatctgtcaatatagatcaattactgatagctgcagagaccattgacactctaaat

SEQ ID NO: 192958 - DNA, 523 bp, Zea Mays
agagcttggaggcttgggcatctcccacctgcagcatatgtgttgggccctcagattgcgttggctctggttaaaaaaaactgaacctgaccggccctaggcagccttcaattttcatgtgcacccttcagttctggccttcttttctgcggcagtttcttctgaagtgggcaatggcaggaatactctgttttggacagataaatggttaaatggccaaagcctacaatagttggcacctcatcttgtcaggttggtatcttcaagggctaggaaacggagtgttcaggatgccctcacttctagaagctgtgttcaggacattagaggggctattactgttaatgtgttgactgaattttttcaagtctgggacctcgctgccagctggattttgcacccggaacaggaagataagcacatatggctgctctctagttcaggaatttataccgccaagtcggcttatgatggtttctttattggctcaacaacctttaggtcatggaggaggatttggaag

SEQ ID NO: 192959 - DNA, 492 bp, Zea Mays
tcgagcagctcaagacgacagcgtacgaggcgaatgaggtctttgacgacttcgagtacgaggcgctccgccgtcgagccaagaaaaatgggcacatcgccaagcttgccattatggcaagggtaaaacttttccctacccacaaccgtgttgcattccatatcaggatgagctacaggcttcgcaggattgttgacaccttcaaggaccttgtggaagaaatgaacacctttggattcaacaagcttgagcccgaggcaacaacgacatggaaggagtggcgtgagacagattctattatcgttgatcctgaaaatattgttgccaggtctagacatgatgagaggaagaaaattgttaacttattggtcaatggtcatgttaccgatggtgatcttatggtcgttcccattgttggaatgggaggactaggcaagaccacactcgctcagctcatctacaacgaccctcaggtcaaggagcacttccatc

SEQ ID NO: 192960 - DNA, 416 bp, Zea Mays
ccaccggaattactgccacgacattgaacacgtattcaccgcgccagggttctttcttatctccggccgcccgcgatgttcgatcaaattaagcgccaccgtcgaaacctcctataaattgagcccgagaccagctttgcaacatcatcacccatctcaccaccaagaatcactagcaatcgtgcaccagtgagctcgaatttcatttcccccccaaatcagtcgaagagcaccgtgaaaccaagttcaccgtgggcagtctgttctggtaaaactctgcccaattcaaaccttgtttaagtgctctcgtatgcctgtgatgcccatcgacccacttaattgcacggagtagcctctggtcgccgggaacacgacagtatagccgttatgctcacggtcaccgtggccagagcaaa

SEQ ID NO: 192961 - DNA, 341 bp, Zea Mays
ccccaatctccaccccccccaatttcacccagagccaccgtgacaccattttccccctttctctgtcaccgacaagcccaggtcctccgtgctccgtggccagaccactctagtaaggctctgtacatcttgagtgttgttttagtagctctgtatgctcatgaagcttgtcgtggcaaccgttggaccaattcaagcatgattgaacgggaacacgggtttgatgtcacggtttccgccgtgcacatgggcaggccattctcaatgtgttcaagccgaaatcaacgagtgttccaaggtcaccttgagtcggttatgcctcccctgtagctagactagac

SEQ ID NO: 192962 - DNA, 454 bp, Zea Mays
caagccaatggtggtcactgtttagtggcgtggggtaaggtcactaggcctaaagttctgggcggcctcgggatcactgatctttggcttttgagcgtggcgcttcgagctaggtggccttggctccagagaaccgatcactctaagccttggtcggttctccctgttcaggcctgtggtgcggtggaagccttgatcaatgttgcagttgtgtctcaattgggtgatggacaggatatcctcttttggaaggatcgatggctgactggtagaagcatcagtgaggtggcgcctgaggttcttgagcatgtacctaagtgtgttgtttccaaaaggctggtaaaagatgctctaacaaatctgaattgggtggctgatataaggggtgcgctttcagttagggcgcttgcacaggttttggatctctgtgacttgctggagggcttagttcttc

SEQ ID NO: 192963 - DNA, 288 bp, Zea Mays
gcacgatagagggagcaaggggggaaaccacagagttcgcctcgaggagggtgtcgtgctcagaggaggcagtggaaggagatacagagaagagaaagtcggactcgtcataaacaacgtgacgcgagacgagaattttgtgggtggagaggtccagacattggtacctcttgtgatcaggagagtacccaaggaagacacaacgagtggatcgggatgcaagcttgtgaggggcagtggcataaagattagagtagcaagcgcacccaagcatgtgagggtgatcgt

SEQ ID NO: 192964 - DNA, 487 bp, Zea Mays
acagggggaaattggtgtcttctttcctttgatagttttaaggtctctggatagctctgatagccccctcagccagaaggctagtgttcttaggtgactgccttttcctttatggaatcccagctgcatacataatgcatgaacatacacagtttggtcattcgaggcatctagtagatttgtgtttaatgtcatttacttatttgactgattttccaatcaggatgttggagaaagtttgcaaagatccccaaatgcttgcagatgtgtttgtgaactatgactgtgatcttgaggggccaaatctttttgaacgcacggtaatcattttttcaattgtccagaaagcatagcttctgaaatgtgcctttttttctttggcttgtaacacatctgattgataatatatgtcctactaggttagtgcgctatcaagaatagcacaaggatctcaaattgctgatactaactccatcgtgtcatccca

SEQ ID NO: 192965 - DNA, 924 bp, Zea Mays
ggttggaagtgtcataaagaatcctgaaatttctgcactagtccctattcttctgtcagctctgatggatccaaatgcccacactaaacactctcttgacatccttcttcaggtaataagacctacgatagcgtacagccgaactgttggtttccgattgcttgcatcacttcgccaatcaagaattcaagattggttattattgtttaggtttacatcgtcatgtttttttggcagactacttttattaactccatagacgcaccatcgcttgcactgcttgtgcctattgtgcatagaggactgagggagagaggtgttgagactaaaaagaaagctgctcaaatagttggaaacatgtcttctttagttacagaaccaaaggatatgatcccatacattagtttgctcctaccagaagttaagaaggtaagttctctgcctatgcttattacaccacacctcagaagtcagaaatgcacaactgctgatactagttcttgtagattcaattaagtgtattttccttatttgttatacattgtgtttgactgtatcttgcaggttctagtggatcctatacctgaagtgagggcagtggctgctcgagctctggggtctcttataagtggaatgggtgaagaaatcttcccagatcttgtgccatggttattagatactctgaaatcagataatagtaatgttgaacgatctggtgcggcccagggattgagtgaggtttgttttccttttttttgctttgagtgccttcctcttttgtagtatggcatttcttccatgtttgattatattcaatttccaggttttagctgctcttggccaagattattttgaccatattcttcctgacatcatccggaactgttcccaccaaaaggcttccgttcgtgatggacatcttac

SEQ ID NO: 192966 - DNA, 592 bp, Zea Mays
cggtgatggcttcctagggcctgatagcggtggcaccgtggtggagttgggtccgacggtggggaatagaagggcagcgaccacggaagcctcgcgacgagtgagagaacagggaggaggggagccagaaggagtgtcggccatgggggctgggctgagggtggcgacatctaggggaggagaggggaagacctttggcttgataccaacaattcatgggatacaatattagtattacctatatggtacccctaatgtgttaccgcctctactactgtggccagttcgacaacgacatcaaacgaagaagagaacgcagctctcggcccacgaagcccaacccgcgttatgcgaatgcttaggaggctcctattacaaatagaaagggagacatactcgacaaaaggaggaaaaaaacaattgtaattagaaacctgagaacaattctattctacgtcagccactcgctcttgcttcttcctcacgctgctaacatctggtattagagactccttgatcctatcttcgatggcttcctcctctctagttttcacgtcttttgtcgatcccaaccttgttgccgcaatcgccg

SEQ ID NO: 192967 - DNA, 1322 bp, Zea Mays
ctgttttctgtcaatcttttaaccattaggggtttagtgtagcttatggtttgatctgtttctcacttctattttctattctcaaccttttgttatcagtggagcaagtagacccaacagttgtggagattgtggagagatctttggaattctgtctcttacatctagaaaaatcatcatatgtgtgtgatgactttggcttactggtaagttctgtttgcttggtttcagttagttggggttaccattctgagtttctgaccttcaaagaataatttgatttgctgttgccattttgtttccatctttgttgagccagcattctgcatagatacttggaagtctgctgcattcttttgttcttgatttgttacaattatgtcatatgattgcagaatgaggttgcctgttttgtggaatctgtgttgcttaaaggtaccctcaataaggtatcctcattggaacccagcattataaatgacatcattgagcagtggacatctgtccaagctgaaactgagcgcatgagcccacaagggaaatatttctgctatctaaaaggtacactcctgaggcctttccatgcgaagggaatcaatgcactgtaccttttcacttgatgagttctcacttaccttcaattctttcttaccaggcttcaactgctcgaaaagtgaagatgaccttaaacagtttcatttggccttattaccagaatacttgcagcgagattatgttattttagagaattcccaatcatgcagtgcagtatctccaaatgccatggtgccattagcacagcattttgcggttgctcacttatgttgtatgccacgccttcttacactggttcagaagctttgccagtctcccgctttggaaatggttgaagatgtaaacattggcttgaggttgtctttcgcccaaaggattttgaaattagtctgtggtctcactattgagtttcctcctgatgcctctgatgccatgatgttatcctcagtagcgagatgtgctgatagtcttccagccttgtttagactgaggttcaatttctctaatcatgacagagtcttttctgtagatggtgttggcactatcttgctgcagatactggaagaatttttacaggtagtgcaaaatattagtgtttgcaacagtgatatctgttgtacagttaaagcatgcattctttcatccatgctggaaatcttcagtcctaatatatggagatatgaaaaatcgggtgcttgcttggtgcctcctttatcttattctcctcacgttgttcaatttgtgctgcaactttttaaagacaccaa

SEQ ID NO: 192968 - DNA, 339 bp, Zea Mays
atgagctgtcagtgagctgggattagggcttgttaatcggccttgtaagggagaatcactcctataaatacctgtacttggtgattgagaaggaataacagaaataatacaaccaaataccaaaatcgaagtccacttgcctaactgactcacctggtgacgtctcggctcatcgctgcagtgacctcaccgtcgctggaaatctcacgctgtagtggaaatccccttcccacggccagggggtcatcacatctggtatcaaagccatcggagccggcgatcgttgaagagaagacgcaacggctccctctgcaaaaccatccgtgcagacccggtttc

SEQ ID NO: 192969 - DNA, 458 bp, Zea Mays
ccggagcgagacgctcaggtcgccgcgacccgcgagtgtatggccgtggtcgctgacgactggggtggcctcttcggcacaggcgacggctgcatcatggccgacaactggggtgggctgttcgagtatcctgctcacttccaggaagaacaggacatctacaactgcatccccatcaacgatggcacccgcttcaccgaggaagacgacgacaaccaccccgccacgctcgaaccactgctcaccgtcaccaccaccgccgccgaggtcgattccatcgccaacaccgacgatgtcgaggctgactctctcgcctccgcctccacggtgggggtcgccacatcccaggccgccgagatgcagctccatgtcgggtgggcgcgctggctggagggacaggccgactacctaagacacgatcggatgctctgctccaatctagattcccttacttcgag

SEQ ID NO: 192970 - DNA, 451 bp, Zea Mays
atcactcagggctttgaaatgcaaatgcccaaatctagcatgccacctccaggaaacatcatcaacttgagcttgcagacaaactggtgagtctaacccaaacttagctaggtacaatttgttcccaactctaggtgcagagattagcagtgttttctcctgatcatacacacacaatctcccattctccccaacatatttgaaccccttttcttccagctgtcccaaactaacaatgttacttttcagttcagggatgaaatacacatcagtgaggaccttgtgacccttttggcgatcttgaatcaccactgaacccatgccttggattctaaccttagagccatccccaaactttactgagcctttaacaccctcattcagctgtgacagtactgatctgttccctgtcatatgattactagcgccggtatccaaaacccacacgcca

SEQ ID NO: 192971 - DNA, 287 bp, Zea Mays
agggatgaattggttaatgaagtatgaagcgaatgttagctgtgacaagaggaccgtaacattgaagtccccgcccggagaggaggtagtggctgagctaaggatgcctaaaacagcgaaaggagattgtcacaagatttcggttgatagcaaggaggccaacccgctcgaggctatcagggttgtgtcggactttccatatgtgtttcccgaggaattaacgggcatgccacccgagagaaaagtcgaatttgccatagagattatccctggcaccgcccccattt

SEQ ID NO: 192972 - DNA, 336 bp, Zea Mays
ccgtgtcgtgctcgacacgagctggcgtcggaggggacgggcccggaggggttaccgtcggtgttggagtgtgtggtggcaaagagctcgttggatccggagttgtggctagagagcattggtggcgaagagcttgatgtagccggagttgtggctggagagtgtggcgctgcagtcggtggagacttggggactggggtagacctgctcggtgaagagttgcctactcccctagctccctcgaagtggacgtactcgatggtgaagtcgtcgtacgttggagtcgtgccgtcgtccaccgccttgtcccatgcccatcgtcgcccttcgttgaac

SEQ ID NO: 192973 - DNA, 438 bp, Zea Mays
ggtacccattgccatctctatcgaggagaaagtaaatcacgcagcgttcgatctagagcttcaaaagctatcctgtgagtcatgaatgcctcgtcccaaatgattaatgaagcaatctcaatcaattcagccaacatagttcccctcttaatattgcaggtagtggattcatttaaatcacatggtattttaaatctagaatgtgttgtacgacctccgggaaggagtaatgcagcaacccctgaagaagcaactgtaagaataacttttttctgtgaacgcaaatatgttataatagtattccaaaggaaggttttttcagtcccaccataacctgaaacaaagtagaagccaggctgtcccgacaagacattttccacaatggtattgaaggctttcatttgttctgtgtttaattgagaaataaggacttcagat

SEQ ID NO: 192974 - DNA, 758 bp, Zea Mays
tgctgaattgctgatgctgttgttttatatttcagttacttagatgtctacaccattgcttctatgctaaatctacactaaagaatcagtgatattttcttttgtcagccccttctttaacgccaactaatgcttaacataacccctattaggttttcactgaacatggatattgctgctccaaaaattaccgttcctaccaagttccgaccagatgatgtacatgagactaagcttttgcttgaccttggaaatttagttcttcggacagaggttgtgtcttctatttgcatgtaaagtttttatgccttaagtgtttgatttgtatgctactaacgtcacttgttgcttcaggaaatatgggatgcctatacttcagaagagcaggatatatatctaaactttaatttggtgcttagtgatgtctctgcatttctggtggatggtgattaccattggaatgaaacatctgatgaaaagaacttgttgccagtaattgacaaatgtgggattgctttgaaacttcagcaggtaaacaatactcaatccacaccttttttttgggctgtctattaaatgtaatcatcatgacagggttgctgttccgtttttggacagatccagttagaaagtcctctatatccttccacaagaatggcgatacgggtgccttccctaggatttcatttctctcctgcacgctatcatcgtttaatggaaattttaaaattttttcaagatggtgctagtgataatag

SEQ ID NO: 192975 - DNA, 880 bp, Zea Mays
ttgttagaacatttagggagaaaggaattccttgtgatgttgtctggatggatattgactatatggatggttttaggtgcttcacgtttgatagtgtaagtactggatctgctgtgtttgctatacaggagcgctttaaccactgatttgtgtttcttttgtcatgttttagaacttttatatatattgctttggaatgtttactagaccctccagttattttttactatcatcatgcacttttttagctaacgttatggtgctcttttgaatgcaaataatttattatgataattgattttgttgaatcctgtctgagcattttgctatcaatgtgctacagatccgattcccagatccaaaatcactggtggacgatcttcattccattggttgcaaagcagtctggatgcttgatccaggcatcaagaaggagaagggtttcttcgtttttgatagtggctcaaaaaatgatgtttgggttcaaaaggcagatggcagcccgttcgttggtatgtatcactgacttaaataagattcatcgtcaattttcttaaatgttaggaggatatgtctcatacagtttacattcaggggaggtgtggcctggtgattgtgttttccctgattttacatctgaaaaggcacgagcttggtgggctagtttggtaaaggacttcatctccaatggtgttgatggaatatggaatgatatgaatgaacctgctgtttctaaagtacgcgatctatcatgacacatataattaatattgcattgttcaattttttctacgtaactgaatgtgttggtctaaacttgtagactgtcacaaagacaatgcctgaaagcaatatccataggggagatgctgatattggt

SEQ ID NO: 192976 - DNA, 655 bp, Zea Mays
tggaggaccttctgtgcctgaacgtactgcttttgttgatcaatattattttgttgcaagagcatgccagctgaagtctggagcctttgttgcattcccaattgttgctgcgtttgattaggctgagactggaactgcgacatcatatgttgttgaggttgctgaagctgattctgctgagactgaggttgcatcaaacccattgatgtctgctgagcatgctgttgctgctgtggttgctgaattggcttttgttgctgtaacatatgcatacggacatttggcacggttccaagaagctgctgctgctgctgatttagacttgacacatttccctggtttgccaattgttgtggctggtgcaagggcatagattgctggttcatcatctgctgcgtttgatgcatattcaaaagattagttgactgaactggtagcctttgttgctgttgcatctccacagcaccactctgttgattcactaactgattttgctgtaaatttgactgatggcccattaattgttgtggctgctgttgcaaaggaatgttgggctgttgagttggttgagtttgctgcagagaagactgctggtgcatggactgtggatgttgctgctgccttaccacagacggtgtaggctgctggagtaacg

SEQ ID NO: 192977 - DNA, 809 bp, Zea Mays
gtattaactaattggcctgtcactgcaggtttcaactgaagtatttggatcatttggctatagcgccccagagtttgcaatgtctggcatttatactgtaaagagcgatgtatacagttttggagtggtaatgttagagctattgacagggcggaagccactagacaggtatgtgatctagattgtatccaatcctggttcgcttcagcttcgaagtggttgttgaaatagcctttggatgatcattgcagttccagagagaggtcagaacagtctcttgttagatgggctacccctcaacttcatgatattgatgcacttgctaggatggttgatccagcattaaacggaatgtacccagctaaatcactctctcgttttgcagacgtaattgcactctgcgttcaggtatattcttgatttgtgacacatgttatgttattgatctgtaatggcgctctcatggtggcctaaaaattaaaggggaaaaaatcattcgtggagaaactgtcttgcagagtagtaaaaaaaatgctaatatttggagtctactactgtgttgggtcatgggtgcttaaccaaacaaaatcattcgctgttaagttttacttgttcatttgggctcctgtttttccttaagtacttggaatacttatatgtcttttgtttctgcagcctgagccagagttccgcccacccatgtcagaggttgtccagcaacttgtgcgcttgatgcagagggctagcatcgtgaggcggcaatcaggagaagagctagggttttcatacagagtcccagaacgagaagg

SEQ ID NO: 192978 - DNA, 1492 bp, Zea Mays
gcacaccgcattcataaaaccacaaagcccattgcatatccacataatccttctcctctttggacttcatcttggctggaattgtgggttgagaacaccctttacgcctttcatcaactacatctttaggtgatttccgaagcatctccacaattgagttttgcttgcttgcttgatttgccttggtcttgattgatgttggagtcttatacagatatgttgcacgtctttgattggctgcagtccctggacttggttgtaccttagagccttgggattctataggcgcatcttgttgaacttgaacagattcagctgttgcatccaccaccattacatcctcctcctcctcttgctgctcattatcatctaggaaaatagctcttttccttctattggatttccaataatccctcatctcctttataattgcagtagtggtctttgaacatatctttgtatcttcatagccaccttctagatgctgctttagcctttttatccctctagaaactgtggtgtcacaaaggttgcatgtcacttgatccctatttttcaaatttgcccaataaccatacttccaacctgaatcatttgagctagccttccttgttttttctgtctttggatcatagttgccattgttgccagaagatgggctagccattaattgattttagttagtgctgctgctgcataaaaaataggagggtgatccaaagcacatgaggcagtaaggcaagcactaaggcagtaaggcagggacgcagggtgatccaaatcacatgaggcaggcagacaggcagcagcagcagcatgaaaaatgggactacacaccagggcagtaaggcactaaggcaggcagcagcagacaggcagcaccgcagcagtaagacacacgagggcagcaaagcactatatatcaactcaagcacgagcacactggagtgaccatcaacacctaacagactagcacaaataactagctcaagcacgagcacaagtcaaagtccaagaggcaagcacaagcaagcaggcagtatatccaagagattcagaacagagagaacagaggaagaaggtgcaagaagagtagctttgatccgatgggaaggacgctagcagggaggccgaaggtgtggatcgatgggcggggatccaatcggaggggcgaatccgctccaatcgaagggcaaatcggcgggtggaactccaatcggaggggcgaatggaggctgacggtcggatggaggcggacgaccgcgcggactgtagctgctagcgccgccctcttttgtcttctcttcctctcttccctctctttccctcccactctctcgatttggcgtgctgcaggaaagggtgtgcgcgtgcgagaggtgtacacgctccaaaagcgtgagcgcttgccgcgccctcctgtttcccgcatgcgcgcaacctcgtttcggcggtgtggcgtccgcgttgacaaatcagacgccaaggcgac

SEQ ID NO: 192979 - DNA, 576 bp, Zea Mays
cgtgctgctgctctggagttttagcagctgtgttgagtggttgggagccatggagtcacggatggatcagtacgaggttttggagcagattggtcgcggcgcctttggtgctgccatcctcgtcaaccacaagacagagaaaaagaagtacggttcaatttagttactgagcctgtttccccgtgaatttgcctagccgacagtcttttgctttgctactgcaggtatgtgttgaagaaaatacgtcttgcaaggcagacagagcgatgccgcaagtctgctcaccaggaggtcagcagaacagaaatttacacgccctttttcatttgtttgtttgtcattttgcactgtcttcggtgaactgatagagcaaatggaaattgcagatggctcttattgctcgcttgcaacatccttacatcgttgagttcaaggaggcatgggttgagaaggttggttcttcatgaacatgcttctgtatttgccttttatttggttccgtcctctgttacctcaacgcatgagttttgatagggctgctatgtttgcattgtgacgggatactgtgaaggtggc

SEQ ID NO: 192980 - DNA, 880 bp, Zea Mays
tgcgcatattgatggattctttcactatgtctggagcacatgtaagttgttttcgaccgaactgagtttaggttacatattgactttcactctgaagtcacattacctcttgagttgttcatttgagtttgagtcttacaaattggctcacatatcttgtaatctttgatatttaattgataaaattatttggaagtccactactatacaaccatggtatagattttcccatgctagttcaagtttctaatttttaatttcagtatggtgacgtgtactgtgtttatagtactgcagtattgcacatctctaccatttgccacctagggtacaatctgttgaacggttctgttgctaattatgcgatgtgaaattataaaacattatggattgcttgtctcttctaggctacccattcgtcattccttccactttgcttatctctgaactctgatggatagtttgccattgttgttttttcttcctaatataaggatacccagctctactgtatgtttgagaaaagaagcggccattgttttttttgtaactttcgtggtggtagatcatggtcatttttcagcatcttgtgttgaaatgttgaaatctgttacaaatatttgaaactcacagattcttctgacctgatttagctgcaataagtctttattactttctgcagagagacgtaattattgagattttctacgaaaggcatcttgactatttggttgatgtaatagcatcctcttgtcccccgaggagcttgtctcgaccaagatctaactctgtacgtgttggtggaaacgctgaaggacatcatatcaagcctgagattttgttaaatgtttgtgaactactgtgcttttgtgtagttcat

SEQ ID NO: 192981 - DNA, 281 bp, Zea Mays
taacaatcaagggtataagagaaaagatgaaggcatagaagcgctagtggtatgagtacaacgaataatggagttaagacaagatttgcacgtggcaaagatgaggttatgaccaagcgtgggataagtataacaccactctcgaattgagaggggagaagggaggttttaagtggcaggtatacgacaagcagcaaggtagggtcacaagggtaaaggcgatatcaaacaaaacacattaaacgatggagttgaaagttcaagcggcaaggaataggata

SEQ ID NO: 192982 - DNA, 623 bp, Zea Mays
tactacgattttctaaagttcggcaccaaatctgtgaaatgaaattcgaaaaagaaaaacttcagcacataagtccttggctgcactattcacctgagtcatgccctttgcacgtaaccccctgcttttagtcgaattgctgcaccatgtcccccacgcgatttgcacagagaagcacctcatgccttcgcgattcccagcgatgggatgctctccgacgacggggaaatggagggggagtacgagggggccagtgcgcactgctggagggtcgtagctcggtcggaggtggctggtggagcgctgcccacggctgcgagcagaacgacggcggccatggacgggagctcgcgagaatgggagggacagcgctgggagcgtggagaaggaatagagaacattggggagtgccctggcaccgtttatatagatgggggaggcagagaagggtcagacaggagggggcaatggcaggtgcgagctctgctcattggtgggcgtgggcggctgcctgccagagcaccagtctgcacagcgacagaagaaggcacgcattggacgaacgtttttggcattttctgtttggattcggacccggatcactgcagaagatttgttccttg

SEQ ID NO: 192983 - DNA, 361 bp, Zea Mays
gactttcaattggcttcggttgctgggtcgactgctatactcggttgcaggcatcttctcgtttctaacgctggccacctctcgcgtactgttgccgagcaaaccctcttgccctcaccttctcgatctcatcagttcggtggtctctcgttgttgccctcgtctctcttgcaaatggccaacttcccggtggatcctcgtcccttcctcccgccggagatcgtcattgaaaatgctcagcctgctagtggctaccagcctccctctgcccccctttgcctttcgaacctattggctcattttggcatgatcaggaggttttaaaggaaaagcaagtgatctccaaagtctacaaaaggca

SEQ ID NO: 192984 - DNA, 326 bp, Zea Mays
tgaatcctatcaagcaaaagtattatttgacactggtgccacgcattcttttgtttctacatcttgggtagaagcacataacatccccatagaatcaatgtttccacctttaagagttaattcagttgggggaaagttcagtttgataggatttgttcgaatctaaggattgaattaagggggatagacttccccgctaacctagtagtaatgggtactcaagggttagatgtcatcctagggatgaattggctatataagaaccaagccaccgtcagttgtgacaagagaacaaccaagttggtgtccccatccgaaaaggaagt

SEQ ID NO: 192985 - DNA, 365 bp, Zea Mays
ggttgatccaccactgtcgtcgtcgtcgcatccccaaccgtctccgcctcctcaaattgtagttcttattgtacatccatcatcacctcctcaaacttcacatgctgctcctcatcctctttctgacccaccgtctccaccacaagcatcgccatttagagctccaccaccttctcctcctcatcctcttggagacccattgcctatgccaccagcaagggatccaccttctcaacagacatcaaggtatccacggtcgtcaaacaaatctaaatttcctataccaaaatcggtgtccacgttcaagaaaaagaagagtaaaactactattgcgtgcacaacccaatttttgaatgggattgcac

SEQ ID NO: 192986 - DNA, 1099 bp, Zea Mays
cctatctttctcatctttgtctgtgtccagataattatgaaagttttgttttacaaagttcaggtcgaaaatgagcttcctgaaaaaattgaaagacttgtaagatgtgaggcatctgcttatcagaaacttctcatgacaagggtggaagaaaatcttggtggaattggagccgttaaggtgtgtatcatcttactgttctgagttgtgctagctggtatgttttattgatcatttcctaagtatttgaaggatttggtccttaagatactactttattatctttaggttcgctccgttcacaactctgtcatggaattgaggaacatatgcaaccatccatacttgagccagcttcatgttgaagaggtagaatacatcttccatttcttcctcactgttgttgttgttgttgttatttttgaatccttatgtttgccatcaacaatttgggttctctttatagattgagggctacctacctaaacattacctaccatctattttgaggctctgcggaaaacttgagatgttggacagattgctgcctaaactcaaagctacgggccatagggtgagtgtatctggatataatttgacttgtaatttgattgttcatttttctctctagttgctggttgaactggaatgttcttccctctctggtcccttaccttttttcgtgccttcgttccttttgtggtgattactgattagttctggatcactgatggcaactataatcttccaggttctacttttttctacaatgacaagattgcttgatgtaatggaggattacttggtttggaaaaagtataaatatcttcgattggatgggcacacttctggccatgaaagaggagctcttatcgataaatttaacgatcctaattctcaagcattcatttttcttcttaggtatgttacaattgtatcgcaagtttttataaaatgtgacgcttagcaaactcacgagtatgattgagctactgatttgattaatatttatttaaacttatttatctaatgacaaacaaatacttagctctatcggttttctacctctttttgttagtatacgagctggaggtgttgg

SEQ ID NO: 192987 - DNA, 491 bp, Zea Mays
cgcgactgtatggatagacccagatcatcactggatgaggtttcgttttgagcgagaggatgtcactattactgccagccagattcgccagctctttggttttcacgagtcgtcgactcgacttcatagcttatgctacggcacctctgaccctcctcgtcgccctcacggcggtgtggctccgggtatagctcacgtcgcggctctgttccgcccgcccttctcagatgggtcacgacgttcaccggcagatttcactacagcagccaaggtcttatttcagcttatgagacggactcttctgccgaggatgggatacagggaggctaccacacatatccagctctggctccttggtgccttggtctctcactctgagtttgacgttgttgatttccttatttgtgagattgaggacaccgtattggatggtatgcatgctcgtcgtcagctgccatatgctcactacttgtgccacatttttgctcagc

SEQ ID NO: 192988 - DNA, 326 bp, Zea Mays
cttgaagggtctaatcatgtccagtccccagcacgcaaatggccatgttacaagtatggtctgcagctgctgtgctggtaaatgctattgctttgacaagaattggcaagcttcacatctctggactaactcggctgtatcactctttgctgttggccaatagaaaccagacctgaagactttcccaaccagagttctggatgctgcgtgtattccacactgtccggcatgaatctcatctagtagctgtctcccagtagtcgaggaaatgcacttcatgaggactcccgttgcaccccttctgtacagtgcgccccctatgaggg

SEQ ID NO: 192989 - DNA, 604 bp, Zea Mays
gccgggggactgcgtccggtacacgacgtacgtgtcgcacggcgacgacacgttacaggcgaatcgcgcggggacggtgtagttcgtgctgtcctgggcaccggcccgccggaagccgaggaggaggacgacgaggagcagcagcaaagcgcggcagaaatggcggggttccatttcgctcggtgtcacgggctacttttctgtgagctccttggctatgtggttgtggagcggtgaggcgatggtatcttggttaaactgccacagagagtagctaacacatgcagtccggcattccaaggacgagacgagagcgttcaagtcaatagcgcggtggccttttgtcgcggcccgggtgctttgattcggtcctcgtagtctggctcggcgatgcagatgccattcgttgatcccagcctgcactaggcactagcacgtattactttatacgagcaggcatgatttgatatgaattagtacagatgtagccgcctgtttagtagggtgcagcccgcgggacgaagaatgcaacaatcatcttttgaaggttgctctcatggcgattgcttgcatccggaagaccggaacaacggaacggatctgc

SEQ ID NO: 192990 - DNA, 407 bp, Zea Mays
gacatttgcaccatgggctgctgtgaagattgcatctgtgttgactgcaacaaagtttgctgctgctgaatgtgtggttgcatacgtgaattctgctgcaatttctggttcatcaacaatttctgctgttgatacataaactgattatgtgcttgctgttgttgttgctgctgctgcctacctgccatttgtctttgtgcagcatacatatcttgtggagtaccttgtgctaaaccattgttcatggtattttgtggcatgccagacagattctgcagcgtcaatgtctggctgacactcgacaagttctgaccaacactaggaagagaaccttgaacggatgtagaagcatttggctgccgtgtctgttgctgagacatcaacgggatagctgatgactgtgctgg

SEQ ID NO: 192991 - DNA, 3722 bp, Zea Mays
tgcgtctccttggggtaataaaatcactcccagcaataacttcaagaattggagttggaggtgccgcatcgagttgggtgataaaagaatttattgcccagatccatacagtttcaaaagttgcattgcacaggaaatcaaacctagcctcttttcttgaaagtcacggtattaattgtacttctgacttgtttaactaaatttgtatgcttgactattgcatgttgacttttagaaggtttggatattctattaatgctgtctgtttttgtttcatcttttgtatgttttttttttcaaccacacagaacttcacatctttatattaataaggaaaagaaagcatccaaaatagaccgtttacaagagagggtacatacacccatgttgtttttgggattagatatttacattaatttttaccaattagcataatggcgtatgttgcatttatgtgagttggagaatgaaaccctaaccctaactagggttgggactgatatatatatcaatagttgttggccctggcccattacacaagggtgtgacagtaattacaaggggctaactccaaaaccctagacaggtactctaacaatgtgcccccctacatacacataaaaatcattttggaatgtactgattttttcatcgtgtcaattatttgccttcttttttatgtttttgtatttgcctcctttatttctgttctggagataataacctgcatgcttagttaagtttcgtgagaaggtaggctagatgattctgtaggttatccttcttttctaacatgtgtaaacatgagtagttttacagtttaaattacatgaaactgcaaagatgtcacatcaattattctgctgccgctgctgcttttgttgtttttgatgtgcaaccttgccaactttactctgcaatctacatttgtatgattgtatctactagtttgagcatagaacaccgcaaatgtttagatacaataatcaagtgctgaaatgtgaaacatttctaatttaaaatattttctaacattcaaattcaaatatttattataatgactatattttgcaggtacagaactagtcgatggtcttatgcaggtattctggtgtatattagatttagacaggccggacacacagacaataaatagtcttgttgtgccttgtgtggaatttatttatagctatgctgaatgcctggctttgcattccaatgaaaaaactagtgtgtcagtgggacctgcagttgctctgctgaaggagctgctctttgcaccatatgaagcagtacagacatctagcaggtgattttctcttctactgttcatacatcagtaagagtaccacaattaatatttgctagtttttcttttgtttttgtatcattttctcacttgtgttttattgctgctttccagtttggctatctcatcccgatttcttcaagtccctttccccaagcagacaatgatagctaatgatgatgctcctgaaaaccaagctaaagcaagtgcttctgctatgaattcaaccagtgcaaactctcaggttatgattgaagaagatcctgtcacatcatcagtgcaatattgttgtgatggctgttccaccgttcctatacttcggcaaaggtggcactgtagcatatgtccagattttgacctatgtgaaacttgctatgagatacttgatgcagatcgtttaccagcaccccattctaaagatcatccaatgtcagcaatacctattgaagttgatacatttggaggtgaaggcagtgaaatccatttctctgtcgatgagctaacagattcaggtgttcttcatgctgataggagtgttcagacctccccatcatcaattcatatatttgatgcaagtgagtctgcagacttacctgagactattacagaccaggcaactgtttcgatttctgcatcaaaacgtgccattaactccctggtacttaaccacctaattgaagagcttagaggctggatggggaccactgctggtactcgagccatacctttaatgcagttattctacaggctttcttctgctgttggtggtcctttcatggatagttcaaagccagaaaattttgatttggagaagtttgtgaagtggctaatggatgaagtcaacataaataaacagttccctgccaaaacacgatgcacatttggtgaagtattgatccttgttttcatgttcttcacacttatgttccgcaactggcatcaacctgggagtgataattctcattcaaagtcaagtgggagctctgatttgacagataaaggtcctgctcaggttctgggatcaacaacaataactcttccgtcatctagtgctgacctggataaaaatgagtttgcttcccagttagtccgtgcctgttctgccctcaggcagcagaaatttttgaattatcttatggatattctgcagcaacttgttcatattttcaagtcatcatccataaatggagaagctggttcttctggttcaggctgtggatccctattgacaataagaagagagctgccagctggaaatttctctccctttttttcagattcatatgctaaatctcatccaactgatctgttcatggactactacaaattattgttggagaatactttccggcttgtatatagtatggttagaccagaaaaggagaagtctgctgagaaggatagatgctacaaggttcccaacactaaggatctaaagttggatggatatcaagatgtgctttgcagctatattagcaatcctcatactgcatttgtccggagatatgcaaggaggctcttccttcatttatgtggcagcaagactcactattacagtgtgagggattcgtggcaatgttcccatgaagttaagaaacttaataagatcataaacaagtctgggggtttcagaaatcctgtgccttacgagagaagtgtcaagctcataaaatgtttatctactctttgtgatgtggctacggcaagaccaaaaaattggcaaaagttctgtttgaagcacatggatcttcttccatttctcatggacaatgtttatcatttcagtgaagagtgtgttattcagactctcaagcttctaaatctggctttctattcaggaaaagatgctaatcataatgcacaaaaagcagagactactgatctaggaggttctacgaggactagctcacagtctccagatatgaaaaagaaccggaaggctgatgatggttctgaaggttcctcagaaaagtcgtgcatggacatggaacaggttgtagagatgttcagtgataaggaaggtgacatgttgaaaaactttatcaacatattcttactagaatggaactcagcaggtgtccgtcatgaggctaaatgtgttctatttggagtgtggtaccatgcaaaaaaccgacttagggagacaatgctatcgattctgctacagaaggtaatacatcttcctttatatggacaaaacattgttgagtacactgacctcatcacctgtttacttgggaaagtgaacgacttcagtgcaaagcagaatcactctgaacttgtgaataaatgtttgacatctgaggtcataagctgcatctttgacacactccattctcagaatgagctattggcaaatcatccaaattcacgtatatacaacacattgagttgcttagtggagtttgatggc

SEQ ID NO: 192992 - DNA, 553 bp, Zea Mays
caacgcttccacgccaatggcctcaaaggaaaaaaaagcaagcacacatgcttcccccctcccccaccccacctcaagggctcaaaaaaacttatgcacaagaataaaaacgaggagcaaaaacaaaaaaaatagataaataaatgaagagttccctcaccggatcaaccatgtcaacacacgctggagccccaacgccgtgggctggagcagtagagccacccacttcgccacaactcctccgctgacagcaaccatgaatctcgtcagagccacctccctctccacaacaactcatcatggaccagcacgagatcaggaaatcgccaccggggagccgactccgccactatgcgtcacagaaatcgcctttctcatctcctatcggagagcccgccgaccgccagcaacacgaacagcgcgagcagcagggaaaaaatcgtcgcaccctcccccggatagcccgacggctgccagcaataaaggagcagaagaaatggggagggcggagacctcgccggcaaacagcagcacgtcgtgggaagctctatcg

SEQ ID NO: 192993 - DNA, 949 bp, Zea Mays
gttcaaactccgagtatggataacgagtgagaccaaaagttagaatagcaccagaaagaaggctaagttgcccttcgacctgaaaattataaataagaagtcccatacttcaaattttagaaagaaaacatgatcaaccctaatataagaagcaactccacaataggcttatttctcattatagaaaagcaccatgcatgacttatgcaacttatatgtgacattgatttatggagatgtaaagagcttcagttacaacagagtacaaaaaataaatagaacatcaagactccagtatgtgcagccatatagtcatcagatttgaaatgtaaaatagttgaggtttcttttttgttcgacattatatgagaacatcacatctacactttcgtactttgcattgtgaacaccacatgcacttccgtaattcaccattgagacattgccacattgattcgtacagcctatgtttacaaccaaaatgcatatatgtattcataaaggatatataatttgacgatagactgaagagcaggaaagcataagactatagacctcaacaagaaaatgtcagaaaaccaattaaatgttacaaaagacatcatggttggtacttggtagagtgttaatcaagatagcattacaaagccacatacctgaacgcgactccagagcaaggggacagcaactttggcacgatttcttacaaaaacatttgtccacagtggttgatttggaaactccaaaagaagagtgtctgtttgtgtactcagattgttgttactgacaataagactttttggtactgcttcataaagagttccagcagctcctgcattatctggacagcctgaactccttccccctgaaaaaaatgacagacattaatttcaaacaaaataaaacaataaggtcatctcatcttaacaataactttagacgtgtggtc

SEQ ID NO: 192994 - DNA, 359 bp, Zea Mays
ccctgctttctgatgaaacagcagaaacctattcatggctacttaagtcttggatagcatgtatgtacggcaatcttccaaaggctattgtcactgactattgtaggggcatccaaagtgctgtagctgagattattccgggagtccgtcatagaatgtgtttgtttcagataatgaggaaggccgcagaacgtttaggtgggctgtcagagtacagagctatcaacaaggcgatgcataaggctgtatatgattctttaaccattgatgagtttgaagaagaatggaatactttaattacatatagtgggcttcagagcaatgactggttaagatcactttatgaatgtcgatcttca

SEQ ID NO: 192995 - DNA, 438 bp, Zea Mays
gcagctatcaagtacacaacttagagggttggtcaaacgggacgttgtggaacagctgctggaaatccgagtggcaacccagactgacaattcaggaatacccccggtgattgaacaactggtgggtcgttatcaggacctgttccagaaaccaaaggcattgccaccaaaaaaggtccatcgatcactctatccctctaataccgggtgcacttccatttcggttgaggccctatcggtataccccacagcaaaagtctgaaatcgagaaacaggtgaaggagatgttagagaacggaatcattcatcccagttcaagcccgtttgcctcccctggcctcctggtcaagaagaaagatggagaatggcgaatgtgtgtggattatcgacggttaaacacctataccgtcaagaatcggtacccgatgccattatttg

SEQ ID NO: 192996 - DNA, 431 bp, Zea Mays
tcaaactatataacttcgctaatagcataatattatgatagatatcatacataaagatagagatgactaccttccttgacacatacatcatagtggcatacactaatagacacatagtcactcacattataatataacatagacagtagaacccatcttagaatccaagacaaccatacaggtgacaggctcgtagcctcacattatagaacattagaccattcaaagatatgttgatgatagttgacaatgcttgtccgcttgaggctatttgctacaaaccctagataatttcgctacctacagttgaacctcaggcaagtcatcatcttcagcacccacgttgtcacctcccacgtccaagaatgcatcctgtaatttgcatgataaatataggtcggtacactatatactaacaatcaataatccaa

SEQ ID NO: 192997 - DNA, 315 bp, Zea Mays
ctggatcatgctccactgatgaatgccccgaaccccaccgtccagatctcccctccggaattaggcacaggcctggaatctaaaatggatgccttctttaacagcatctgcaggaagccttctggtatcttgccagccccaaaactcataaggaaatctcgtttgtcttcccccacaccaccagttgtatctgcacctagaagaagtcgtcgggtggcaggcatcggggtcgagttcaacatgcaagagctgggaggcaggtccatcaagaaggttatgaaatccttgaagatcatctctaactctgacgatttt

SEQ ID NO: 192998 - DNA, 462 bp, Zea Mays
caggaagtcgtctttatcagtgccattatacaccaaggatccttttggatacttcaaatccctggcatagtgcttagcttcggcaatttgctcttccgacaactatttacccgaagcatgtcgcatgataaaatctacctcttcagtagacgtttcgggggtaggagatttaaccttcttgggtgcgccttctttttccaagatcagagcggcatccgaaggtccttgttcagtatccttttcaacagtttcaacatgccttgtttctatgggaactgaggggccaacttcagctccaacacgagttgtaacagctttgccggtctcctttatatttttctcactcatgctggacacttctgtagaggcaggagttggtacctttgtcgactccatgacaacgtctagtacgctggccattctcctcctttttggagttactgcaggaatttttgatacctc

SEQ ID NO: 192999 - DNA, 331 bp, Zea Mays
acctaggttgccatcgaggaccagttcctcgacaaccgtgaggtcgtgccctctacctcgacaatgtcttccgaatcttcatctagggcgacctctccgtcaccgagtactatcgccagatgaagggcgtggccgatgctctccgtgacttcgatgagcttgtcccgaccgtaccatcgtcctcaacctccttcgtggcctcaacgagtgctacgaccacctgcaaacttggattgtgcgatatgtttcgttcccctccttccaaaaggtttgaaacgacctcctccttgcatagctcactaagggggcctcgattccccctaccccacag

SEQ ID NO: 193000 - DNA, 637 bp, Zea Mays
gtaggggcaggcgcgacgagcgcaaggagagacaaggtcggtgtgatgggaacaggcgtggatgatgcgtggagataagcaccggtgacgacggagacgggcacatgcgcgtcggtgcaaggggatgcagactggatacgactgtgacggtgagggcccaagcgtgttcggcccacgtggccatcgaccaagcgagcggaagatgcatgggtgaagttgacgttggcggcggtagcgaggcacgcgccgacgcaggggtggcgacgggtgggctctggaaccatggtggcgcatgaagggagcaggaagatggcacgctcgccagagcagtggacagggtggcaccgactgtggcaggggaggctagccctaggtggcggcagtccgcttgctggagtagaggatagggcggcggcgtcggtcggtttgaagagggcggcattgggtggcggcgccgaccgtgggggagaggtcgccagtggctgtggggaaggggggaggaacaccagtcgccgtagaaggagatcccatggggaagaaggggggcgcaaggttgtcggcatgcgtggggaagagcgcagccttggtcgcgtagagtggagaggcggcgccgtgggggagtcgccacggttgggaa

SEQ ID NO: 193001 - DNA, 322 bp, Zea Mays
ctcactctgagtttgacgtcgtggatttccttatttgtgagatcgaggacactgtattggatggtctgcatgctcgacgccagctgccgtatgctcactacttgtgccacatttttgcgcagctgattaggcctccccagtttcagggcacacttgaggcctcacgccttgtctttgggtcctaccgtcctgcgcctgaggctcctgtgccagcgtctgctccagtttttgactctcaggccgaggatgctgctcttcgtcagtttgaagctcaggatgcagcagttgatgatgatgatgatgatgatgattttggggttcc

SEQ ID NO: 193002 - DNA, 333 bp, Zea Mays
ggtcccactattttgaccgtgcacaataaataggtggatgttactgaacttgtatatctctatgtgtgcatcttctccaccaggccgagatcagaaaagcctgaaccttcttgacggggagccatcttgacgacacgtgggaggggcagacactgcacaggacgctggcgcctgacacatgcaaccccgtggatcaactcttctttcattatcttttctattcagttcattgaggtaatcaccattctttatgtttgtttctaacagctcaatcgatacaacattgtcttctaatggactactaattcaaacctactacttggtagatttctt

SEQ ID NO: 193003 - DNA, 1369 bp, Zea Mays
agtgatttgaaaaggaatgctaaaggtaagctacaaatattttctgtcgtgaatgtaaaataaatacaatccatgtcatacaaaatgtgctcttgcagatgaccaagattttgagagactgcagaaagaactagcaagcttgtcacaggaaaaccaagacctcaaggacaggatctcgtccatgttagagcaaggcaacaaggctgagtgcgagatccttcgcctcaaggagtcccttgctcaacaagaagcagaaaaggagtctgcagtttcactatgccagcaatcaactgctagactacaaaacctgaagtctgaaattatgcatacccaggagaaattcaacaggctgaaagaagagatgcaaactgaactacaacctttgaggaaaggagatgaacatttatttttacttgaaagagctaatcaggacttgcacttggagctagataacctgaaacttctgttgaaacagaagcatggcgaagtaaatgaaaagcaagatgagttggaaaagcttcatatctctacagaagaagagcatctcaagcgtatgcaagcagaaatggcacagctttctttggaaaaacagttatcactggcacaagacaaactgaggcatttgactcttgagaagcaggttgaagcacacaagataaaggaggtcgaaacgagcaaagttgtgattcagaaagaactggagaagattcttgaagagaaccaaaggttgaatgaccaaagtcactcttcttcagcagtgataattcgtctgcaggatgagataatttccatgaaaaatgtgcaacgaagattagaggaagagatttttcagcatgtggaggaaaagaagacacttcaacatgagctttcttatcttaaagaggataggagtgacttggagaggaaacactctacaatcaaggaacagataggatctatgaacttgaatttggaatctctacaagcactagcacaagagctgagggatggcaatgttgagctgaaagagattgtcaagaaccatgagagcattgaacttgtgcatatcgataacctaagaaagttggagaggatgtcagagacaaatgcacatttagagaagtctttgtcagctgcaacaactgagcttgagggactgagggagagcaaggtggcattagaagaatcatgcatgcacttcagatccacgattaacactcatcagtctgagcgagctgtgcttgtagcgcagattgaggtaatttctcagaccatggaggagctactggagaagaatgttttcttggagaattccttatctgacgctaatgctgaacttgagagtttaagaatgaagttcaaagaactaaaagaatcttcagaagcactc

SEQ ID NO: 193004 - DNA, 1271 bp, Zea Mays
ttcttagtggcacctgaatctcttcgatcaaccaccttttgtttcactgtttgattctccatactggtattacattctcccagctcagcatggtgaccttttggagatactgcactgctcactttccttgtatagtgagcaataatatctcccttcctccctctgcttcctagtgcagtctcattcgtggtagttttgcataagcttccagaaacttctctctgtctaactgtagctgatctcgtaactcgcttctcaaaccgtgactcctcttcacatgtcccctgctttgcctcacatgattttctacctctccttgtaaaaacaatgtcatgtgccgaaatatcattggtttcgttcacagggctgcccctctcctcctgcttagtgtacccagttcgatcagtgtggttatcagctgcacatcttccattcccagtcaaagaaatctcagtttctgtacaagtgtcctcaatttgagaatgattctcaactttcggatcaccactgtggagtatcactccttcagtatgaaccaaattattctcctgcttactatcatcctgcttaacagattctgatccactggtagggctggttttggttaaatctgtacttgtgttggcaccattagtaattgctgagtctatgacctcatcctgacaaggcccatgtctcactttgttatcttgggcctcatcagcattataactgtttattccagcttgggagtcattctgctctgaatgagttacagcggacacctcatctgacttgactgtcttatcatctgattctgcaatgctaccttgagctaagccaccatcttgagaaaaatctgttgcaggaacaccaggcattcccatattattatcagaacacctagttgattcttccgaaacatcgctcgcatccaagttaactaatccgttggcttccccaccattgcaggcaacttccatcagcacactacttttgcaagcctcagcctccacagtagtgtcacagtgtttcctctccaaactatcagttttgctaacctccacacccgctccacatggtgcctcagcctcagcacgcagcttcatggcgtcggacctcaacacccttcttgtcacattcctgttgtcatccgcggaacccctccggtccttccttttcttcccagtcaaggcaggccctccgccaggatcctcatcacgagaagcattgctttcctccaaggaggcaggagctttcttcaaatcctttgccactcttccttccgttcc

SEQ ID NO: 193005 - DNA, 350 bp, Zea Mays
cccaagaagcagcaacctcttccataaaacccgggagtttaggccaaaagctctcgaaatgaaatctacgcttccctttaagatccaaactgagtttaaggattagaggacaatgatcagaagtttcagatgcactgctgtaaagaaagcaatcggggaaagcctcctcccaacaggtagaacagaaaacatgatccaacttaacaagagtgggattttccctctggtttgaccaagtaaatctcctaccattcaaaggaatctccttcagatccaaagagttgatcaaatctctgaaattgcccaataaagccctattgacatttgagttattcttgtcctctgacttg

SEQ ID NO: 193006 - DNA, 310 bp, Zea Mays
ctgcctgcaccttctatcggtttctcgaggattcctcgtctggcccaagaagcataaagcggctgcttttgttggtttcccggcgatccggggagcgaacttggctcaatcccgccttctggaagcttctgtgagctgccacacctcaggacggaattcagaaatggggtgaaccgtgaacccagcccaacaggagttcttcttgctcccctgctgctgctgaccgcgtggtctgttcttccgcggccttgttgcttggagaggcagcagtgacgaggattgggagagggagttggagttggaattggaa

SEQ ID NO: 193007 - DNA, 683 bp, Zea Mays
gttcgaaccgttctttccctatctctctcgcacagctggccgattcaccaaattgatgtcaataatgctttccttcaggggaccttgtcagagactgtttattgtgttcagcccactggttttgaagattcccctcatcctaattattgttgtctcaatcggtcactttatgggctcaaacaggctcctcgtgcctggtacagcagattcgcttcccacctgattcaaattggatttgttgaggccaagtctgacacttcattgtttgtctatcacaagggtgcatatatgatttacattcttcacgaggatgacattgtgttaactgcctcgtccatgccccttctacgacgcactattactgctctccaacaggagttttcactgaaagatcttggtcctcttcatcatttcctgggcatgcatattcaacagtctgcttctggcatcactctctctcagcgccagtatatgattgagatacttgagcgagctggtatgagtgactgcaaaccctgtacaacccctgttgatatcaaccccaaactctcagctgatggtgaccctgtctcagatcccacggaatttcgcagtcttgcaggcgcattacagtacctcactttcacccgtccggatattgcgtatgcggttcaacaagtctgtctccacatgcacgatcctcg

SEQ ID NO: 193008 - DNA, 442 bp, Zea Mays
aatttttatccgtgtcattttgtacgctagaatcaccacacacaattaacaaacacatccaccacaataatcggacccggtacatatacatgtatcgatgcgcccttcacacactaatttgcattttagcttagacatcatatgaacactactactttttacccgcgatcataaccatgtgcaattgggctacaacatgcaattcatcgtgaccatgaacttaactaaagtcatctaacaagttgattaacctgagcaacaacctaggccgctatacaacatactcgtcggctagcctattattatcgaaatctgagacacaacatataccacaacatttatataaacatacatattcacatgtattttcacacatccacaaaatcatacgacccgtaaaccactattctctaactcgaaaccatcatgtgcttacttccca

SEQ ID NO: 193009 - DNA, 326 bp, Zea Mays
gcctggcccacctggcagctgggcatctaacgggcgagtgagagcacagagcagaagcggcgcgcgtccatggacacaaatccccaacggtcacaaggacggacggatagacacacacacaacagtataaagagccagctagccgttacacatcgggaaacagatccgccatacgcccatcccatcccctctcctcactcagctctcctcgcccaaaatctccgccgtctgcagttccggttgcgagtccacacagctcatcacgcttccttcacaaatcgaacgcagccgccagccggatgtcgattgcggcggtcagatcctcg

SEQ ID NO: 193010 - DNA, 412 bp, Zea Mays
tgcgtgctatagaaacgctcaaggaaagcatcttgcatttgttcccatgttctaatggagcccggtgccaacttactataccatgtgaaaccaggtcctaacaatgtttgtacgaattgccggaggaggagagcgccattatgggaggtgtcttgacaagcagctaagaaatgagccacatgttcatgtggagatccagttccattgaacttactgaactgtggttggttatagttgtttgggaagggtaccatgtcaacttctggtggatatggtttcacataccctggacgcatggaataatgtgtttgcatgtattgtgctctcacaccctcaaaaatcattctttgtatcgcctcaagagtgagtgcaggttcagaacgttgttggttatggctggtagaggcatccc

SEQ ID NO: 193011 - DNA, 673 bp, Zea Mays
gacccatatcctgctataaacttgcggtaataccctgtgagtcctaggaaactgcggagtgctcggatggtcctcggtatgggccatgattcaactgcgtccaccttgtaagggtccatggcgaccccctgcgcagagacaatgtgtccaaggtaagtgactgcagatttaccaaataagcacttggacttcttaagaacaaggttgttgtctcacagtaattggaatacttgcttcacatgttgtaagtgttctgtccaagacaagctatatatcagaatgtcatcaaagaataccagggtgaactttcggatgaaaggcttcagtatatcatacatcagagcttggaatgtggatggtgcattagtcaggccgaacggcatgactagaaattcaaagtgaccacaatgtgtacggaaggctgttttgtggatgtcatccgggtgcatcctgacttgatgataaccactccggagatccagctttgtgaagaaacttgcacctcggagttcatcaagtagctcgtccaccaccagaattggaaatttgtccttgattgtttttgcatttaattcacgataatcaatgcaaaacctccatgttttatctgccttcttgaccaataatacaggtgacgagaatgctgatgtgcactctcgaatgatgccttgtg

SEQ ID NO: 193012 - DNA, 343 bp, Zea Mays
cagaaaaactgtgtcctaaggcctacaaaatcggaagtggctttctgatatagtaggggctctaacagttattagtggaatatctacagctctaaaaccttttggatattttgcatctgcagcaagacataccaaaccagcattctcggcgtctatccaagcatgggatttattctagaaaatatgtagaaacgcatatggaagacatgggctccattgaaatgtactctcttcatctggctggctgacagttatggctaacagacttgcaaaaagaggactatctcatcttggctcttgtccgctttgtgattagaccatccaacactgcctgaccacctgc

SEQ ID NO: 193013 - DNA, 304 bp, Zea Mays
gctgctgctgctccgaagagaacagttcgagttctggataccgcatcttctgtatctgctggcttgtttgatgggttgccacgagaagacattagtgctaagataacacctactttactaaaaaatctgggcagtccggactggaaggtagcggcctcttttaatttatttgatttactttgcaagtgtcttgtattttatttgtgatatttgctattatgcttatatgtgaattgataggtacgattggagtccatagatgcagtcaccaaaattgtggaggaggctaataaacgtatccagc

SEQ ID NO: 193014 - DNA, 315 bp, Zea Mays
agaagcgtgagggtctgagggagggggcacaggagagggacgagaaacaacccccatggcggatgtcctcatcacacgttgcaactccaatccgcaactgaggcccccacggtcctcagcacatgctccaacttcaacctataaccgacagggaccgcaattgaggacgaaaaattgagagggaggcaggaggggtgcatgggggagagaggagaaacatccgaacatcccccatggccgtcccgtgcggaccgccccacagattgcgataaggcaacgacagtttccccatggcgggccctgtgccctgcaaat

SEQ ID NO: 193015 - DNA, 275 bp, Zea Mays
cttctacatctgggacaatcactttgctgctcactcgttcctgtgcaacacgccattgtttcttcagttcggatgttgccgtccgttcgcatctcctgattgtggagcaccagcgtaaagcctacacccgtttcctctcccatgcatgttcgactcttctccttccttccccttgaaccgtccgttcttccccatcgccattagtgccattaatggccgccgcccttgctcttcctctgctcttcctcgccaccgctggaggacatcattcctag

SEQ ID NO: 193016 - DNA, 306 bp, Zea Mays
gcatcactaacatgtaatggtgctaaaacaagaacgagaagggaatgagcagacctggggaaggctggccgcggtgaggtgagttcacggtggcggagagtggatttggggcgaatccaaaattcgcgagttctagcgaaggactgccagcgattagcggtggctgggtggatgatgatgttatgcagctaggggagggctcaatttataggcagcttcgacggtggccgggaattttaacggcgatgtgtggcggtcggtgataagtaaaaaatcgtggtgcggtggttgcgtgtctcgtgtcgt

SEQ ID NO: 193017 - DNA, 417 bp, Zea Mays
gctggatgggagctgggacaggaggctgcatgagctggtgtttggtaggctgaacggggttgtgcgccatgctggcacactccttaaagcagcaaatatgctgcatctggggaaatgcaaataaggtctgtttctactgggccaggctcgctagcgtgcaaaggatggatggttgaatcaccacctgtcactttttgctttgtttttttcttctcctctgtaagcgcttgtccatggtggacaattggatgtcttgctcgtcaactcacttctccggtcctccctctctctcttgttgcatcctaccccaaccctctacacgtgactgtgcagtggccgagccaggcatagtcctccatcggcctcaagctcgcagtctaggggagttcatggagggcagacatgatggggtcggtt

SEQ ID NO: 193018 - DNA, 283 bp, Zea Mays
ctggcctagcgaggacgcttcgggcgagtgctatcagatctttgaatgtccaaggtctttccaggctctgggataggcgctacaactagtatttcagcagggaccgaatcagaggaatcctcagctaacatgtctagcatatcacttatttctgcgtcgctcgggtttataggcatctcaaaatgaacctgcctctcgtcattggggatttcaccaagcgaagcaaccaaagcctcaacctcttcgggagagggtcgcactctaaggcccaaaccactgtcac

SEQ ID NO: 193019 - DNA, 625 bp, Zea Mays
attgatggtagttctatctacaaatctcaagctggagggtatcatatagggattacaaatgcctttgctgctcctgcattcaaccaagaggaaaacatttccaggcacagtgagaagccacgttatgcttttgatattggtacacaaaatgtccatcctgacataatccagcaaccacccaatctggctgtccagagcaaccttatagctcccattgaaccacctggttctaatgaaaaggttactgtgctaccatctaactctggtgctcaggttccttctggatcacctgtacagcgtcctaaagaaatggccaatcacttggtttcaattccccccaatggcagtaacaaatttccattgcagtctactgttggtattgatcgtgttgaaggtacacaggaaccggcttatgcagattcacttttctcaaatcaggatccttggaaagcagtgggcaatgcatctttagtgcctccaagaccaaacaagctaactaaggagtctgttgtttctggaggtcaatatattgatggccatatgcctgatatgaacatgcatgctgccataccctcagaagaagactcatgttttaaggatatgcacacagttaaattgaacaaag

SEQ ID NO: 193020 - DNA, 523 bp, Zea Mays
aaccggtatgcgatcagggccgtatatcagccgatccacggttatcgtccatcggaacggaaagttatgaggttctaatcccatccatccatacacagatccatggccaccacgcgcctagctgaagcgatgcgcccaattttgatcaggatcgtgcatcaacacatcaatggtctcggtgtttcccccctcccgcgacggccgaccacggaggagcagaggcctgcggcggcgtgccattgccgaccaacgccccaagcggcacccgatgcaagaacttcaaacgaactggtgctacccaagcagataggtaaggcgaactacatggatgagttctcacctgctgccgatttgtgaaggagctcggccacgccgtgatgtggccctatggtcaaacccaaagattgcgagcaattccgggctcccccgcacggataacgcacacccacgcgcggcgatcgatggtgacaagtccgaccacaccaatatcgcactggctcatgggtagccctcgcctccctcg

SEQ ID NO: 193021 - DNA, 313 bp, Zea Mays
cttcatcagttgtatccaacagttctgacattagcctgtatctatgcggcccttgatcagaaaaagctgaatcctggctcggtggtgtgacaaaaacatgcccttgtgcaacactcgactgtggtgtgacaggtgtgccaggtgcagcttgatcataatcagcagcacccccttgatcttctgaaactgcatcttcagctgactgttctgtgggttcaggatctcctattgtagggttactgtcagaatcttcataatgaacaataaactctcctgacagctgatctgtgttgcctgctgcattggcccagtc

SEQ ID NO: 193022 - DNA, 302 bp, Zea Mays
cttgcaatgtgctctgccgcagccttgtcatccgactcttcttcatttttatgtacctgatgataggctctctccagccattggggtctgtatctgagtgactcagggcattgcattcttccatttgatctttgatgatgctcggttgcgatatctcttggacaaagatcccaaatggagcctgggctcgactggatcctagcttcgacaatgcatctgctgctgcattgtgatccctttccacatgatggaacttcaatccttcgaacttatcttccagttttcgcacagctacgcagtat

SEQ ID NO: 193023 - DNA, 305 bp, Zea Mays
tccaaaaaaaacttgatttagggaagacttataggaagcttttgaagatgctctaaataagctagtctagccaaccatcaatgtcgattaggtcggattttataagtgcagtcagcctgtcactgtcagtacatagtaagccggcatgtccaggttaagaagacagtctagctaactttggtctagctagtttcaaccactctaggcgtcacagacagagtcaatactcttttcctttgttctaattttgcatatcaagggacagacaggtaccatgagctgcagtgcgagtttcatgtgtccgc

SEQ ID NO: 193024 - DNA, 321 bp, Zea Mays
cttaatgttgtggcgtgtgagggtgcagaaaggattgtgaggccagagacttacaaaccatggcaagtgagatgtctcaaggctgggttcaagcaacttcctgttgataaagcaatcatgaagagatcaatagatgaaaaagacaagcattatcatgaagactttgtcatcgacgaagatagcagatggctgatacaaggatggaaggggaggataatgcatgcagtgtcctcatggaaaccaaaggaatcatatactaatcagtaagatccaaatgatgatgtgatggctttcagacaatcttcagcagaacgctttaag

SEQ ID NO: 193025 - DNA, 302 bp, Zea Mays
gccaattcatccataggatgacatctaacccttgagtacccgttaccactaggttagcggggaagtctatcccccttatttcaatccttagattcagacacatcttatcagactaaaattttgccccaactgaattaactcttaaaggtggaaacattggttctacgggtatgttatgtgcttctacccatgatgtagaaacaaaagaatgcgtgtcaccggtatcaaataatacttttgctggataggattcgactggaaacataactactgccacgtcctgagcatcctggattgcttcg

SEQ ID NO: 193026 - DNA, 2971 bp, Zea Mays
tcgcgccctctataaaccaccactcttctcccccacagcactctctccctcccatcccctccctcgtcgtctcgccactcgcaacaccccaaaaacctcacgggctctcgacccctcgcgctcgcctcgtcgccacgccggcgtgaggggcgcccacccccgtgcctatataacgctgccggagcggaggtactcgtccctcttatcccgtcgcccagatctaattctgtttaacgccttcgtctccgcggcgtcagggcgatcccgccgaggtcaggttagctcctgccccttgatccgatgcgcacgtttgggttcgtggcggcttgggtgcgttagctcgcagatctgggcgtttaggaccgctcctcaccccgatctatgcgctgtggctgtggcccgcggttgattcgacgctgtgcagcctgctcccatcggtgtccgctcgccgaggctggaattctccgagatcgcacgtgtttatgttgtgccagtgtcagatctgctcatgcgtggacggtcgcagctctgcatgtctgttcctgttgctcggcgcagagggtagatttagcgcttttggatttggatttacgccatctctgcgcattgctgagctgctctgcccgcgcttttgcgctgtcgtagaaaggtgtctgggttgggtttgcgtgacctctggcgtgtgtggctggacttttgcgcgtattgggggctagctgtgggccaaatcttccgtgtacaaatttttccatgtttccctttagagaaacctgctcgtgctgagtaattcctgtgtaaagataaaagcatgatgtcatggactgagataaaagcacgatgtcatggactggcacctgtgcgcttgcgctttacattcttgccgcgagcttactgatgatatttcagttcccctttccataagtgaaacagctcctgccgtgttggttttaattgtttgacaagtggactgactggtgtcgtctgatcataaaatatgattagcggaatactttatattcaaagggaaatatttcatgtgaaaactgagattgttccacttaaatctcatatattttctgttttcgctatcttagctacttatgaaaggtaaaaatcgcaaatataggaaaaatgtgagttgccaaatatgataggaaacaaaacttaggttaggtcacaccatctaataataaatgaccatctttccttttgattgcagggtataagctggtatcatggcgtccagcgcagtagcaccaagatggttaaggggtaaggtgaaggctgtgacatctggggattgtcttgtaattatggggtgcacaaaggctgagatcgaacctgagaagtccatcaccttatcctaccttatggccccaaggctggtaagatcaagctgcacttgatgaatttccttgtcggtaatgagcaatatttgtggccttttcacagtttttatttgtttcatgaatcagtaaatcattgggttgctctagacaaactaggttattaggttgaggttatgcttgaggactaatgaatgcgggcaattctcaagtttttttggttgcattttgttactaaattttgcagttggaactatttactgagtatcaattgtagcttcttgacaattgacattcttctcatttctctagttttcatttttcgcttgtttattcatggtgctataggctcgtcgtggtggagttgatgagccgtttgcatgggaaagcagagagtttctgaggaagctctgcatagggaaggtgctacatttgaacttcatatcttctccgagctctcatatcattcattgtattcttttttttttgacactgcaaaattataatctcctgttaacaggaggtcacattcaaagtggattatacagctcctaatattggacgagaatttggaactgtttttctatgtgataagaatgttgcatactcagtagtttctgctggatgggcaaaggtaagaaccattctactttcacctttgagtttctttatcatatttactgtactaaactagatgtgttactgatttattcttctacttccttaatcaggtaaaggagcaaggctccaagggtggcgaacaaaacccgcaccttggtgagttgttgaggttagaggaagttgccaagcaacagggtgttggtcgttggagcaaggttggcaatttttcatcttgaccaacttattttgtattgaatgagatatgcttttcttgattttgctgttgtgtgcttcttatctacatccaggaacctggtgctgctgaagagtcaataagatatcttccaccatctgcaattggtgaagcaagtggttttgatgcgaagggttttgcggttgaaaataaaggcaagagtttggaggccattgttgaacaagtacgcgatggcagtactgttcgtgtgtatttagtccctagttttcagtttgtccagatatatgttgctggagtacaggtacgctactcataatttggtgttgttttcttttatgtttttataaatttaatattaattagaaataattctaggccccatcaatggggagacgcccatcggcacctactgtaattgctgaaactgatgatactgctaatgacacgaacggtgaagattctgagggaacacctgcccaactgactacagcacaaagacttgttgcatctgcagcttctgctgaaattccaccagataggtatggaagagaagccaagcacttcacagaggctagagttctcagcagagatgtaagctatctttttctaatcttcctctaatttcttggtgtgaataatttgttttgtgacttggcctaacttttccttataaaaaaaaccctaggtgcgtatcgtggtggaaggcacagacagctttagtaatataattggttctgtgtattaccctgatggagagactgcaaaggacttggcccttgagcttgtcgaa

SEQ ID NO: 193027 - DNA, 335 bp, Zea Mays
cacaattttattgctttcagtgggattgacatccttagtgatacatttgtacatcagcatataagcatcggtagatgaaaacatctcccccatggtagaactaggcgctgcctcatggtggccattattattattgtttgtgacagaaccttctgtggaggtattttgggacttctgatcatctttgtttgatgcctttcctggtttttcaccaaaaggatgcaaaccaagtttggatacagtctcatcatcaaactcccaccattgcccattgctttcatcttttatatgtgccacatagtgtccactgttagcaccagtacccttgtgaatta

SEQ ID NO: 193028 - DNA, 312 bp, Zea Mays
ccgcgacgacattggtttgtcccagcttgtactcgacggagaagtcgaagccgagaagcttgcccacccagtggtgttgtggtatggtggacagcctctgatccagcaagtacttgaggctgtagtgatcggtcttgacttcgaaacggcgcccccaaaggtagggcctccaatggcggattgcctggactaggccgatcaactcccgctcataggcggcgagagcgcggtgacgaggcgccacgggccgactgaagaaggccacggggtggctgtcctggaccagcaccgccccgaagccgtgggacgaag

SEQ ID NO: 193029 - DNA, 272 bp, Zea Mays
atttcatgtaggactgcccggagcatgtgcagatgagtgtcagcaacataaaacctcggtagaacttaggttcagagagccagcatcgcaggtccccatctccggtgggtgctccgccgcgggagcgagtcggccgccacccgtcatttgggcgtgtaggaagacgatgtatcgtccgtagatcggggaaccgacgactatgatcggtcgcacagatcgtttgggaatgattaaatccgagccgtgggtagcgaatcggagggtcataggcg

SEQ ID NO: 193030 - DNA, 280 bp, Zea Mays
gcgaaaccggatccgaacgattggagagcaccgatcatcaagtacatcaaaaatgaagaagagccagataataaatccacgaccgagcgcattgcgcggcagtcggctcactactcagtcataggtgacgccctgtacaaaagagggggctgcaagtgttttcattaagtgcattgacttgggcgctgggaaacgtttactggaggaaattcacacagggcaatgcggggtacactcgtcgtgaaggcattcagagcaggtttctactggccaacttcca

SEQ ID NO: 193031 - DNA, 639 bp, Zea Mays
gaggtttatgttggtttaggcttacgccctagtctagtgtagtgttgatcgtagtattcactaaggaacgttttacattaggtgcttatgttggaatgaggtagtggagaactctggttgaatgctcctctgccttttggccgtttgaccctccccttttatagttcaagggggttcttaaaaaaggacttgacatcctaaggagcgtgcgacctattgtctatggtggtcttactgatgtagttctcctaacatcgtcctctagttagtgcgtggtcgtacgctcggtatggcggattgcttcatctacccagtatgcgggtcactgtggcaactccggtgttgagttttcctgtagtgatgcttggcaggatccatgggtcaaagttatagcgcatcaagggtcgtacgcgagaacaccctgtcttgttgtcaaggactctcctcatcccaccagtgtgtcgtggcgttatccaaaacaatatttgtgtggcaacgtgtcatatcgtgaccagtgtgggggaacattacctgctttgtctccacgtcagtcgggtataggcgtgctccggacccatgcgtgtggtgtcggggcccacagatgtactagctctcgttcgtgggccttgtgcttctttg

SEQ ID NO: 193032 - DNA, 766 bp, Zea Mays
gatgaatcccgacggctgctgcacgtagacctcctccttgagatccctgttcaggaatgcggactttacatccatttgatgcacttcccactcctcggtggccgccagtgctagcaggaggcgcacagactccatgcgcgccaccagagcaaagacctcctcgaagtcgactcctttctacacgtagcctttcgtcaccagcaagcaaagcaccatgcgaagaagccattgggccccataacccctgcaacaccgagcggaaaccaatatttccttctgttggttgacgattatagtcgatacatgtggattgctctccttccctcaaaggacagagcagcgactgcaactaagaggatacaggcagctgcagaaagaaagagtggtgaaaaactaggagctttgcacactgacagaggaggggaattcacagctggagaattcactgattattttgaagagcttggtgtgcaacggcagatcactgcaccttactgtccccagcagaatggtgtagttgagcgccgaaatcagtctgttgtggccacagctcgctgcatgctcaaggccaaatctctaccaggaatgttttggggggaggcagtgaatgcagcggtgtacctcctgaatcggtccacatccaaaagcactggaggcaagaccccatatctgctttgggccagaagccctccactagtacatcatctgcgcacctttggctgtctggcacatgtcaaggtcacaacaccaaatctcaggaaactaa

SEQ ID NO: 193033 - DNA, 355 bp, Zea Mays
ccgcagaggttctcggattggttcatgtctcacctcgtgtgcgaccttcagaatctttatgggccttagcttatgggggtccaatggctttacttccactaaccataggcaatgtacatgtggacagccttgagcctgcacctggggacttgccatcgtctcttgctaccatttccctttctgccccagttttcaggattatttcccaagctattcaacaccctggaaataatgaagaattatgccgtacatttgcaccagagcttttatcacgtgttttacattatgtgttgcaggctcttccaaagttggaaagtggggaagaggttctgactgatgaggagcttgttgctgc

SEQ ID NO: 193034 - DNA, 502 bp, Zea Mays
ctgactgctataccgtttctactgcagaggatggcgggtttatatcaagaaaggtcagggtttctttagcaaaagactcgaccgaaggggtatcctggcattctgaccgtccgatcaacacccgacggccaagataaaatctatgcgatacataaacatgtaatccaccacgatcgtcagatccaaaatcaacggatgaaggacgactccgccccgatctgacctaaaccgttcaccgccgcatcaacgctccagatcaaaccaagcgaacaggtacgcctcgatctaatcctgaccatcctgaaaccttctgacagcgcctgcacttcttccctacagcactactcgccgaccacgcacatacaggggagaacagaccccgacggcggcgccatggccgaaactgtccaaaccccgacccttgcatccaactccaatctaaagaaagtaacatgaagcgggtgaccacatgacatcatcgagaggcaactcaccaagtttc

SEQ ID NO: 193035 - DNA, 634 bp, Zea Mays
atatgctcgatcaacggctctcaactgtacctcagcatcagtggattagtaagctatttggtttcgacttcaaggtggaatatagggctggccgactaaatacagtagcagacgctcttttgcgcagggaaaccaccagtgggtcggtctatgcgatctcaacaccaacctttcaactctacaaagacctccaacaagactgtgcaagcaaccaagagtttcagctcctacacaatcagatcaacacagggcagcagggtgcgccatggcagatcagagagggactcataatgcatggcaatcagatttttgtaccacaatcttccagcatacttcctgctatcctgcacacagctcactccgcaggccacggcggcatccagaaaaccctgcaaaggttgaggacagatttctttgttcacagggacagggcactggttagagattgggttcgttcttgtgcagtttgccagcaaaacaaaacagaaacactccatccagcaggactattgcaacccttggaggtaccagctcagatttggtctgacatctcaatggatttcatcgaagccctaccaaaggtatatggcaaatcagtcattcttacagtcgtcgatcgattctccaaatatgc

SEQ ID NO: 193036 - DNA, 362 bp, Zea Mays
catcgaaattgctagcttcctccggtggtatatattagttgagcttcacagtcctgcatatgcaagacgatattatggcacatatgacatgcttgaaaacagtatgatgaaagtagggttttcttcccttttcaccttcttggttctttcattcgctgtctgtaactttgcagtgtttatgtatattgttgtttctgttcttgacagttggttggtagggaggatggggatgaagatggatttcgactgtggcagagtttaacccggcagacagacctcactgctcaattgtgttctattatgaaggatgtaagaaatgtaagaggtagcgcacaaaagaaaattgaaaaattgaggcagct

SEQ ID NO: 193037 - DNA, 473 bp, Zea Mays
gtctgttttgttttcgatccgattacagcctaagaggaagtatcgatggatctcccacctaatagaaacatgacttcaaaaccaataggcactagcaaacttagagctgtaaacagatatacattgactacgaaagcgttggcgaacggatactgccgtttgatgtcgacatgcctccctttccagtgaaacctccaaatcgtgcgcaacctcgtgtcaggccccagccacttcgcgatacgcacctgcaagataaagatgcacatgtatacaactaggaacccgtaagttagtgcccttgttgtcgccacggaaaacagagccgcctgaaaggccagcatcatgcagacgagcgacacccacagcaggtgcagcgccgccgcgaaggtcttccacgagccgtcggagtgcgaagacgccttcccatagacgagcagcgccaccgccagcatggacgtcgccacggccccggt

SEQ ID NO: 193038 - DNA, 354 bp, Zea Mays
gacaaatttttcattttcaatttaaggattgctgaaatctttctgcgcttgaatgtatggatagataacactgtgttttcagctgaagaattttgcctttttgtgtcttctctgttcgcaaaggttgttccttgctcgtcaatttaactgcacggatactgttttgccattatcttatggatttggattatctattgaacatccttctgtttttattaggcaaaaacacttcgcaataaggacctcatcgaaatatatttgagcccacttataacctgcattccaggtcttatatccaatgctccagatgactcaaaaggctatttgttggaggtattggttgatttgctttcc

SEQ ID NO: 193039 - DNA, 519 bp, Zea Mays
tttctgctctacctgtaaggcctcacggtggaagggtatgcaacctgagtcggttttaataaagaaacaaagaaggaaagctagtccttgcaaagttttgcgatactttcctattaaagataggctaaaaagattgtttatgtgcaaggatatagcacctctcataaggtggcatgatgaagagagcataaaggatggtgcattacgtcatccagcagatgcacccgtatggactagttcgatgaaaagttcccattttttgcatctgactcgcgtaatattcattttgggttggctacagatgggtttaatccatttgggatgttgagcagtactcatagttgttggccagtagttttaacagtatataacctacctccgcggttatgcatgaaagatcataatcttatgctgtccttattgattcctggtcctaaaagtcctggagacaaaattcatgtgttcttggaaccactattggaggacctgaaagatatatttcagaatggcatgtccaca

SEQ ID NO: 193040 - DNA, 388 bp, Zea Mays
gagcttttctcaaaatttgttgttagacccgttgcagctccgaacgcattgaggatctgtttgaccgcttgcaggtcattacgggttggattgatgaagatagccgcgtcatcagcatagagggaggttctgagcttagctgcagcaagagggagaggtgtcaggacaccatgctctgaagcaaggtctaaaatcctttgcagtgggtcaaaggcaaggatgaacagcatgggagagagggggtccccttgtctcaccccccgcctgtggtcgaagctttctccttgaacaccatttatcagggctctggaactcgccgtgctaaaaaggatggtaatccattcgcgccaacggtgaccaaatccgcgagcttgtagatattctaaaa

SEQ ID NO: 193041 - DNA, 514 bp, Zea Mays
tgaaaacattgtactacagtttggccaggttgcccagttattataatcaaaatgcagtgaacgtgtggtagtggatttttttgacattgatacactgaatttgtgtaacaattgggaactcagtaactcactagttttgggggtgtggtcgctttggtctaatgtggtcctgttggtatgtctgatgtttgatactttaattaaacgccagacatgcatgcgacaataatctttgtaatggtatttgatcggaggtagaagtgatgtgattaatgttgatgtttgtggtggtgattgtgtcctgtggccttgagatcaatcttggtgggacattttaaatgaatgattgtgccttggcttatgtggcaatcagatggggagcagttgttaacccatatgttcatggaatatcatgtttcatatatttttctacatgaggtcttttttcccctcatgtattgttgtttgagatatcagtagttttattttttgagctagtttatgtgtttacaaa

SEQ ID NO: 193042 - DNA, 340 bp, Zea Mays
cattcacctggtagtatatgaaaggtagtcagagatgtcttttgtcacgtttaagtgctctaatatcccctgagcagtaaagatgccttcaccccaaatgccaacaggttctttaaaagtccaccaagtagttgagagataggggacaccaataagggatagaattctaggtttatgcctacttgaatagctgggggacccagattcgacattgaaaaacgatgtttgtgtaccaacctgaaaagatatgagcaaacaattaaaacatgtatcacctatacatgttcagtttcttgttaagtgtatacccatgtttatcgtcttcaagtggaacattttt

SEQ ID NO: 193043 - DNA, 277 bp, Zea Mays
gctagggttcgtcgtcaggctagtactgttctggtctgacaccattgtctactatagtatgatgtttattctaggcctcacttagtcctatttctttcaacctttgcatgtgtgctaatgttgaacaccaaagttggcacttggatggttggagggtccggcttgtggctcggacgattcgcatcctagacggtccgcgattagattagttcagacgggagtccttatcgtgtacatggttatcctaacaaactcgtggaaaactgttggatctcgc

SEQ ID NO: 193044 - DNA, 441 bp, Zea Mays
attttatgagcttctctcaagatatccatcttcacctctgatttctgaggcacacaaaggcggcccctgaaacgaaccaaatcattctcatcaatggagaactccaggggtttaccatcgccaaccctctttcgagcttcctgcaataaacgatcatgctgctgagccgcacgcactctctccatgagggaggattgaataagcatctgagtctcctcactagcggtgccgacatagcacaaagcgatccccaaacggtccagatcagcgatcaaaggcaaggccacttttggaaccccggacctgctaagggtatcagccaccacatttgccttccccgggtgataatgaatggaaaaatcataatctttaatcaatttgagccaccgacgctgcctcaaattcagctccttctgagtgaaaatatacttgagactttta

SEQ ID NO: 193045 - DNA, 372 bp, Zea Mays
gccaacttggtttcttgaagacacaatatccgctctagatgagaaaattacctcccgaacaacatcccgccgacccttcatattgagcccgcgggcattccagatcaaaatagttgatggattcataagagaaactgcataagaaccaccaaaccgggggctgctaagatgccttctagggagatgtactccatcccctcacccactgtccatccaaacaacaccgataaggctgcaagctgagaatctgatatggggtcaaggaacaatttgctatatgcatcttggacagatggctcaaccctttcctcgggaacatgaaacccaaacttttgatcactctcctttgggcctcagaagcaacaagcccag

SEQ ID NO: 193046 - DNA, 328 bp, Zea Mays
aattcagctcgggtccacccacaacagacaacagacacaaaccctaaaaaaatcagttcctccccgtcgccgtcattcgctcctgcgatcgccatcgacgaccccgccccccacctcttccaccgccgtaatctccgctgttcatcgattcaccgccgtcgtcctccttccctggttcgtttcccctctcattctttcgagttcccccattcttttacatagttcagtcgctaatgtccatcagcttcgccccgccccttctacatcccttcaattgattcgaaattacttgaatcgcctcattatatgtagtatccgataatgcctt

SEQ ID NO: 193047 - DNA, 304 bp, Zea Mays
catcattccaccatctgccggctccgacgacaggtcttcagggaccttatcttcgatagcctgatcaaaatttgctagagacaattcttgcagaccaacaagagcagacaaagctggagaaggaacaccactactctccccactggctatatagcgccgactgttcttccgaattaaggggatttcctcctcctcttcctcatcctcatcaataatacggacagtacacccattgggatcagctctgaccggattacacccattggggtcagcatcatcaaggccacacccattggggtcagca

SEQ ID NO: 193048 - DNA, 653 bp, Zea Mays
actaaagtacatacacatctctaggctatacagattaatagtaggtcatagtatgcttgaaattccttaactaaaccacttatcagaggcattacttgattttgaatcacatgggaactatcagagctgatcatgacgacttctctatacgttttgcctctgctatggatcaggtaaaacttacaattttttttcattgcatcagtatattaatattttttccaaaataactgcaaaaatgatattgcatgtcatgaaccatcactatcggtccttatggatgataatcgctgactgaacattgtttccaccattgctcccaactgaagtctctacctttggtttgatgaaacatatatttgcaatataccatattccttgagtcatcaaaaggaaaagaactcaaaaaagtatttcatttgacactgagatagtaacacttctttgtctttggtgtgctctttcatccattgatattgatttgttctttcagatgataaggttgaagtcatcagatggtgtgtataatgactggtcccgcgatatcaaagggaacatgtatgatattgttgttgaaggcttccagcttcttagtcgttggactggcaggatttgggaacaatgtgcatggaaattctctcgccctatttcag

SEQ ID NO: 193049 - DNA, 301 bp, Zea Mays
ggtcaacgactgtcaccgccttccctatgtgatagatcagtgctaatgaccatggacggatactctaggagcaaccacacacagtctggcaccaccgtggatcgttcgatacctcacactggaccgttaggcaccattgtggaccatccgctacctcacaccggaaattccagtgctcccaaagccagactgtccggataggagtatacggttttgactagtacatgtagtgcacaattattccccacacctcagcagcactagcctcctccacctttgacgcaccaaggctgaagcatgc

SEQ ID NO: 193050 - DNA, 396 bp, Zea Mays
cggtagtgaacatccgctaggagctcctcgcgttcagccattgtcttggccaccgccgccacccgggtatcgccaggctcataagagcggatggaggatccctgccgtaaaccaccttgaaaggagtgtccctgagtgatcattggtatgccgtgttgtagacgtactccgcccacggtagccaacgtagccactgacggggccggtccccagtgaagcaccggaggtacatgacgatgactttgttggccgcctccatctggccatcggactgcgggtggaaggcggacgtcatgtgcagcttggtgcctgtgaggcgcattaactccttccagaacgccgaggtgaacacggagtcccggtccaacaccatggactgaggaatcccatggaggc

SEQ ID NO: 193051 - DNA, 561 bp, Zea Mays
gcataagatgttgaaagatatggcataaaaccgaaacggcataatagttgcataaacagtatataccgtttggcgtaaaacgttgagtcattgtgcgtaaattttttattatggattttagtttgacataaacgtcgccataatatcgggacagtttcggaaataatggggagactctgtaaacgtggatgcggttacttttataatatccgagatttactttcattcggaaaaaaagacaactaagcctgcataactaatcggagttggagatggccggctctggagagtcgccggcgatggaaggagatggcgttcgtcttgatccagagacagagggaggagttggtggtaactcactggtgacaccacctcctgctctaatgggtcctgaggtcgccgagatgatcataggggaagaaggagaacaaagggttcgacctcctatgtccaatattagctccagggagatggatacgccacaaatactgcattcacatgtaagtccaatcgctgtatttgattattgattgattatattgttgtgaacatattccatgg

SEQ ID NO: 193052 - DNA, 376 bp, Zea Mays
tcaatggaagtgaaacgggaaatgtccaaaaggatccacctgcaccaacttctgtttttcaccaaccgtgtatgcacgaaagcaggtcttacatccctccgcaagaagatactatagatgttgttggtctaggcgataggtccttagaaaggagtcctattgtggaggggaacatgtccattggatctgtgcttgcttcagctggctgtgatgcacctttgcagggaagaattactgagcccttttcccagcaggataaacatgatcatactgctacagttgaaccaaaatcttgtaggcaaaaatctccaaatctatctcactgtgccgatggagagggggcagatgatggtggctccagcaatcagtcatctaa

SEQ ID NO: 193053 - DNA, 403 bp, Zea Mays
cagtaacgagcttagactggtaggtgctaattttagctgttagagtacacttcctttctgtgaaatagcaagtggcatcctcttgctattgttaggtgcaagggttgctaccacacagaatagtacaaaacgcagtgttacttttttgtttgtgttgtcatggttcccgttttggtgattgggtactagaaatgtggttagaataataggtatttagcaggagagttggcattgctacctcatctcgtgctctttgctctcaatttgttacacatcaattggatttggctgcaaggtgggtatgtgccacttagagcagagcttacagttatttcttttgttagctacactgcaagcatcctttgtcgtgattttgagtattagaggtgagcttagaatggga

SEQ ID NO: 193054 - DNA, 486 bp, Zea Mays
ctcaggtcggtctagtcctctttttataagcctgtcagcagtccagcacctattatgttccacaagccatataaagaacttgcacttcccaggagcccaagatttccacacacgttctgctggttcaaactgaaccgaaccaaggaagagagctttataagcagaactagttgtatactcccctgaagcgctgaatttccataagtggcgatcccttattccaggatggagctcaactgcatcaagcacttcacaaagttccaagaattcagcaatgactctaactgaaattgccccattcacatcggagacccactgaaaattagggagcgcatctttgaccaactgtctgttggcaagacgcgggggcaccaaatcaaacactgcaggagctatgtccttaatggcaacgtatcgtgtgctcaaaccggtaccgtactcatatgcgcatattaaatctcggccatctatctcccatccaacgac

SEQ ID NO: 193055 - DNA, 423 bp, Zea Mays
aaacgattggcctgggaggaaaaagatgatgataccagcagtggttccgatagagaagaaagcgctgaagcacaaggggacatggatataaacatggtgtttgttctacctactgagttcagagcaggagagggagatgaggctgagctaacattgggggttgagcatgttgtgtttgagaaaacaaatgagtagggatctcatctaaaaccattatatgttcgtggtcacattgatgggaaaccaatggggggcatgttggtcgatgggggagcaggtgtaaatgtaatgccgctatccgtgttttctaaattaggatacaaagagagtgagctaattaagacgaatatgaatctaagtgggttttcaggggagccatcacaagcaaaagggattatatctgttgaactcacagtgggcagc

SEQ ID NO: 193056 - DNA, 353 bp, Zea Mays
agaagagcaggtaacggacggtgtagtccgacaggttgagccacaaggtcggcgatggcgagacggtgacgttgtggtcgacccgcgggcagctcgcgtcgtcgaggacgtccgggtcggcgaggtagatggtggaggtgggatagtcgatgtccgtcacgttgtaggagtagcctgtgttgctgctgttgccgccgagctgtatggtggggtactcgtcgtccacgcagtcgatggccagcccagggtacccgcagtaggaggaggagttgcccaggacgtccgccgtgtcgtcggaaaggtagaacgggtaggtgatattcacttcgccgcatctgtatggttgcagcttg

SEQ ID NO: 193057 - DNA, 561 bp, Zea Mays
ggcccttagtgcatgggcagttagggtttagcgacccacacggaccatgcatcatatgtttgataaccatctttcgtagttcagggtacttgttgtgtgggatctcggctgagatcaaaaggtcatactgctcagggcacgttagcttgtacttcctctgcatgatgagtagaaaatgggcatgtggcaaaccccgcttttgaaactccacgacgtagacgtaggcccggaccttaccgagaatatcatgtttagtcagcctatgctttaactcctgtagcttcgcatgaaagacacgcactacaagatcaggacgatcttgcggtgtttggccagggagaagctccctccttatctcatcccagttggggttacatgtcatggtaagaaagatgtccggtttaccaaacttccgcaccagagccatagcatccatataccgacgtttcatgtcacgaggaccgccaataaacgacgtagacagcacagttcgcttcccgaccttttctgctctgatatctccgtctaacatgctatccaccaagccctggtataggtctg

SEQ ID NO: 193058 - DNA, 495 bp, Zea Mays
taccatgttcagaaattaacactgacaagaacattgcaactaaaaatggtggttcaagcctgaggtcagatttggagccatcctttctgagttctgaacaagagtttatttccaaagaagtgcagtctagcaagcatgagaagagcaacatcacattccaaagcggtgaagataagttcactgtccaggagctgctttcatcggcaccagaagttgctcctcctgtttcatcagcaccagaagctgctcattctattccagccacaaaaggaacactattggattcacccacttctcttcagtcatggaagaaacatgtagtttctcatttaaaccctccagttgatgatgctctacagactataagacacagcactttctgtctcagtgatgagcagccaacacaaggaagtgttcaaagagaagctcagagcgctgatatgatcaaactactggatgttgtaccagaagaggctgatgcaaggagcagctcgt

SEQ ID NO: 193059 - DNA, 386 bp, Zea Mays
aatgaccagaattgagagatttaggtagatcaacatccgatactggagaacgggttatagcagataaccagataatagggtagaatcattaaaggatctagagatttggatgataaggccacaacatgattcacaaaggtaaaggtttactagatccaagtgaaaagagaggtcatcaacccagatggcttctaggttgagcaaaagataatttaatgaggattttgggcaaggcttccaagaagaatttgggactagatattgttttgcgcaacagacaccaaccaatgtttttttaacataaacaagtgcacaaggaagctttaggttgaactagcagtccaactatggggttctataagctatgcaagtgtaacttcaagggt

SEQ ID NO: 193060 - DNA, 417 bp, Zea Mays
ccagattccattggcgagaaaagggagtatccgggtgaacgtcgtggaagggatttggttcgccgcgactgggatcaagatgatgatgatgtgtatcagcatggtagaagacatggtcctcgtcgtcatcgtagcctttctggttgggttcgttcgtcgcgttgtcggggtgggactgatgactgcatcagctcgaatggaaaatacagaacttccactcccttcagacgtaatgagatggggatgtcacaatcaaagcgttgggtacctaaattaagagctaaagctgtttcttttgctgacccactgatatctgctgtttggccttttgagggggctgagggggctgcaggtgctgataggctcctgctgaacagtggcaataaagatggcaatctggaggctcattatttccat

SEQ ID NO: 193061 - DNA, 572 bp, Zea Mays
cactggatttcatttgtctctgtcaatatttacatttgtcggtcctggtcgaagactaatacttgatggcctaaagagtctgttgaaggggtctccgaacatgaatacgctggttggtttaggtgctttgtcatcctttgcagtcagctcaattgcagccttcattccgaagctggtagctcctactctatttttccaaaagattttttttggtttgttgcatgctttgcagatattgttggccagtttcatcgtttaaactcctttagttaccctctagctctataatatgttccgttaatttgcatcatggcatatcgccttaatatgtcagtagcttgcttatatcgttccatttacctgcaggggtggaagacattttttgaggaaccagttatgttgatagcttttgttcttctagggaagaatctggagcagagggcaaaacttaaagctaccagtgatatgactggactgcttagtattcttccatctaaagcacgcctaatggtggataatgatgctgagaaatcatcattgattgaagtcccatgtgatactctagctgttgg

SEQ ID NO: 193062 - DNA, 317 bp, Zea Mays
atgaagttgtgtgccctcgcttgtatacgtgtgcgaaggcgttgtgtactttgtctagtttgttctattgtgttgatgtgattatagttggtcttggcgcggacggtttgatgttgtcgtttctgcctttgttatgctagtccggttgcacctttaggcgacttctgagcggatggtcttcgcggcagactttgcgcatttgttgtgctagtccggctgcacccttaggcgacttctgcgcggatagttttcgcgatagactttggttttttcgcacttgttgtgctagtccggctgcacccttaggcgacttctgc

SEQ ID NO: 193063 - DNA, 387 bp, Zea Mays
atagaaaactaaaaatgaaactaagaaaaagaaaggggaatggcgaaccggccaaatgggctgaatttcatcagctgacccattgcctagccgttctcctggtccaagcaccatataaccagctccccaatgacagctgggccccacctgttgtcgtggttcttcctctgtattgtggacccggcctgtcatcttcttcttctctccagcgaaacaaacggcaactccgtggcaattccaaacggaaatcgcgagcacctcggccgattcgcggaactcctccctggattcgggtcgatccgatcccgtgtccgcgccgcagcctggtagggtcgcgccgttatcctctttccccaaacaaatcccacatgcggaccgacattgccg

SEQ ID NO: 193064 - DNA, 354 bp, Zea Mays
ctacatcctgtacgaggacgtcaagtcgtgcccctgcgaggacgtgcacatcctctggtccatcctcgtcgactcgtcccactcccacccgccgccgctgtctctgcgcctcaagcactgactgactcgtccctccctccctgcctccgacgaacgagaccgtcggtgtacatgaagatgacgacgagtggcggcagctcaccttcttcttcagccgccgcgataccatatcgcttccacgcgcgggaagaagttccttttgtttgatgagtaggagattgatgagctccttcgttcaccctgccccgcgcgtcctccggtagatgcagccatgcaggtgcatagcagagcaga

SEQ ID NO: 193065 - DNA, 275 bp, Zea Mays
gatagcaggacaccaacacctccttgaggtctactagtagttccatccgctaatagtcatcggactggacatagtccaaaaatttagacaacatcgaaattgtggtgtcctgtcagtcagttgctcagtaaattcaggcatcaattcagtcgcgtatgcgtttaatttcttctggctactgacatcatggcccgtttaggttttacgctggtaggtgtatgagaggtcctgccaacaaactagttaaaagttctaacgattatgcatatccatgt

SEQ ID NO: 193066 - DNA, 678 bp, Zea Mays
atactacagtcgtgttagcctgagttagtgaaggttgtgcaggcacacctaggtatggataaatcatacataaagattatggataaatcatggatcacaagtgaggctaggtacaaagcaacttttcatagcaactcttatgtttttctatagttatattgatatgtaacataggaactgtatgtagggagacaaaggtttataaacaaggggtgaatggttttctagcttttgcatttagacattcagcaataggaaacaagatactatgcccttgcaagaagtgtgttaactcgttttggagagaggccggtgaagtgcgagaacacttgatatgtgatggttttctaaaagggtacacaacatggaccttatatggagaagcttcgtcctcttttgtgaatcatggtaacaatgatgatgagtttagcgagcatcctacagaagatgatgcaatatctgagttgttaaaggatttagcttgtggtttagatgatggaggtgatatggaggatgatgggtcttttgaggaacctaatgaagacacaatagccattcgtaagctagcagaagacaatagtcaagaattatatccgggttgtcaaaactactcaaagctacgtttcctagttcgtttgcttcacatcaaacttcttggaggatggacagatagaagtt

SEQ ID NO: 193067 - DNA, 664 bp, Zea Mays
gaagagttggcgagggaggcaacactcgccgatgtgtctattcttgtagatgggaatgacgcagagctacatgtacatggcaatggcgcagaggtacatgataatggcacagagttacatggcaatggtgcagtgctgaaaagagttgaaatgccccaggttagagaggtgtatgttagtttaaatgtttatttttggtactggctgccatggaaacttgtaatgcttgctttcttcactaggatttgggagcgatttcagccaaggaggtgccgctgcatgagggcaaggaggtgatacttgtggatgataatgacagcgggcaggaagatgatgcagagggtaaggtggatgagaacacacctcgtgttgggctgagattcaaaacttatgatgacgctctcaagtactataaacaatatgctgaggattctgggttttcagcaatcattctgaagtcgtcgtatttaaagtcaggggtgtgccgaaggttggtgattggatgtagtcgagctgggagagggagagcaaatgcgtgctatctatcaagagagtcgaccaagataaattgtccagcaaggatatctttgaagttaaggcaagatagatggcttcatattgatgatgctaagctcgagcacaaccatccatacaaccagtccac

SEQ ID NO: 193068 - DNA, 382 bp, Zea Mays
cttgtgtccgggtgcttttggggaaatcttcgattttgcgcatttgttgagttagaccggctgcacccgtaggcgtattttgcgcggagtcttttggagaagacctcgattttgcgcacttgtgctattccggctgcacccgtgggcgacttttgctcggataatcttttggataagacttggatttcgtgcacttattgtgctgttccggctgcacccgtaggcgacttttgcgtggatagtcttttggaaaagacttcgatttttcgcacttattgtgctattccggctgcacccgtgggcgacttttgcgcggatagtcttttggaaaagacttcgatttttcgcacttattgtgctattccggctgcactcgtaggcg

SEQ ID NO: 193069 - DNA, 293 bp, Zea Mays
gcaaattcacaactaaacccgaggcctctccaaagcaatccaggatcattttgacacaaacaagatcttctgcaggcttcacaaaaagaaccatatcatctgtgtaaatggagagcctagatttcacgtttctgatggccaagtcatgcagcaatcctctgtcctcagcatgcttgaataagctactaagcacatccatcacgattatgaaaagcataggagataaggggtcgccttggcgcagccccctccggtgtcgaatataatcgcccggagttccgttcaataacact

SEQ ID NO: 193070 - DNA, 312 bp, Zea Mays
ttcaacctccttgtcttcggactccagatgctccaacacaggatcagtcaacaccatgcccatgtcttccacagttaaggcatgcaactgaggcaccaccctcttgggacacttcccttggtgacctggctcaaacttttcaccacaagtgaaacaaagtccattcgctcttctaaactccctgagttgcctctcctttgttagatcacctagaataaatcctcccttattgtcagtcttcagattactgcccacagccttattagaagtaatactcctctgcatcttcaacctattcttctctaatatctc

SEQ ID NO: 193071 - DNA, 443 bp, Zea Mays
cggggatctactgtcagagaaggatgcatcagagtacaggagcttagcgggggctctccagtacctgacgttgactcgtcctgatctggcatatgctgttcagcaggtgtgcctcttcatgcacgccccgcgcgagcctcaccgtgcgctcgtcaagcgcatcttacgcttcgtccaggggactctctcctcgggtcttcacattggcaccaggtctgtcaccaagctgactgcctactctgacgccgactgggcaggctgcccagactctcgtcgatccatctctggcttctgtgtctatctcggcgacaatctagtttcatggtcctccaaacgctagaccacggtgtcccgctctagcgccgaggccgagtatcgggttgtggctcacgttgtggctgagtgctgctggcttcgacagttactccaggagctacacatcc

SEQ ID NO: 193072 - DNA, 541 bp, Zea Mays
aaagctcaaccaaggatgaagttaaggtgaggcaagactgcaaagcgacaaagggaaaggaaacgaacaagagcgggatagggaaaacaacattcttggattgaaatggaataagtgaggctaaaaaaaataattaaacattatggtaaatatggagagaggtcaagggtcaaaggtgatgataggcaaggatataaaggaagaggtaaatgtgcataaaaaaccaggaatctaggtacaaccaagaatagagttcagataagtcttgcaagtggtaaagtatgggatataaccacgagtgagataagtaagagaccacgctggaactaaggtgggagattggaggctttagataacgaacatagcgtaattaccaaggtaagattgagagatgataagggtaaaggcaataagaagcaaaagcacaacaaagggtgaggttacaaactcgtgagccaaagaagaggatacgaccaagagaaagaaggtataagacggaagaggggcgattttaaagggcaggtatgaggcaaacatcaat

SEQ ID NO: 193073 - DNA, 294 bp, Zea Mays
cccactaactggtatcttttatcctttgattcacgcaacaggacctgcaggatttagaccaggaagccaatccatgtgtccggaccccttggatgatagctccaattactagggcacccgtcgcagagtgatggagcgtgcaggcttagggtattgtaccaggctaagcagctacacagctccggaccaccctaggggacgtgtgtccgttctctagaaccagaccccaggttgccagacccacaagactatagttccaaatactagcttaccagtcacagagtggtggagcat

SEQ ID NO: 193074 - DNA, 276 bp, Zea Mays
gctgagccaagtgaatagcacggtccaccgtagaaggtgtttgaacctgcaccacatcctgcaattcatacttaaggcctcgcacaaaataggtaacaaagaatgtctcatcaaactccgagttatgaacagctaatccatatctggcctgttcaaattctgacacataagaatccagtgtaccagtttgcttcaaagccaacaacctcctcaatgctttaggataagcattagcaccaaacttagcaaccacagctgaagtaaactcctgccaac

SEQ ID NO: 193075 - DNA, 815 bp, Zea Mays
tttcgagacaagctaaatgtctctatttttactgtcaatcatattgacaattgtgtgacatagagccataatagtatatccaattcagatttcttgactttctcaatctaaaagatacatgtattgttatccctacggtgattctagtcagtagagttatgtcactataccgacaattacctcatttctcctaagttgtgctataaccaaagaaaaatagatgcaatatactaggagtatcacctatatgcaaataatctagatcaaaaattgtgcatgacctagctctggtaccactgatggaaatcatgcatgatacacactagcatatctaccatgtttaactaagattgcatgtaactacagaatcatgcatttctactactagacgcgcaacacagtggaaggacacattgatgtagtggaagtcatcgaatgtccttgcgtaccaacaacaacacatttgcccatcctcctcaagtttgttattgatcaacaccacagtaacaagcccatcctcctcaagtttgttattgatcaacaccacagtaacaacagtgtcaccgttgtatatccatacgtgaatatgaaatatcgtaatgccggtgcgctaaaaacgtgcatatcgagagaagcggtgtcgacgtatcgagcgtctgcaaccataggaagagacagcggtagctaatatgattctctcaagcatgccagacctttggtacatatagacccttactaatgtgtttttaccataaagactcattagtgttatcatatgtcatgattgtctcttcaacatatattcaacaattggt

SEQ ID NO: 193076 - DNA, 547 bp, Zea Mays
ctagcgtgggaccaacttgggggagtttgttggccacgggactggtgagtgggtgctggcggattttgtggggcagggggtgtgtttggttgttgggggatgacggctgttggggggcttacaggggttggtggaagatcggaatgtaccaaccattcacatccaactgcttacgtcttggcaaaaaccggaccggcagcacctgggccacacacccttctctggtgaagccaagccgttcggaaatccaaagttcgtgggggacgtcaagatgatggttgacctctagaggcaggtgcgcaggcagcttagggactttggggcaaccaccgcttcttcggtggcgtaagggaagagcaagcaatttttgagggcatgatcgccgggaggcatccaggcctctaggtattgggtgttgttgccccctaccgtcttgatccatgctctcgtgggagccagaggacccctctccaccttgagactgactgcctttaggagacgaggagccaaaaggggagatggagccactgacgcgtccatagctagg

SEQ ID NO: 193077 - DNA, 336 bp, Zea Mays
gccgtggcctcgcggtattccgaccacgtgcatcgacaacgtggccgtgcggccgtcgccggagtttgcatcctccgccgcgattgtgccacgcttccggtcagtgaccacgtcgccgtgaactatgatcatttcccagtgactgtcggggcttctcatcccgtgaactgccacgaatcaccatgccggtgactcacttcttttccggccgccaccgcgccatcctcaattcaagcgccaccgtccctggaaactataaatcgagcccgccgttggctccgcaacctcattacacatcacaccgtccagtatcgcccccaagcttccaaccgtgag

SEQ ID NO: 193078 - DNA, 456 bp, Zea Mays
ctttatacgtaagacaggtgcatcctatctcagtgacgagctcctcaaggcttggatcacagaagtgagaatactggcctaccgtgtcgagaacataatcgacaacttttcataccactctcttcaattcaagcaagaccctaaagggaaaaagttggcgaatggattaagctacggtctagtgtttagtgggattgctgctgatctagctcagatagagaaggaaatagagcatgtttcgaagttgaagaatctctggttgaactcagtccatgagcttcttcatactcaagttagcagtgctgaacagcaattccctcaatacagtttgccccaaattctaaaagatgaaaacctggtggggttaaaggaagaaagagagcagttaaaggaatggttgattcccaatgcacctgtcaacatgacaaatataccagctctcaaggtggtaacttt

SEQ ID NO: 193079 - DNA, 762 bp, Zea Mays
cagacacagacaattcacagtccctctttccccactatgcatcctaagtaatcatctatatctatcttcacgcagccaatggggatagactaccatgactttgtcggaattatgttactgctcattatcaattccaccattagcttcatagaggaaaacaatgccgggaatgctgctgctgcgcttatggcccgcctcgcaccaaaatccaaggtaagccccacaccctacttaccactcctttttcttctcaatactgcttttcatcatgttacactcattttctaggttttacgtgatggaacctggagtgaaatggacgcatctttgttggtgcccggtgacataatcagcattaaacttggagacatcattccggcagatgcgcgtcttctcgagggagatccgctgaaaattgaccaggtctttcttgtgtctcaatcatagtgttcttggtagagcggaaaaaaaaatattctgatatgaaaattacatgagacactaaaacacataagggattatactttgcagtctgcacttacgggagaatcgctacctgtaaccaaacaacctggtgacgggatctactctggttcaacctgtaagcaaggtgaaatagaagcagttgttattgccactggaatccatactttcttcggaaaagcagctcatctggttgagtcaaccactcatgttggccactttcagaaggttagtcttcagcaaccagtgtctcttttcttagtctcatcttatttctac

SEQ ID NO: 193080 - DNA, 699 bp, Zea Mays
gtttggtttcagagatccgccactttcctctgcgttttttttcgggatccttttgtctttccatggtagggtgcgatgacgaggtacacacaaccctgatcaatcgcctccgatggcgatctgatgttcaccttttacctttggttcgtattcgctgagcatccgatcttcttcatctatcgaggccagcattttttgtttctttttttttcttgctcggtttgctttggatcgagggacctggggatccgccgcccttcttcgtgcggcgtcatccagtttttacccctcgaatacggcttgcaggcgcgtcctagccatctcgctctctgcataatcctctgcgagacccgggctcgtatgccacattcgtcgttgtcaaactaaacaaaaaaaataggcttttgtcgcgaagatcccagcagagaggtgcgctgatgcctccctaacaatcataatcttcgcagagaaacgctcatgatccgtggtttcgtggatgtgtgatttggatttttgttccattacatctgtttccacggcgacattttcatgattactgcagcgaactgaacgagggacctatggatggactgctctttgtccgtgttgtgccgtccaagtttgccttcggatagtaaaaccagcaatctggtcacgagatctcgcaagccttttcatgtttgtgggaatggtgtgcca

SEQ ID NO: 193081 - DNA, 275 bp, Zea Mays
ccaacttagtcaagcccaaatcgcggcaacagcagcacgaatcgcggcggcaggtcaccggcggtgaggaccgttgcgctggcgatctgatcccctttggtctactgtaccatcgcgaactgccatcagtgcgcctgacagtcaatgtttgggctcaattttctctcaaatttccatggcaacctatccgaggctctgtagcaaatttgtagagctacaaaccagcaacacttcgactataggggttgaactcatttgagcactggatcaaggtt

SEQ ID NO: 193082 - DNA, 360 bp, Zea Mays
ggtctgcatcgatgagatctttggaggttagctcgtctatgtcgggtgaggccgaggcgcttgttcttggggacccatgcttgatttcctacggggtcatggcctccgaaccgtatagcaggcgaaagggagtaaacccggtcgcccgacattcggtcgtgttcagcgcccagactgcttcaggtagcaggtcggcccatttacccttcttgtcgtcgaggagcattttcttgatcgccgtgaaaatcttgccgttggcgcgctcgacgacgccgttggattgtggatgatatactgaggcgaaggcaagtttggtgccaatggagaagcagaaatccctaaagtcttggctgtcaaatt

SEQ ID NO: 193083 - DNA, 565 bp, Zea Mays
gttagcctatatgcgctgggggacgccttcaacttgacgatgaatggaccctcccactttggctccagcttgccccgtgactctgtccgggtggttcggacgagtacgaggtctccttcgttgaattctcttgggacgactgcgtggtcgcgccaggccttcgtttgagcttggtatttattgagggcctgcaaggtgaagacacggtctccgtcgatgaggtctttggacgttggttcgtctacgtcggggacggctgatgcacttgttcgaggtgacccgtgctttatttcctgcggggtcatggcctccgatccatatagtagacgaaaaggagtgaatccagtcgcctcgcattcggtcgtgtttagcgcccagactgcttcaggtaggtggtcggcccatttacccttcctgtcgtcgagtagccttttcttgatagcagtgaaaatcttgccgttggcacgctcgacgacgccgttagattgcgggtgatatactgaggtgaaggcaagtttggtgccggtggagaagcagaagtccttgaagtcctggctgtcaaact

SEQ ID NO: 193084 - DNA, 282 bp, Zea Mays
gtcagcaccaaaatgtttcctagtgtgactgatagcaagaaatgttgagatgtgcacattgcttcaaacaaatgcctatgcacaacacacttaattattttctctcaatgcaattcagcacacattacttcaaacaaatggttgtgcacattccagttttattagtatggctaagaaagcagcacaaaagagccaagcatattgcatgtattagtaacttatcattaaactttaaagatcaatactgattatgactgaaaatctatttaactttgatttgtt

SEQ ID NO: 193085 - DNA, 605 bp, Zea Mays
gagacggctgctcaatgtccatcttcagcgcgacggggctgagcagatggctgagagcgctagggaataatgggacgccctttgttggcggctaggaaggagcagagagcttcggcagcggcagttcgcgggtggcgagcgcggcaacaaagtggagagcgaagagcgaggagagagcagcaagggcgagcaaggagaagagtgaggcgaacctgcggcactgcagatataggcaacgagaggagtggagaggacgccgacggaggagctcgaccatgactattaatggcacgacatgagtgcgggaaacggctagcagtaaaggtggtgccgagtggaaggagagagagggcgcggacgtttcggctgggctgtgcggcaacgtgaatgccatgggcaggagaaccggcggcagcgcgtacgtccgatctagcagacgagcagattgagccgtgtctgtgtgggagaaaataattaaggagagagaagaaagtgatgaggcccacatgtaagggagaaagaacgaggcatgggatttagtgtgcgggcttggaagctgagcgttggtgtcaaatatgtatatattgttttcaatttcccttttt

SEQ ID NO: 193086 - DNA, 306 bp, Zea Mays
gggacctgctagcccaaacagctccactgtcacaggagcagaaggtacatctgtttacggctggacttccggagcgtatcaagatcgacgtggaactcatggcaccacgtgatatcaatatcgccttgagtttggcgcgcgcatatgaacggaggtcacaagcgctcgatcaccagccgacatcaaccaccaacaagaccatgcgtcaaccccagcgcccgtctgtaccagtaccagcacctcaaccagcgattcctgcagctcccagtacaagacagcagcgaacattcaagaagttgacgcctg

SEQ ID NO: 193087 - DNA, 332 bp, Zea Mays
gcaggatgttaccattaatagcagaggtggcctcccttcccaccgtcaggtatattttaggcgaaggcgccacactaagaaatgttctgagccggatgagcctactgcttctcttaatgacctggagaaagtcatcaagccagtggtgcagctgctgcctatgccggttgccaagaaaagaagttgtaagacgtctgctgccgtgcctcgtcggagcaggagggtggctggtgtcaaaccctgttctccaggtccgatcatcatcgaagcccaaaagaaagtcatcaggagcctgggtcttgcagccaaggatgaagcctttgatcaaaaag

SEQ ID NO: 193088 - DNA, 560 bp, Zea Mays
tagggaacgtcgatcgaatatctctgcatcaagggcaaaacaaaaaaaggctacaactccagctaaaacaaattttgtgcaaagttttggtaactttcagagagaagcacgcaaagcattctcatgggtcccccgtgatagtggcactaaaacacccccaaaagatatccttcggaaaagaaagagttcaggctctggaggtgatagatcctcttgggaagcaatgcctggtttacaggaggagcggacacctgtatatccttctgaggcgcaagaaagacttccttttgtctctgctcctgatgagtgggtgctgacgggagatcctgacaaggatgatgcaactcgttcatcccataaatatgaaacctctcctgatatcacactgttcaaggtagatctttcattccatatctgtgtcaactgtcaagcttttatgtgccacaaatgctaacaatcttcgttaattttacttgcactgctctttttctctctctaaaacttgcactggtctaaattgtctgcctgcagttttctttttcttgttaggcattaaggat

SEQ ID NO: 193089 - DNA, 442 bp, Zea Mays
gaggcgatgatgccacagagacgacgtggtggcgaggctgcaggagggagttgtggtggaggggtaggtgtagaggtcgccaccactattgcagcgaagagtcacgtgcctcgtctgtttgtccttgacagaaaaaccataagcgtcaaattcaattgaacaagagttgtcacgagtgaattgacgaacagataagagattgcgcacaagtgcaggcgcaacaagaacattgttaagacgataggtagaggtgggggaggatagtatagatgtaccacgacaggtgatgggtatggtggtgccatttccaacggtgatgccgaatgaaggaggggggagatgggacaggagtataccagccgaagatgacatgtgagctgtggcgccagtgtcgaggacccaaggagaggacccctggagggacatctgattcagtgcggct

SEQ ID NO: 193090 - DNA, 281 bp, Zea Mays
agtggtgaagaaagggggatgatgcatacaccattggctcggcccaagagcggggtggtgcactcgctcgcacacgtcactgatagacatgcacagaattggtgttggagggagcggccggggccggcgagggcgtcgagatttccaatggtgagggcaaggccagagaagtcgagggtgaaggcggggccgctagtggttcagaggaggccgaagggtaggcacacgcttcgatcaggggcgacagggcagcctggagtgagtttgggtgcataggtcag

SEQ ID NO: 193091 - DNA, 281 bp, Zea Mays
ggagaatgtcagcataccatcggcttcagtacactttgaacaccaatcggcaagcgcatgaacgaatgaagttgttgttggaaggatgggccgccgcgtgcgcagtcctaatacgcgggtgacgggagccgaatggatgacttgactaatgggccgtgggccgtgtccagtatattgttgtacaaatactcgatgggatgctgctaatagagttgtcgaataacagaacaatattcgtccattccttccgttcttcttcctcggacctctcctgctctctt

SEQ ID NO: 193092 - DNA, 344 bp, Zea Mays
ggacacttctgccgcggatggggtacagggaggctgccactcatatccagctctggctccttggtgccctggtctctcactccgagtttgatgttgtggatttccttatttgtgagattgaggacaccatattggatggtctacgtgctcgtcgacagctgccatatgctcactatctatgtcacatttttgctcagctgattcggcctccacagttccagggcacacttgaggcctcacgcctcgtctttgggtcctaccgtccagcgcctgaggatcctatgccagcacctgctccagtatttgactctcaggctgaggatactactcttcatcagttcgaa

SEQ ID NO: 193093 - DNA, 294 bp, Zea Mays
attggcttggtgcttgccatccgacattggaggccatatctgtggggacgtcgatttatagtgcgcacagatcatttcagcctgaagttcttgttagatcaaaggctagccacaataccgcaacatcactgggtgggcaagctactgggatttgatttttccgtggaatacaagaccggcaacagcaatacagtcgctgacgctctatcacgccgtgacaccgatgacagtactattttggctatttctgggcccagatttgagttcatcgaccgacttcatctagcacatgat

SEQ ID NO: 193094 - DNA, 396 bp, Zea Mays
aggagcttgcctgtaaatcatttccagtgtcctctgctcaccaatgaactgctttctatacaacagcagtcctgctaacatgaatgcaagtacagcccagccaccacgctcacaatgcattattaggacattttgctggcccagagagagccaactctcccctgacctcaagtaatgatgaatcatttctattgtaaggagagggcatccctcgtattgtctggggtagtccataactaccatatcataacttgataatatattcgccagtaaactttgactgtctccatcccgaaagttgaagaccataaatgaagcatcagcgaagtggctctgaagttgtgcaacaatgtcaccaatataatcccggtatttatcatcatcgaagacatcagt

SEQ ID NO: 193095 - DNA, 674 bp, Zea Mays
gagggtattagagtacaactagcagatgaaggcgttattgggctagttaatgaccttttgtgataccaggtttcctataatccctttattcaaggcatatctagatggtgtttatgtccactcaagttcaacatcgcacatcattatgccacatcatttctcaaaataaaataaagaccatgagaaattttgccaaattgcacgagagaactttccaaacataggttagggttgtaagacagcttttttccaccaaaaagatgctaataagtaggaatataaagaattcaaaactatagatcaccttttaaactaaaaatgacgtttccctgatgtcaagggcattgtattcgcatcagagggtattagagtacaactagtggatgaagacgttattgggctagctaataactttttgtaatactaggtttcctataatcccttctattcaaggcgtacctagattgtgtttatgtccactcaaggaaaacaccacacatcaatttgccacatttttctcaaaataaaataaagacgtcttcatcgactagcccaatgtgccttacaaccttaacctatgtttggactgttctctcactcaatttggctaaattttccatggtcattgttttattttgagaaatgatgtggcatattgatgtgtgttgtttttc

SEQ ID NO: 193096 - DNA, 311 bp, Zea Mays
gggctgttctgacacaagaaactgatggaaaggaacatgtggtgacatatctaagtcggcggctggtgggtgctgaaacaaggtacacttttattgagaagttatgcttatgcttgttttatgcatgcaccaagtgtagatgttatttactgtctagtcattgcactgtttctggtcaagccgatgtaattaaatacatgttgcataacccaattatgagtggtagaattggtaagtgggcttatgcactcatagaatatgacttggcctatgaaccattgaaatctatgagaggacaggtcatagcggat

SEQ ID NO: 193097 - DNA, 370 bp, Zea Mays
caattttcgagtattatagggccgcaggtttggccagcatgcacagccaaaaactttaagaaaattatagtcaggggactgtttgaacaagtgctcaagaggtgtagagtaatcaagaagtttcgtgggggtgtgattaatgaggtatgcagctatggcaaaagcctcatcccagaacttaagcgacatggatgcttgagcaaggacagacaacccaacttcaactatatgtctatgtttgcgttcagcaggtccattttgctgatgcgcatgtgggcaggacacataatgaatgatgccgagtttagtaaagaaagaatttaggtgctgatactcgcctccccagtctgtttgcatagcaataattttg

SEQ ID NO: 193098 - DNA, 531 bp, Zea Mays
cgaagtagtaaggtcatccataaaaattgagatcgactgtaccaacagcaacgggccgtgtgatacgtgtttggttcaaggaatcattccatctaatattaggtggtgcatcataaattaattccttaaatttagtgatatgatcctaatctttatgttagtactaaatatggggaatgaggtggtacaaattaaataaaaaaggtaaggaatgagaaaatgatggactaatttattactcaaaccaaacaccctattagacggcaggtcaggcaaataaactttggtccaggtttggaggtgccctggcgtgggctggattgtatgggtgacgtgaatgaggcctcattcttggatgatacatgtgcttcgaagtgagccctttgtttaaaaatcctgctacgatgactatagtaacagagattccataattccgaagtgagccccagtgttagtttattttcgtgagccttatggaatctgttacttgtgaattgtgattatgatccaccggtctgtttaaacaacgac

SEQ ID NO: 193099 - DNA, 482 bp, Zea Mays
gtcaccatggcatgttaaagtagtgctagtacctaggtatcagatagtaaatttgatcaacctaatgtattccacatttgcaagtttctcttaatctgtactaaaggaaacttgccacacgcacacgcacacacccaaatctgttttgcgatggcttgtgaataagctttatcctgctattccatagagtatgactgcaaaccatgcatgtatattcagtcgtattgtcttgttccttagagaggaaccgaaggcgcataaggctcagactcgttgttcatagcctgctagtagtgcaagtactggaggttctcaggggagttctgctgatttagtcactcaggagatgctgacgttccttcgtcgccttgctgcctcttcaatgccagatgtgctagttctgtgactgtctttgactctgctaggttttgttgctgcttcttagccttctattgaggaaccacctttcacatccacttcag

SEQ ID NO: 193100 - DNA, 335 bp, Zea Mays
gcgcctcaatggtttcgccgctccagacgtcctagtactgtccctgctctccattgtcgctctagccgccgacgtgcctctccttcgttgtcgttgctggatcctccctccctcaatcgtcctaaccgaagtgaagtaggcggcgggctcggccgtcgactcttcacacggcgcgctagacaccaagaagtggatctaggtcaactgcttagttcctccattttactgttgctatctgccctcgtgcctccattttaatgtattaaatcactcttctttttcagcacagttcctgcataaggttgcccaatctggcacattcattcactgattct

SEQ ID NO: 193101 - DNA, 359 bp, Zea Mays
caatatgcttcgtacgctgatggttcactgggttcgaggagaggtagactgcactaacattatcacagaaaacaacagtggcgcgcttcaggggaagatgcatttcctgaaggagctgtcgtagccaggtagtctcagcaactgtatttgccactgcacgatactctgcttcagcactggaacgggacacagtaggctgacgcttggatgaccaggagacgagattatcaccaagaaaaacagcaaaccccgaggtcgaccgacgggtgtcaggacaaccggcccaatcagcatcagagtaggcaaccaatgtggagacatccgtgggacgaagatgtaggccatgatccagtgtccca

SEQ ID NO: 193102 - DNA, 391 bp, Zea Mays
acatgttgataggtatctagcatctatgtattcgcggatctcatttggtggtggtatttgaggacctggagatgcattatttgtgttcgcagtcaactcaaaatatatcctagctcgatcgcttcccttcgtaacatatttaaacaagtacttgatcatgtgtgttttgttgcaccactcgacattaatatgtgcgttgtattttttgagcaattgcatattgtatggcaccacgctcctactgtccaatgtgactccactttttactacaaaccgaccattatttcgtctcctataaatggtatagccaaaagcatcgacgacagtctcgtcttggtacgtcttagggaatttcttagagcatctatcatttttcatgcatggacaccgc

SEQ ID NO: 193103 - DNA, 555 bp, Zea Mays
cttgatgattatgttgaacgtaatcaggtatgtctgccttcatagttgaccctcatactctgcatcccaaatcataggtcgtccaaaatgacctctaatttggaacggggagggggagtattatcctttttctattgttgaatgctaattgtgataacgtacagacatatgatcggccttttatttgttattttttgtttttttcgctcatgtttaggaagactttgatgaattcagtgatgttgaggacctctatagcacattgcctatggagaaggttgaagcacttgaagacatggtttcacttgctccttctagtcttgtcaaggtaagctataaatgctggctaatttgtttttactgcgattcttatgtctatgtgaatggaaacaactagcagaatcaacagtgttacactggtctgactgtgggagttggagttcgacaggggtgcggttgtaagatccggcaagatcagaaaataggtattagggggtttctttgcacgaacgcacacactgagtcgtggcttttatagattagacaacataaatc

SEQ ID NO: 193104 - DNA, 315 bp, Zea Mays
tggcaaccagcaagaaaggcctgatggctatggtgtatattcgttctgccttcatcctcatattcttgagttcaccctgtcaatccaacgaccagctgactcaaacaaagccactcttgctcgaagacacgctcatctcggagggcggggactttgctcttggcttcttttcccctaccaattccagcaagaagctatacataggaatttggtaccaccgcgtcacagaacgcacagtggtatgggtcgccaaccgtgacaatccaatcaccacaccttcagccatgctcgccatcaccgacaatttagagctag

SEQ ID NO: 193105 - DNA, 373 bp, Zea Mays
tgccactctacgtcccagcatcctatgaccacatggtttagacagtgctgtccaggtggatgatgaattgtggtgcccaaacggaggcacgtggcacgcctcttgaagataggtaaattatgtgcatcttgtcagttccttgaacatactataagatcatgtacctctctaaggtctaagacaaataagtgctcttaacactctacatcaccatgcacaggcactggttggaaacagattttgttggcgctccaagagttcatacttatgtactttcctttctcaaatcataacaaatcttaggcagttcaagcttagctgaatgtcaacttgcctccacgtgcaagatcccagaaacattgctatgtctcgt

SEQ ID NO: 193106 - DNA, 715 bp, Zea Mays
agaaaccaggtggcattattgcgcttcttgatgaagcctggtgagtttacatgtttcatgttttcatctgaccaagctattgctatgcttatgtatgcctggtggtgagaactgaaattgtttagaactttagatgcttccagtaggactgtttgtagctggtgcatttccagaccctcctttccgaattttactgaattgaacatccagtgttcacttccaaattaattgtttcacatatcagtcaaggattttcattcttgcatcagttttgtgaatacaagcatctaacaacagctaccttctttttgtgctgaaatacgtccatcagcatgtttccaaagtccacacacgagacattgtctcagaagctgtacgaaaagttcaagaaccacaaaagatttaccaaaccaaagctttctcgtactgcatttacaattcaacattatgctggagatgtaagtgtttccccctcgtgtttgagaaaaacatatttcccactataatacaagacttttcttgttgtttagtgctcatgtttttgcctgagtccgatcattttacttctttattccctaggtaacatatcaatctgatcaattcctggacaagaacaaggactatgtggtagcagagcatcaggaattacttaatgcttctaagtgctcttttgtatcagggttatttccacaagcaacagaagagaacacaaaat

SEQ ID NO: 193107 - DNA, 345 bp, Zea Mays
caagcgatgcgggaacgcgaggaagggaagccacgccgaggacgcctgaatctgataccaggttgtgatggcccgtggccgccggcgagtggagatcgtcgtggcgtgagcgaggagaccgacaggatcaggtaacgagttatctggtaatatttcttcttcaattatttcttaacccctctccaagtctgagacaaaacttatatagttcgcttacatgggccagcccacaacgcaactcacgcacacaaccaaaacagcccatcaaggcgcacgaccacccctgcttcagacttcatctcctgctgactccactccctggctcactgcattctccgctatggc

SEQ ID NO: 193108 - DNA, 275 bp, Zea Mays
ctagcaattgttcgcccgagctcgtgaattttgaattcgccccaaatcaattctctgccacccgaaacccaacctcaccacggccagccttattccggtcagttcatctccttctctccctcgtttaagctttcccttaagtctatgatgcttgccgacccacataatcgagctaggagccctttggtcactgggaacacgtaccaattgtcctcatcgtccgcggttcacgtggacagagcttgatagcttaccaattgtgaaattgatttagg

SEQ ID NO: 193109 - DNA, 311 bp, Zea Mays
cgggttgtttacgaaaaagagcgggggctttttgagaaaagggcgcgacgaaggggtatgcttgatcctggaccgcacgatagaaaatggatggcccagattagatcacccatcaagtgaaccggtatgcgacacagaccgttggatccccaagcagcggcccagatttaattacccgagattccatcgcgaccctcggatcctgatcaaacggcctcccgcccgagccgtggaggggatcctcatctaatctcaaccgttcccattagatccaaccgtcaactattagcgtaccagcgccagagccatag

SEQ ID NO: 193110 - DNA, 670 bp, Zea Mays
gaccggtgggcccgaccggtcggagacgtctcctacgcctaactcgcgcaacggatggcgcgattacagccgccatgaccgagtcgcctccctcacgctcggggggttaaaggcccggtgctcttgagcctcacgacgtccctccttgctctcgcctctttcttccagcgcgaattacccgaaagtcgttgctctgcgcctatcgcactgcacgccggagtaggaggtcacgccgccgcctaggctttcctcctcttgcttcccccggtgtcagcagagaagaacttggggctcgccaacgggtggtgtctgcgcgcgcttgtacttgggcactcagtgccttcggtgtgacggcaatttcttccccgcgctcctcctctgccgcggaattgccctcgcgtcgtggtgcggctccttcacctcaccgttgccggtaaaaagcactctcctgggtccgccgcattctcaatttcgcgtagccttgggtaatcgtggttaagcaatggcattttgggcgtccgtgattgcccgcctcggtgcacggccggtgtgtccgcgcattctcgcagctcgatgatctggcgccataattagttgtgagattaccttcaccggtttcgccaccttctccactacgttgtgacccatttaatttcggaatgggtcatcg

SEQ ID NO: 193111 - DNA, 450 bp, Zea Mays
tgaagggttacttcagcagctatcagctgggactttgcatcacaagctttctctttacgcggatgacgcggtggtttttcttaggccggtggcttcagacatcaatttggtcctggagatccttcggctttttggggaagcctcggggctcaagaccaatgtcctgaaaagtagtgtgttccccattcgttgtaccgaagatgatttgatgcgggtccaagcttctctcccctgccccatttcagatttcccgtgtcaatatcttggactgcccctgtccttgggaaagctttcaaaggcccaactacaggcattggtggacaaagcagctagtgtactcccgggttggaaggccgacctgatgacaaaagcgggtcgagctgtttatgttcagtttgttctcacagcaaaaatgatttatgctgcgatggctttggacctccctaattg

SEQ ID NO: 193112 - DNA, 556 bp, Zea Mays
atgggcttattgcagatattcttggagattcgtacattcttgcactctcaaggttgcagcagatgcttcctcttagtgtaatctttcctccggcctactcaatttttgccatggttctttggagacgatatatttttaaccgcgaagatccacagctttatcagtctctgtcaaacgcaataagcgatattaccagacatcaaccttttcgggagatttgcttccgcaatacacatcggctgtataatcttctggcttcagatgttggtgattcagagtttgcagcaatgcttgaaactcatagtcctgacaggaattcaaaaatactgccatttatacctctccgtgcccggctttttctggacgctcttattgattgcaacacaccaactattcagggagatggagcttcggagccttgtgaccccaaagataatgaattaaagctttcagagaggcttatgcaacttcttgatactcttcaacctgcaaagttccattggcaatgggttgagatgaggcttcttttagatgaacaagctcttatggaaaaagt

SEQ ID NO: 193113 - DNA, 1169 bp, Zea Mays
cacttcatgctcagtaatggggctgtccaactcgatcaaatttggaaatggagtgccagcagtttccagagcctcaaggttaatcgaaatatttctgtctttactagccccaattaaatcaaagtaaaactgatccactgctgcagcaatgtcgctatgagcagtaaggacttgatttccaacagtaagcttggatacactgtttttcttctttctgtaccttgcaaaggaatggaacaacttagaatttgcatctccttccttgagccaagaaattcttgatctaaggcgggcaatggtacgtttggttgaggccaaagccagagcaagcttcttcaatttacttagcagccacctttccaacacagacagaatacgaccatcctgcgcaatctcaagttgatggatcaaatctctagcaagatgcagttgagtctcaatgtgccccaccttcttgctgctccatccttgaagggctttggctgtccctttgagttttaaatcaaaagtggagaaggggcagtggccaacaggaaccgaattccaggcgctgtgcaccacttcgtggaacccttcaattttcgtccagaatgattcaaagtggaagcgtcttttaacacctttgcaatctttgaaacccaataataaaggacagtggtcagaatcttcagaagccgcactttgtaacactgcaccaggaaacagctcctccgaatcaatagagcacaggactctatcaagtttgacaagagtaggctggttctgctgattggaccaagtaaacttgcgcccatggagtggaatttctttaagagcgagatcatctaccaattttttgaatcgacccatcatagcccgattaatatgagagttgtttttatcctcggcatgcaaaatgagattgaaatccccagtaatcatccaagggccctgacaagctgctctaatatgtctcagctcttgcagaaattcaatcttggcttcattagattgaggtccatacacacaagtaagccaccactggtgtccctccactgaacaaaactgcacagaaatactatggatgtctgtcctggtagctccagttatccccaagtgtcgtctccaagcaataaggattccacccctcgaaccattagaaggcagggccaatgaaccggtaaaatcag

SEQ ID NO: 193114 - DNA, 727 bp, Zea Mays
catagtgaatatccaagaatggattggttccttctcttgctattctccttgaatttacaggagatctactgccatctgcttccaaatctgctgagctgagatgccaggctcttagagtcactgcaaatgtcacttctccacccggtttaatagggagcgcagatttccatgtgctatgagcaatcgaaataacagaatcctgattcttccctgacaatgcaacatttgcttcttcaactggcacggttccggcatttgtcagtgttatcagaacatcacgaatttctccttcataaagaagaatagaaccatctccacccacaacattggcaattaacaatggcagaggaggaacaacagaaatgctaggaaagttgacactcttgaacttgctagagccacagcatctgaaaggatcagaaaggacaagcccttgtgcagctccaaggagcaaacaatcgacctctttgaataggtgttctgtaataacaccaaagcaatgaacaatgcacccaggaattgatatttgtccgacttttgttggaataccagataataaaactaattttgaagtgttaggtggaagactaacgctaactggaaaggcatcaaaattcccagaatggacagagagatagatgctctccacaactatgtcgaagctgcaagggtttgctaactcaaccatgacttgaaccggctcccccacaatccaactaagctcttg

SEQ ID NO: 193115 - DNA, 315 bp, Zea Mays
catccattgtcgcctcccttacaccgcgtgctctccctagtggcttgcttctcccttacctcgtgcacctctcccctgtggctcgctcctcaccgccctcgtgtgcttctccccggtggcttgctcctttcctgcctcgccctgctccctagcccatctatcgtggcctcccctacaccaatacatgctagatccaccacctcctcacccatcgtcatctccactggctgaggcatccattgtgacattagcgttagcattggacacgtctggtaagtatacctcgcttggttgtagtttgcaaccctcattgag

SEQ ID NO: 193116 - DNA, 382 bp, Zea Mays
aaataaaaaaggaaaagactaaaacctagtttgggctggcttctccaattcggcccactctttctctcttctaccccacggcagcccatttcctcgttccctttttcttttctgtgaagtcactggcgtgcgggcctgggtcctcggtgtctcacgccgcgctgtgcgccccacgctcatgccactgattggtgggcccacggcaccgagtcgttcttctcgccaggatcgcggatggccggttcggaccgattcctcctccctcaaacagaacgcgagttctctgcgcgctccgtgggaatcgggggtctctagctggccgttccggtctctgtcccgagccctatatatgtgtcgcttctcctctatgacgcgtagccac

SEQ ID NO: 193117 - DNA, 440 bp, Zea Mays
atactgaactaggcgtggtcctcctcctggacgagctggggtaacctgaggtaggcggcttgtgactcatgaattcctggtgcttgtcccggggtggaaatggaggtggtggtggcagtggtatttgctgctgttgttattgctgttgctgttgcgccctccttttctagcgtatctcctctctttcctaacgcagctcctggcgtatctcttctctttcctggcgcatctcttgacgttcctgctgcatctgcgcacgcatatccgccatgatgtcagctatttgttgtatcatcctcatctgagctgcaaccattgggtcaacttcgactagtggaggcggcggtggaggatccatcgctgctggttatggttggggttgtctatatatccaccgagtgtgtcgattgggaggtggatcaattccaccacccttcctg

SEQ ID NO: 193118 - DNA, 662 bp, Zea Mays
ccaaggtcggctgatgaagatatcctggcgccggcggctggacttaactgcctgggtattcccgaggcatcaaggctggacccatggtggaagacgaacaatatcctaggcatggcccccactgtcttcatgagtgaggcacgcgggtcgctgaaccctcccaggaatatttcgccccagtccatggtgactgggccgctggaattaaatgggctgggatcgccccatgcgccaactcctgttctccccccgactgggcccgtccctgggtcgccggagatggtcagtccatctgtggtctcgccccacataattgggccgctggagacacacaatctcagatcagtctcgccccagggactcgagtttgatggggacgtctctgtttttgagtctgggccgcctgagacggttagtgtgcatgcgatcttgacccttactgggcaggtcgagacccagtgcgcagtaccagtctcgccccaactccagttgaagcagagttcttgtaggccgctgctcaaggtatactcaagaagaaaatgtggaacaactcagctgatggaaaggaccactgatcttcaggacagtgaggaacccagtcaaggcatttcggatgggataattaactcggccactgacatctcagaacaactgacgattcc

SEQ ID NO: 193119 - DNA, 292 bp, Zea Mays
ctttttcatcatcaccttgaggaccatagactccagttagccaccaattacgaccttcctgctcagcgaaaagaacagaaactgagaaattatcaacccttgaagcgacggcctgacaagaaccccccttccaagcaaccagaactccacctctagtgccaacagcaggtaaagcaacgaagttatcatagacagtcccaaaaactgaaaggagcacctgctgggtcaaaatagcgaccttcgtctcttgcagacaaacaatatcagcattactagagaggatgacatccct

SEQ ID NO: 193120 - DNA, 350 bp, Zea Mays
tgtgttttgatgaagacgacgacggaggcgcaaatctctggtggccgcttcatcataattaccttcttcatcaatcactgcatcatcgggcagacgtggacgaggaggtggtggtggcggtgcttgttgttgttgtgtctccaacacagcaagtccgtcgaagatataggacaatcgtcgatccagcctctcgtaagtcctgccaaggtccatgttaatgaaggcatcatgcactgacttgtggaccatctcctctatttgctccttcaggagcttgttgtttgcctcaagatcttggcggctaacacattcatcgaagtctgtagggatccttgcttcttcgtcgtcgc

SEQ ID NO: 193121 - DNA, 375 bp, Zea Mays
catctcatttctcatctcactttttgtgattagtggatcctcttctttcttgtcaccatgaatcattgcccttttttcagcctcttcttccaacctttttgcttcagtctcctctgaactcatcatcatcaatgcctgcaaacactaagacgaaccaggcttccttcccttctctcaatcagtagaacctccaacctctgtagcagcaccacctccactaatcgtagcagcagcccactccccccggcagcagcacttcttccaccgccggatgaacaaacactgcaggggaggacccgcctgacgtcctcgccctccgctgtgctgtaccgcagctggtgtggctgaagtaagctcccctccacctctgcccgc

SEQ ID NO: 193122 - DNA, 397 bp, Zea Mays
tttggagaagcttcaggcctgaaaactaacatttaaaaaagcaacgtgtatcccatgtgagatctcttctttcccctgtaaataccttggtctgcttctgtctctgagcaagctatccagaaatcaaactcaaagcataatcgacaagatagctgaccaactccctgggtggaaagctgacttgatgactcgagctggaaaaaaagtgcaagttcaatatgttatgacaggaatggtcatctaccttgcaatggcggtggacttacctccaagagccctcaaggacattgataaaattagaaaatgattcctttggcgtggaagaaaagaagtcagagggggacactgcctggtggcttggggtagagtgtgcaggccagttgagttcggaggtttg

SEQ ID NO: 193123 - DNA, 295 bp, Zea Mays
aaatattcaatttctaattcatttatagcatttaaatgggctctggaccgggcgcaacatttgcagaaaatacaggggtcttgggggaaatttcccaagacacagcgcacagcactctctggatggcgggttgattcatcataaatagaagggctcataagtaaaaatgtgccgcgaaggggggtatcggccagctccaaccgttggatcatacgtagacggcgtggattagatcaccacacgccacgaagcggtacgaaaccgtggcccccggatcataaatccacggtttaga

SEQ ID NO: 193124 - DNA, 399 bp, Zea Mays
tcttcgctgtcgccgttccattcgtgttcgcgatttatttattttcttctcgtccgttgattccgttgatccccgcactgacgcttcgacgctcgctctatgtcttcgcaggccgattccccgcgcaggaggtaactacgcctgcctctctattcgtatatatatgggcgtcgtaaccctcggtagtggtgatgttaacttgtgagatctcagcttagttctgtggatgccgtttgatttcgttgtagggtagtatgggaaaacggagcatccatagagaagataataggatatgcgggagggaatgtgtggttgtgatttctgttgttctatttgtcatgttttgaggtaaacgatgaatagtgaggctcaccgtaccttgcttcttgtgcttatgag

SEQ ID NO: 193125 - DNA, 429 bp, Zea Mays
gttcccagatgaaggcatatggctatggaaagttgaacttccttctctcagtgccattagatctttgagtactggagcagtgctagggcctcaagtggagaaaggggtgaactggtacctgcatcctgaacatgtgaccatattacttgtgaggctgatgccacaacttgataggcttgctcgtatcattgataactttgctacttcggtatgtactggctttatttcttttgcttatcatatcattccaaagcaaatgacttttttccttaccactttttacataaatcatcgtatatggcaggtcttgatggtgatacaggacatgcttcgtgttttcattgttcgtgttgccttagaaaagattgagtgtgcagttgttcttctacgccctatatttatgtggttagatgataaagttgacaaaac

SEQ ID NO: 193126 - DNA, 354 bp, Zea Mays
ggtgttttgtgtctgatgattctgggaattcgattgtgtggacagaggagtcttcggatgaggacttggattattttgcagcgttggatgtggctgcgggggagacttctccgcgtgtggtgggtgctgaggatcttacgggtgcgaggactgggtgtaggcggcgaagggcggtggcgaaacggagagtgagtaaattgtcgcgaagtgataggcatcatcgtggtgagatggagggtggttgtcttcgtgtggatgggactggcaaacgcgaattgaggataatgctgttcaactacagggagatgtgtatcatcccgaaggttgagccaatgtaatgtgtgatgccctcgc

SEQ ID NO: 193127 - DNA, 384 bp, Zea Mays
cattgtagaacatagaggcgtattgccacttgcgatgattcgtcgttcacacacaaaatattatcatgtgctacaccaattctggaagctactagaggaaaatgtgaggaatataaagaaactcttgttgagcagatgtagtctagtggtctccgtgtgcttgctgcagtgtaaccaaactccaagtagatgtgctctgggctctggcatgtggtatgtgatgaagtcgaggatggtttcttgccgtttgatgaccagtgtagtcgttggttaacttgtcagtcgtaaactgatgttgtcagttaggagcggataaagtttgtgtgtgttgtcagtgtatctgtgtgtaagtttattggacagaccgaaagatacaccacgaac

SEQ ID NO: 193128 - DNA, 331 bp, Zea Mays
gccggactagcacaacaagtgcgaaaaaaccgaagtctaccgcaaagactatccgcgcagaagtcgcctaagggtgcagccggactagcacaacaagtgcgaaaaaaccgaagtctaccgcaaagactatccgcgcagaagtcgcctaagggtgcagccggactagcacaacaagtgcaaagaaaccgaagtctgccgcgtagactatccgtgcagaagacgcctaagggtgcaaccggactagcacaacaaaagcagaaacgacaacatcaaaccgtccgcgccgagaccgactatacgcgcaccagcacagcataacaaaacacaccag

SEQ ID NO: 193129 - DNA, 992 bp, Zea Mays
aagagatgaatagtgtcaagcgagaagttatggcctcggggatagcaactaaaagagaatttgcgtttaatacaccaatgtttggggcaaagacatttgtgacatacattgagccagttttcagcaaaggtggggaagcgattggtgtgaattatgttgcaatggacataacagatcaggtacctttatgaatttaaacctcttatgatgtacctttgattccctttgcttctggatattggaaattctgatattatcattgtgggggctctaatattggcactagctgtatgattcttcgtttctctttggtgtagtgtgcactagtacaattatatttttttggtaaaatatggtactatataattcttgtgagtctcctaatagatgtataatatcatacctagaactgcatgctaaaatttcactaccacaaaagggggcatgatatttcccaaatgttcaggatgtagtatatatttttattggcttgttactagcacaagtgaccaatagtaaacttttagttgctattattccacagatatgttaacgattttgatttttaatattggtgccttgagttgagcatacaactatttttctgagggtgtttttcacatgttatatcctgcatgaaaaaaaatctgttttcacccacggcatgatgttctgcatttgatttcatgcttttgaatggcaattaatcttcttctttgcacattaggtcaaaagaagagagaaaatggcagacataagggtgagggaagctgtccaaaatgccaaggaaactgaacttagcagatctcttcacataacaggtctgcatgttgttacaatactcttttgatgcacttatgctagactgggatactgaacactttcttaacattcacattacagaggaaacaatgcgagcaaaacaaatgctagctaccatgtcccatgagatcagatctcctctttcgggtgttcttagcatggctgaaatt

SEQ ID NO: 193130 - DNA, 376 bp, Zea Mays
tgaaaatatgtggaggttgaccagggatgatgagaattgggcactatcaggcttcgagattatattccctatgttgctagagaaggccaaacacctaggcatcgacatacctttggatgatcccatgttggaagctatacgagccaaaagagaactcaagttaaacaagtatgtatatatatacttgctgcttcattctatattttttctgatatcatcactttaaaacttgaacacatgtactacatacttcaattatttatgtgtgtaggatcccaagagaagcacttcatgctgaaccaacaactttccttctaagcatagaagggatgccaggtttggactggaaaaggctacgtaagctccagtgtccaga

SEQ ID NO: 193131 - DNA, 310 bp, Zea Mays
ctgagaaggtattgcactcttcacgtaacataataagaatgacattttgtgatgattacaagactagtcaacagccagtttcagtacacattttcccctaaagaccttttttgctttatttgaaggttgtccgagtgtgggatccgaggacaggatcgaaaaacatgaaattgagagggcacactgacaatatcagagccttgcttgttgattctacagggaggttggtgtctaggcatttttcaaatgagttcttgtagattcatctaggctatgctgctctagttccttggcattgcttaaaaattga

SEQ ID NO: 193132 - DNA, 545 bp, Zea Mays
gggaattcctgatgatgaacggcaggtccattttgaggtgcctctggatcctagtgacgcagaaataagtgctatgcttgatttgctggttgaggactcttctgatgctgctcctgctgggacgttggtggtggcacctcccacagaagctgatataaccttggatattcagaaacctgtcagtactcgcccgaggcgtccttcccgagccaatcaacttgatccttctgctgacgagccgaagaagaaaaagagacgtctccgacgagtatctagtttggatcgggatgttggtccttcggttcctgctgctgaagaagcgcccgttcctgaatttactgacgctgaactcaatgggggtgctctacctgctgctgaccccaatgggtgtgctccttctgctgctgaccccaatgggtgtgctccttctgctgctgaccccaatgggtgtgttgtctgtgttgctgatgaagacgactatgaggaagaagatgaggtccctttgactcggaagaacagtcggcagtatgtcgctagtggtgaaa

SEQ ID NO: 193133 - DNA, 281 bp, Zea Mays
gttctttccatcgtgcaggttcaataaaaccaataaattctggggttcaactgaacccccaatccgagtataacggccactctgtgctgcaaggtttgtctaagattttcgtgcaataacggccatgtggaggctcaagcagttcatccccaaggagcagcccagccccagcggcctcgagggtcggacggtcgatgttggcaatgtcaaggtgcacgtccgagaggccattgctgagggtgggttctcatctgtctatgctgctcgagacctggtaaacc

SEQ ID NO: 193134 - DNA, 330 bp, Zea Mays
gcgactgatcaataagaaatgtgcgatctttctttcagtagccaaaggaacggctgcactggccatggcggtcgtcagaactgcttgtcgtcggaggcagcagctgctggtggtgatgctggccaaagcagtagatgcgatccatatccatgacgttgacttcggccgccctcctacgcttgtacctctccttgaagcacgcctggcgcagcttcttggtcctgtccgtgagctcgatccagggattgtcctccatgagcgtgcagtacgtctcgagcgccgcaagctcctgctgcacagccaccgaggacatgacgttccccatttcct

SEQ ID NO: 193135 - DNA, 898 bp, Zea Mays
gcattgtgtgtgacggtaatggaacaagataccaagttcatgtacgatcaagagcaacaggctccttagacatagccaactaccattctggaatgctagaggcttccttataagtggatggctcatcaacaacattcactttaggaaagccatacctgtcatcaggacgaatagtgctacaatctcgaagattatacggtggaccaacttgtggctcatcagaaatagtaggtggcttatcagtaatattatttgaagcatcaccattgggctcattaggattggctaatgtgggagggctaaatggaaggtcaccggtggttttgggactacgatggaagacacacacacacgtgataggtggtttggaaaacgagtgaggtggcagaggtagaggtgaaggtggcatggtggaagtagggccatgaatcacaggagtggacggaggtgtggtgacaccaacattggtttaaaaaggatgccggcacatagtgaggtggcagaggtagagatgaaggtggcatggtggaagtagggccatgaatcacaggagtggacggaggtgtggtgacatcagcgttggtttaaaaaggatgaaggcacaaaaaggatgtgggctccataggttagtatgggggcttagtagaggggttataaaagaaaggaaaatccttaggtcacatcatgcgaaatacatattcgacgagatagttgaggcattagacaaactagatagcacaacataggcagagtggcatcacgctgatgccagatagctagacatggcagaagaccttgagaggtgcagtgtagagtgggctagagctattggatctgatgaccacgttccaggaagcgagatccttcacagaaacatcgaaagggttaaactccattg

SEQ ID NO: 193136 - DNA, 454 bp, Zea Mays
caccaacgtaattagagaattgaggcctctacgaagccccttgggaacagcagcaacagttctcttccaccaacctgagaatcgagacactgagggctgaggagccaactgcagcagccccaactgttgaaggatcagggcccaaatttggcgagcaaaaacacacccaaccaacaagtgatgcaccgtctcattcatctagtcacaaaatggacaagacactggatggggcaggttcctccgctcaagacgatcagcggtccaaacccgattatgatacaccaaccatataaagaacttacaacgcgacggggcccaggttttccagattctcttccaagggccaaacttggtagagcccacgaagaaggcctcatacgcagacttgctgctataacagccatcttgtgtcaacttccacctgaactgatcaggaacatcagattgcagcacg

SEQ ID NO: 193137 - DNA, 1071 bp, Zea Mays
gctgtatcctggaccggctgcggcaatggcattgtggcagttggcgcaggtgtttccatgtgggcaagattggagtcctcctggcagctcgcttggaggtctacaccgcaggtgccgcaagcccttgtctccactacctgttccatgcaaggtcctgtcgcgacagtggcagctcttgctccagccgagggcagtgtgcctgttcttgtgtttctgaacgatgccaggagggggctggagcaagctgagcttgtgcatcctcagcctgtttgtatgatccagtggagatcctgttcgttatacccccatgatctgtctgagatcaggagagagatcctcatgacttgctgctttgatgggactgtccggctatggagtaaggatgaggtgtctaggtcgaagaagcagcgtggtttgctaatatcattcagtgtcattgcagtaatagaggtgaacaacactctgaatggagtcctcggagttgatattattgtgagatggtccatggaatctggcagcgttgtgtcaagggacgaacaaggtagattcaagttgttttcaggtgatttgagggagagccaggttggtaaatgtgagtggcttgtaagtcttggccccgggccttgcattagcttttgggctatccattgtttggatgatgtatttccgccaaggtacccacggattactttatggaaacagagcaaacttcagggctggggggattcctatgttaaatcaggtcctctaaaatctatggaacagtcaatttttgttgaggctgtcatctcaagaaggctatgctctggtccacctgcaacatgttttttgcttcatttgctggtggatgattcgtttgcttggtcaaccgtatccaccaaactgttagctgattctgggaaccatgctttaagtgattctgctaaaaatatcttgtgttgtttgactaaacctgtcaaacaagatggacataagggtagcatcagacaagtgtctgtccatccatatagctgcgaaatagagttagctgtctccatggattcaaacagaatgatatttttctggtctctg

SEQ ID NO: 193138 - DNA, 616 bp, Zea Mays
gagttggagagccttgtgggctacactgtacaagactcagttttgaaaaagctagctcagttagctcagaagctcgattcccttcaacgagcaagtgcctatgaatctgtacacagaatagcggatgatgtaaatgaaaatgatagaattgaatttggagcagacttcgatttcaagccacttgcccgtttcattgttgatgtttctcttgacgcacccttagaaagtgctgaattgggcagtggtccatttgaaaaatggcagtatgatgcttggagcacatccacaactagtcattcaactgctgttaggggttctgtgagtttgaggtggctgaaagatcagtgtgctttgataactaaaagtggtggctcaatgctctcaggagatgaacttgcaatgaccttgtgcagagtgctcctatcaaataaagcaggcgatcaggtttttaacgttctactgaaaattgcctctgttttaatttttgtttctgcaatcatatggtgctcccactttgcagatagctggtgaacttttggacctggttggcgacaccgcttttgaaatagttcaagatcttcttttggtaaggggccttgttgtctctctttcaagt

SEQ ID NO: 193139 - DNA, 409 bp, Zea Mays
caacaccaccatataagcatatgtaaacagaaagaagaagaaaaaagagaaactcactcaaatgaccaaaagccacacaagtcatttagagtaaggaaaaacttggtccccaaagaaatggacaatgctcaacacgaccaagtaagaaaaagaggctagcgctcaataagaggcaaaagtaggtctcaataccactagctagaagccaaaatctcatcggacgacaagaaccaattcagagcataaaatcagcacaaaatctaaaatcaaagctagttcctctggaaacaggcaaacaactcaactcaactagcaaaacctcaaaaagactcaattttcctcccactgtcacaatactcccaaaaatctctcctagagaccaatagcttcaattaacacatctctcccc

SEQ ID NO: 193140 - DNA, 591 bp, Zea Mays
gcttgatccggcctgaggtaccatgcatagcttcctggacttatctcatgctttgttctcattccaaacacaattgacccaaacgttgcaataacaaagagaatcacaaaaaggagatatattattttatccattcttcgttcaactgaactcctctttgatggtggctccattgcattttgcatcacctttgtatcatgtcccgtaaatattatggtgccatatatatacattgtattacgaagttttgaatcccttagcaggacctgttccggagacagagaatattgttgcccattgtagtatagtgttcctaagaaagaatacaatttctcattcggatcctcacaccgaatgaaagccttgaaactatggaaatggtcatcattcaagcccatagtcacctctaatgcctgtttccgcttcaagtttgtctcaccatcaagattcatcgtctccacatagcataatccatcacaagagctagacgaaaggaaaataagatcagcagggaagaactcatcctttttaactttaattatatcgccaactcgaagcttcttccattctgtctcatgaaatgattggatc

SEQ ID NO: 193141 - DNA, 381 bp, Zea Mays
gtaaggaaagactccatccaagatttttggatcttgattcatctgatgatctagcttgatatttgaaggcttgagttggggctgaagaccagatttggcttgactcttatccttccttacgaggctgatcctttcttcctcgagctttggtgtcttcatccgggtttgtgacaagatgggtagagggttcaatagctatatgctagatggaattagttgtgtaacctgttttgtaggtcaagttgttgggtagggtcgagttgatctaagatctcaaacttgtttataggagcagggtctaatgtattccactaggattgactattctgttaggtaactcattttagattggatcatagtagattagatggagtctagagt

SEQ ID NO: 193142 - DNA, 303 bp, Zea Mays
ggcatattacattgatcatccttagtattgcattcatttgtattagaccccattaaaatttcctgtgaaataaagcaaagtccagtgaagacacaaatgttatagagcagcatatgtaatacattataaagatttgttccatacctcgttcccatcatctaatttgcgtaagttgtctatagccatttcgtctatttcatacgcttcgacctatatcatcattacaaacatggatcattatcgacaagtaattatgcaaaattcataacatcacgaggtgcgtacctggatgtcatcgcaaac

SEQ ID NO: 193143 - DNA, 642 bp, Zea Mays
tacgcaggagcaagcacaaactgattaacgtaccttgctgacccggtggaggatggtggcgtcgtctccggcgccgaagcactcgatgacggccgcgaagacgacggtcatgagcggctccgtcatgccgttggccaccgcggccaccgtgccgaccgccataagcgcggcgtccgtgcggtcggcatacttgagcatgtcaaggaacggcaccagctgcttgtgctccgaatagttggtcgtggccccggctgcgtggtcgctgctgcggcgtccctcgttcgtcgtcgtcgtctcggcatcgtcctcgctaccgtgtctcgctcccccagccatgaatcccttctctctctatggctggatcctagctgtttgtttgcactactggtgcttgcttgctctctcgcctgtggcagctctttgtacctatactctctatatatatggcaggccttttgttgtcaaatatcgaagccggctcatatgaggtcctttggttcactcgtttggtcgaccatacacaccttagcttgtgcggtggtcatgtcgagtcctactctgatgattccgatgtttatccagcatgggcaacacgcgcggtcgcgattgatggttggtctagccgtctaggccggcaagggc

SEQ ID NO: 193144 - DNA, 813 bp, Zea Mays
tagcaaatgacattttgtgataccaggtttcctataatcccctctattcaaggcatacctacaaggtgtttatgtccactcaagaaaaacaaaacacatcaatatgccacattgtttctaaaattaaaataatgaccttggaaaatttagccaaattacgtgagtgaactgtacaaagataggttaaggttgtaaggcaccttttttccaccatacagttgcgaaaaagttggaatataaagaattcaaaacaatagatcaccttttaaacctcaaatgacgtttctatgatattgagggcattgtattcacaactagtggatgatgacgttattgggctagctaatgaccttttgtgatactaggtttcctataatcccctctattcaaggcatacctagatggtgtttatgtccactcaagtaaaacaccgtacatcattttttccacatcgtttctcaaaataaaataaagaccatgggaaatttatccaaattgcgtgtgagatctgtccaaacataggttacggttgtaaggcaccttttttccaccatacagatgctaaaaggttggaatataaagaattcaaaacaatatatcaccttttaaacctcaaatggcgtttctatgatattgagggcattgtattcacacgagtgggttttagagtacaactagtggatgaagacattattgggctatctaatgatcttttgcgatactaggtttcctataatcccctctattctaggcacaccaagatggcgtttctgtccactcaagtaaaacaccacacatcattatgccacatca

SEQ ID NO: 193145 - DNA, 344 bp, Zea Mays
ttttaatttcatcggatcttgatacttcagaagcttggaaaaatctcattcaatcatcccaaaacatttctagacacaaaaactactctatgactggttagtttcaaatgctatctgtatgtgtccaaataataatggttttctggattatttcgttactaaaagctggggaattatcagttaacttttccagattccgatattgctgtgttgttatcaactacattttttatgaggaaacaattgtgggaggctgaatataattagctgtgcctgtagctgcatattattagggtgaattagttgtggtttaactaatcacgatccttgtaccgaatcctaca

SEQ ID NO: 193146 - DNA, 304 bp, Zea Mays
agaaacctttccttatcttatcaatttccttaatgacccacatagggaaatcaatagccatagcagtataaacacacatcccagtgagaacatgttgcactagaattcttctccctgccctatttaataagtcagccttccagttaggtaatctgtcagcaatcttatccaccaggggccagagttgttggttggttaatctatcaagggatagaggaaggcccagatatttgcaggggaaggaggcaatatcacaaggtaacatatgttggacgtccaagatagtctccttttctagtctatg

SEQ ID NO: 193147 - DNA, 672 bp, Zea Mays
gggagtacttcgtagagcgaatgaaacgtgaggggatgtctgatattaatgagctgtacagtgagaaggaaaggctgagggatcttcggcactgggtctcatataggggacagacattatcacgtactgtgagaggaatgatgtactattatgaagctctcaagatgctgacctttttggattctgcctctgaacatgatttaaagactggatcaagggagttagctactatgggttcctcaagaattggatcctcaaggcatgacggagttgctggtgggtcagggtattacagcagggcatcttcctctcatgcattgagtagagcaagcagtagtgtgagctccttgtttaaaggaagcgaatatgggactgtcctcatgaaatacacatatgtagttgcatgccaggtatatggacagcagaaagctaagaatgaccccaatgcttttgaaatattggagctaatgaaaaattatgaagcattacgtgttgcttatgttgatgaaaggcagatcaatggcaacgaaaaagagttcttctctgttctcgtgaaatatgaccaacaattgcagcgggaggttgaaatctatcgggttaagttgcctggagagttgaagattggcgaaggaaagccagaaaatcagaatcatgcactcatcttcacaaggg

SEQ ID NO: 193148 - DNA, 346 bp, Zea Mays
gggaggacgacgatgtcgatcacagctctctagttcgtgcaaagcatgacgaaacacaaaagattgtacaggttcgggccaccacaaggcgtaataccctacatctcgtgggtttctggaggttgtattgctcttcgttcgggggtttacaagtgattgctaaaggtaggagatgaaggtggtcatttgatctagcgaggtctaacccttttgtaggagtacctcctcagccttatatagccaattgaagaaatctctgtctacatatcatagcacttacatgggtctatccaccacctgctacaagtgtgttgaatcttctagtcgcatgttagcctcccccaaa

SEQ ID NO: 193149 - DNA, 894 bp, Zea Mays
tgtatacacctttaatttttccacagttgtaagtttagtttacaatgtccttatcattttctgtaagactaacatgtttcttatgtcattgtaaacgtgttagtcagtttcatttatctaaataacgattaaattatatagacatatagtcataactaaatattagagacttttttaatcacgctgtctaattaaatgacatttttcagtcatttcgttgcatgttgcaatataagacagtaaactgtcatagtcgtctcttacatgtttaaactcaattataagactttcaactttgttcaataaatcaatgttttgtttcgcagctttattttgcaatgactagaaggacagcagcataattaatacatcaggattttaattaaacagcaccaaataaaaattgcattgttcattaacaaacatctatcatccagcgtctaaagttgaaccggagaatgagcatatgtaagaaattaacatgcccagttcacatgaggtcacgcagaggatcacgtgagtcgtgagatgttatttgtctttttttctccttccaaaaaatggtatttatgcattcttccgagtttgaatcgacacatccacgaggatggtaacagaagatacgcaggcaacggtataatgttctaactgaagcacaacatctagggacgagttgaactgggcatgttaatttctgtcgtatactcattctctatttcaactctatacgttaaatgatagatgacagataatgaaaaatgcaatccttatttggtattgtttaattagaatattataatgtcttaattatgttattgtccttttagtcttttcaaaatgaagctgtgaaacgaaacgtcgatttattaaaaaagttgaaagtcttaaaattga

SEQ ID NO: 193150 - DNA, 610 bp, Zea Mays
caagaggacaacgagtatgttaccttttacgcccaccttgttggagtccactttccctctcccaatttctctacaccgttcttgattactacggtcttcagcttgaacaccttacgtccaacgtcgtgattgtcatctccacctttgtctacctttatgaggcattcctcggagtgaggccttgcatcaccttgctttgacatatttttgttgcttgcacttcttgtggccaaaatcccttaggaaggtgtacttttagttgcataccgggccctggtgtcttttccactacatccccaccatctttttctaggaattgggaatgctagatgacctcttgggtatacgtaattgcctatcggagcagcttctggagatgctggcaggggaggcagaggtggaccggtcctaggtcctagtgggaggacgtccctcaaatggatgaaggttgggagccagtcctagtgaggatcaaggagcttgttagggccagcctatcgacgatcaaccttctagcccgtttcctggctcgaaggattgccctgcttcaaagacacataaaagttatgtgtgagtacgacgaggtctaggatgaaatacgggtcgggct

SEQ ID NO: 193151 - DNA, 280 bp, Zea Mays
aaagaaggtagctcagcagcagctgtcccccaatgccccagcaaggcagaatgtaccttagcaaggagcaggcaatcatgttcagacgtgctacaaccatgggaggatgaaccatctagaggccgaagcagttcaggaaacactaggcatgatagtaggtacgttcccagtagaatcccatcttgcataagtgttatttgataatggagcaacacattcatttattactcatcatgggtagaagtgcataatctcctaataaccaccatgtcaacaccaa

SEQ ID NO: 193152 - DNA, 607 bp, Zea Mays
caggacggcccaaccacagcagaagtgcgctcgcgcgtgtgcccgcgtggaaatcttgcagaaggaccctcgggcttttaactaactgggaaggggctcggttactatttctttgcgtcactgacagattgcagaaaggtccttaaacttctattccttcgcagaccaaggtccacgacgaggaacagctctcgccgcaccccggcgagccaattccggccggccaacgccatggctggagctcccgggcgacaggaacacatttgaacctccaccgaacacttcccctaagttaattccaggaacggcgcacagaaacgtcctgaccatggtgaccgcgggtaaggcggacgaccacaagcgttcatggtgatctaaggcaacccagttcaattgagcgggtcgacgagcatgatgagggcctagggatgctagaacaagcgacagagacactggaactaacctaagttgggctggccacggggaggtgttcatcgcggcggcggaaaaacaatttgggggaaacgagaaatttgcgagctctagggggtgattcgaagcacgagttgcttcactggttgcgtaattacctaaaggagcggatggt

SEQ ID NO: 193153 - DNA, 300 bp, Zea Mays
cgcctatcaatatgtgggataaatccggaccgtccccatgtgactcaacggtcggatcacataatccccaaatccgcacacaggcgcggccgcgccgtgcctcccacggcggcgttgtgaagtccgatgagagattccaccctgccggcgaccctacccttttaatccaccggtgcagcgcgttgagggtactaaggcaagggatacggtggcggtttacctgtgaatcgatcgggagcgagccctgaccgcgagagcgggcgacacagcggcggtggcagagtccggcgacgaattctc

SEQ ID NO: 193154 - DNA, 341 bp, Zea Mays
catgtctgaggtattgcctcctgctgtcgaagatgacgatgacatggatcagtttcagcagaggcggcgtcttcttgggcatgatcattcagctcggccctcggtgcattcgaggcttgggccgcgaacctcttcttcgtcggctgctgaacctgtcgatgacgcattaccctcggttgtgttggttgatgagttggctgtgcctgggtctgatgcccttgttgacgctgaatttttcccatgtgcttcggttgaagagttgttggctcctgggcctgctgaaccagttgatgctacaattctcccaaatgacttggatgggtctgctgaaccatttattc

SEQ ID NO: 193155 - DNA, 291 bp, Zea Mays
ctggtagatcgtaggtagataatggtaagcatgccaaagggtagaattcagtgtagttcggttacataaaccccaggtatgtgtccattcaggaccgacctttaccatttagcttacagtgtataccaaacttgtgaaaggactatcccgagtcaattcagtgactataagtatttacaattccgagagatgtatgcgacatcacataagcatagaggtcttagatagaacgagtaaagtggttcgactggaacacactatggttttcacaccaacatagtgaaaattttc

SEQ ID NO: 193156 - DNA, 421 bp, Zea Mays
atcctgagctgaccgccatacatgccgagctccgcgcaggcaaaagaacggcgttgtgggccatggtggatggcatgatagcgttcgatgggcgcctctatatcccacctgcctcatcgctcctgcaggagatcctggccacggtccatgacaacggccatgagggcatccatcgtactctccaccgactccgccgcgactttcatttccccaacatgcgcaattgggtgcaagactttgtgcgggcatgtgcaaacctgccagaagtacaagtccgaacacctccacccggcgggattactgcagcctctaccggtgccatccatcgtctgggcggacataggtatcgacttcgtggaggcactaccccgcgtgcacggcaagacggtcattctttccgtcgtggaccgcttcagcaaat

SEQ ID NO: 193157 - DNA, 332 bp, Zea Mays
ccaggagggacacccggtcgcgttcttcagccgacctattgcaccccgccaccgcgacctcgccgcctacgagcgcgaacttatcggcctagtccaggccgttcggcactggcggccatacctatggggacggcacttcatcgtcaagacggatcacttcagtctcaagtatctcctcgaccagcggttggccacgattccccaacaccattgggtgggcaaacttctgggattcgactttacggtcgaataccgctcgggcgccacgaacaccgtcgccgacgcactatccaggcgggaccccgacgagggcacgctgatggccatttcag

SEQ ID NO: 193158 - DNA, 488 bp, Zea Mays
ctttatactccttaacatttttgttacaaaaaggtttgaaaaaaggtgtgagtttttcaaaataaaatgtttttcaaaatgtgtatgatgaagggttatcacccttatcacctttgagtgggatgatcagggactcctcggtgtggggagggccttaaggtgatggctcagccgggttaggtgtgagaatgaagaattacccctctcgtataaggaccgatattccattcttcacttcctatactcttatcaagtacaaccactcgagaccatatgagaagtcgcttgatccgaacttgcacggtcggcaccctagggttatgttggctggggagcactggcaggacaaggagggggaaggttttgtcctggtttgggcatggaggtggccatgttccttttggtataactgttaaggtaaagacgtgtaagggaggagagagtttcgataattcgatctcacgactgtgagattgcagaaaccggac

SEQ ID NO: 193159 - DNA, 351 bp, Zea Mays
cacccttcccacggcagcggcggctggcggtcgttccaagcctcaacgctggcgtgaagttagcctgtcggactccacgttctctacctcatcgccgccgtccttccgggatgtggtgattgctgcgcctgctcctacccgctccggctcccggaaggcttcgtcttcatcgcattcgccctctcgggagaaaatccaagcgacgttcaccactcgacgtgaagtttgccccactcgcccttcctctgttgatgccggcgggtggcaactggtggaatcaagaaggtccaggaggaggcgcttatttttgaagcaggagcctcggtcccgccgtgtgccggttgaccttgt

SEQ ID NO: 193160 - DNA, 603 bp, Zea Mays
atcggcagacttcttgttcttggagggcccattctggtccctttcttggatttcattatttggtttctgcttttttaaggcgagcttgccttgttcctaggcagctgcgtgcacccgtgatctcgtctcgtgcacctccaagaacatagttcaaactttcaagtcagacaagaatatccagaaactaaaaaacagaatgggtagaaaggcaatgccacagaacataacataagtctaaaaagttagatttcagtttgcgagactcatgtcgcgcgtccggcctcctcctccagtcgaaccctcgtgtttcaaattctattgcgccctccacaaccagtggcgtgcatctccgtcgagtcatgagacctcatgcgaacgcattggcgtccatgcctcagtttcagagtccatcgacaccgttcatgacactgatgacgcaaagcctgccctcggatgccttgaatacgttgcagctaaccttggtcctagatctgacgatgagcgcacctgaccttggtcctggatctgacgatgagcgcacctgaccttggtcctggatctgacgatgagcgcaccatgcagttccccaggacggtgcccgtg

SEQ ID NO: 193161 - DNA, 293 bp, Zea Mays
ttttgcagcattggatttagctgcagtggagtctccgttgagggtcgctccccgcgaagcgccagtgacttcgaatggtgcactcccaggtgacccgcggggacaaaaaaagataggggtatcgaaacaaaatgtcggtgagtcttcgctaggtgttagaaggcatcgttgaatgggtatggagaggtcacgtcttcagatcggaccacggcttgatcaagggggccgtcgtgacttgctagcaccgacgtccgggtcttgtatcagggaagcggatctataggacatttttg

SEQ ID NO: 193162 - DNA, 315 bp, Zea Mays
cggcggagaaccgatttgggggaagtgcaaaattcaggcgagctggtggacaatcgggtgtgggagcgggtgcgatagctagtaaaatacatagcgaagccgagggggggctcaatttataggctccgagagcggtggctctcaatttgaccgtgatgcgttggcggccggaggggaggaagaagcttggcgcgcggttacgtggcctatggcgtggcaaactccttaacgctgatgggatggctcaaacgaattacggtgacacggtagacaagcttggccacgcggcggaggaccgtcgaccggagatgggga

SEQ ID NO: 193163 - DNA, 433 bp, Zea Mays
gaagtaccaatctagaacagcagatctagaggatactgaacctgagacagatacgctaaaggctagatttgaactgcaactacaggaaaatgatgaccttcgaagttccaaggttgagatggaaaattttatttctgagattcaggcagagaagagtcagcttgaggaacgcctgtccgtgtcgcttaaagaaagcagcatcacatctaaatgcttggatgaagtgcggaaagatatccttgtgctttccagcagtatagattcccatgtttcagctaataaggttcttgagaggaacataattgagctagagagctgcaaagctgaactagagttgcatgtatcagagctggaacaggaaaacatagagttgtcagaacggatatctggactggaagcacaattgacttatctgacaaatgaaaaggagtca

SEQ ID NO: 193164 - DNA, 453 bp, Zea Mays
tcatcgcctgttccgccgcgccgccttctccacccttcgcgcaccgtgttcttgtcacttgtcggcacacatcttgctacggtgttctacgcgggatttgctgtctgtgtttctctttcattgtcttccatgtaggtttgatctacgcgccgccctttcattttggttcctgatgctttcttccatgattccgcttgcggttcgcctgatcggtattgacgaggaggtagtatgatggcgatgacgaaaaactatggttcgctcgtctgatcggcggcggggtttaatccccactgccttgctgagcttaaaagtagtccgagccactcgtttccttcctctgaacccagatctggtccgcttttttccgatatgtggctttctgtgcggttctgccgtgatccgcggtctccaatctgtggttttctgagttgttctgcggcgttcgggttc

SEQ ID NO: 193165 - DNA, 986 bp, Zea Mays
catctgcatgctaaatatcgcaaaggcaagaattttgttggtaacctgctatccaacgatggcctcattttgacaagacacgagaataaggaggagctactcaatgacttctactccaatctgttgggttgatcaaccgacagagagcgctcaattaacctggaataactccacatcccctcccatgacctttcaatgctggacagtccttttactgaggatgaaatctagaaatccatctcatccctgccttctaacaacttcaaaagttttcctgtctagaatgaagctgccttctaacaaggatcaaatctagaaatccatctcatccctgtctagaattcaaaagtttacgaacatctccaaaagttctgttacacccattcaatgtggagcgaatgagctgaccaccatttctgccttattaccatgtgctacaaaaaattttccctgcacttacttggggattcctctatcaatccgtaggcttgctaactctgatctcttgtcgcttgttgataaagttgctgataaacttccaggatggaaagccaatcttctcagccgggctggtcgtcttgtcatggttaagatagtgctgtcttctgtccctatctatcttatgcttgcattagaactccctaaatgggtttttaaggcaatcgataagaggagacgaggctttctttggaaggggcaaggtgatgcaaatggaggtaactgtctcgtgtcctgggaagctgtccagcggcctctcaagtatggtggtctgggtattctcaacctggagatgtttggttgggccttacgtgccaggtggctttggttacagaagactgacgcgtcaaggccatgggctggtctccctatccgagtgcaccgtaatgcaaaggccttcgttgatgtggctattacctcagtggtaggcagtggtgaatctgtgaagttctggtctgatcgttggctccttggtaaaactgtggctg

SEQ ID NO: 193166 - DNA, 321 bp, Zea Mays
gccagtcttatcaatctttacagaggttttgttgaagggagtgtacatctttacagtgagctagctaggttctcttgtaccaagatccgttctctgcccaacataacaacagtactgtcaagtgcacggtactcgggttgttcaaagtcagcagacagattttccaaaattaaaacatgcagtaattgttggctagcttgtaccttgcttcttaggctgttgcccgacatagtcaagtgcacggctcctgcccatactcatctacacattcatgttaacacatatttcagtgatggagtcgttgccattcgttggacgacg

SEQ ID NO: 193167 - DNA, 492 bp, Zea Mays
aagaatggctacaggttgcagcgccagcacctgcgctaaatgcgaccacctctgctacaagaaggctcgacgaatcttcctccttggctacatctggtcagcctgctgatactggcacatttacaccaacagaacatgtgcctgggtcatctgcttcacctcagttgccttccgccgaggtgcctgccggggccaccttgcctgctgatcgtgtactgcatcaggatactgctgctccttcgcctgaatcccatccagatacacatccatacgacaccaggttgaaacaaaacatcaggatccccaagaaacgaacagacgacactgttgcatggtcagttgttaagtcccctactgaacctacaaattatcgtattgctatggaaaatcctttttggcgccaggctatgaatgatgaatttcaggcactcttgaaaaataagacgtggcacttaattccccctaatccaactcttaatcttattgattgca

SEQ ID NO: 193168 - DNA, 462 bp, Zea Mays
gggaaccacagctgttgagcttgcatctggcctacattggtatttgaaatactggtgtggcgcacatatctcctgggacaagactgggggtgcccagctggcttcgattccttctcctggatctctgccacgggtgcagggcaagggagtcaagattgagcgtcctgttccgtggaattactatcagaatgtcgtcacttctagttgtgagtcctttcttgccttaaacatttgttttcataatctttgtttgattccaaatctattaatttcttgatttcttcagtgtcatcctccttgtcctttgtaacagtcagtacttactttctagatgtgtggcaagtataagggcatggtgtggtcttggaaatacgattcttgccatacattctattgatgcagtaacgatctactagtagtacatctgttgcaaatgaagaactaatgtttcagcatttgttc

SEQ ID NO: 193169 - DNA, 502 bp, Zea Mays
ggttgttgtgctaaaaaggacaagttcattgagaaatttctcatctatcagttttgtcatggttcgaggcctgattttgagccgatttgtaagcagttggtgaatgcttccaccaacccatctattgctgatgtattgtctggatttctgaagagacacgtcttcactctctgccatcttctatgtcagcacttcacagtattctagtagccactcagaaaaacacagtgaagaacaactcttttgagccttgtgagcattgcaagagcacttctcacagctcaaaaattgttttgtccgatatatagagaagctagctgcttatcgtgtacaccgtgctgctcatggtcgtagtgcaggctccacccctataggctccatgtctgttgctgctgcattacctgttagtgctccatcttgggtgcttgatttaggagcctcttttcatgtgtcattagatcagtcctagatttttgcccgcaagccaattgtcgatggtgcc

SEQ ID NO: 193170 - DNA, 598 bp, Zea Mays
tgctttctttaagcgacgcggacaggcgttcctcaagctgactcttctctgcctgaaactcagaaataaaattctgcatctcaaccttggaacgacgaaggtcatcattttcctgtagctgcagttcaaacctagccttaagtgtatctgtctcaggttcagtatcctctagatctgctattctagcttggtacttccatgtcgcaccagattcacaaacttccagttcattagaatgtaaaccatttatctttcttctcagcgcagataactcaagatttctttgttccagctcctcttggcattttcggaacttttcttctagctcacaggtttgagacctaaaatttagcaccttcagctcaaggtcagcacattttctctgtatctcatctgcattagacattgatgactcagaaaaactgtcatctcttaacatttccttattcctaagatcctcctccagttgatgaatccgggatgtaagctttttgaattgcagctcattgttgtttgcaatatgaggaacctgaccttttgtcagaccattttctttcagcttatatataagctccaaattttcatctgttagttcaga

SEQ ID NO: 193171 - DNA, 398 bp, Zea Mays
aaaggaacgatatcccatgtaccagtgcgttcaagagcagccaattcatcaatcatagctagctgccactcgagaagcccagaagcttcctgatatgtagtgggttcaacaattgccacaccagctcgtggaaaaccatagcgatctggaggttcaatggtaccacggtcacgaagacgatatccctgattaaaaacatcattagactcattattgtcagtacatgatcagtatcaggaccagccgtaggaatagagcgggaacgacgaatgtaggtttgaatgacaggtggtttggaagagtaagaagatgacgtggaggtggaaggtgttgttatgggaatgagaatatcagatgtggatatagaagatgattgtgcagatgcaggaatggaagga

SEQ ID NO: 193172 - DNA, 849 bp, Zea Mays
catttaaatgttgtggagtatcatggttctgcaaggtcaagatctatcattcgccagtatgagtggcatgcgggcgatgcaagccagattggcaaaacaaagagatcgtacaaattcaatgttttgcttaccacttatgaaatggtgcttgttgatgctgcatatcttcgttctgtctcatgggaagttcttatagttgatgagggacatcgcctgaagaattctagcagcaaactctttagtttacttaattcattctcatttcagcacagagttttgttgactggaactcccttacagaacaacattggtgaaatgtataacttattgaacttcttacagcctacttcttttccttctctatcatcatttgaggagaagtttaatgaccttacaacagcagaaaaagtagaggagctgaagaaacttgtagctcctcatatgcttcggagattgaaaaaagatgcaatgcaaaatatccccccaaagatagagcgaatggtacctgttgaattgacatcaatccaggctgaatactaccgtgctatgcttacaaagaactatcaagtactgcgcaacattggaaaaggtggtgcacaccagtctttattgaacatagtaatgcagcttcggaaagtctgcaaccatccctatcttattcctggaactgaacctgaatctggttcacctgagtttctgcatgaaatgcgcataaaagcctcagcaaagctaactttgttgcatttgatgctaaaaatattacacaaggaaggccatcgtgttcttattttctctcagatgacaaaacttcttgacatccttgaagattatctgactttagaatttggc

SEQ ID NO: 193173 - DNA, 465 bp, Zea Mays
aagtttgtgatgctaaaatttcacattgaaggccaaaacattgccactcgttgagtcattgttcaaaagaactacagggaccatcatctgatgtaagcttgtgattttgctgggtaatcccttaaccgttgtcaggtggatatatctttaggacaactttgtggggacccacaggtctatatttggtcgataccttcttaaaacacatcttttgatgatatcgagtttctgttgtgtatgtttcataaagtcctgctgttgcccaggctgccaaattgtgtaatgtgctgtgtggtaggtttttgctacggcacaatgtgcatagagtactccctctgtaaaataaacacacttctaggtaatgaatgataagatcaatgctactaggaaattacctatgtacccctaaagttgatctaacatgtaactaatgtactttggaagtacagaaaggagaaaaattac

SEQ ID NO: 193174 - DNA, 465 bp, Zea Mays
gtcctttttgcactggatatctgtcatggtcgggcgcacgtatgtgaggcgacatcgtgcccgtgacgtgcgccgcgccctagagcaagcagcggccaggcaggacagctaagggataggataggatagcctgctgttatccagttccttagattgtggagtgctgttattcagttccttagattagggagttccttagattatggagtttgttgctcctttcggttgggcctctggccatataaaactgtaaccgcacaggagataagaaatcaagtattattagcctatctcctctctctcttcctctctagatcggcaaccagggggtatgacccggttgacaaaagtcggcgacggcgtgggggaataaccctgccgacgacgacggatcgcgactacgaactacgtagccggggtcccgctgccttgggtaccactgcccttgacaacctggtatcacgg

SEQ ID NO: 193175 - DNA, 435 bp, Zea Mays
attgaatgcacaaccattttttttcaaaatccattcaccagaaatcgccacaagagcagacccctgatttgaagtggtggaacctgcagcaatctcgcattacaatctccctatcctcaatttcagagaccattttcatcactgtgtggccgtccccggacacccgcaggttcttgaaaatgtgaaggggtgccgctggtggtgtagctatcaaaccaaatgcgagggctaggcgctcactgtgcattgccagcatagcttctttctggtcttctgccacatcatgaggcacaaagcttgtatcaggacaataaccttcttgctttaacttagctgtcattgccctgagctttgcatatatttgttctgataaaggatgcgacttgtctgaagctataaagaaatgaactttgttcttgatctgaatccagctgc

SEQ ID NO: 193176 - DNA, 287 bp, Zea Mays
gttaccaagttgcttgctaataggctcggccctcatcttcagaagttagtggctgctaaccaaagtgcttttgtgaaaggaagatcgattcatgataattacatgatggtgcaacacgctattaaatctcttcacaataaaagagtctcaagtttatttttaaaattggacatctccaaggcttttgactccgtttcttgggcttttctcattgaggtgctttctcaccttggctttggaaatatttggcgaaatttgatttcgaatctgctggcttcatcttccac

SEQ ID NO: 193177 - DNA, 828 bp, Zea Mays
gttaaatgttgtgatccatttttaccgtcaaatccatagaatcttccattttgcagcttttacatgtgcactaaaagtacttcattcaaaaaccaaaatgtatttgcaatatcattttgtaggagaatagaattggtggtaatagaatggatcatccccctccatcacaacaactgcagacgatgagactaaagaagctgacaagctaatatgcccaaagtcataacgggtgatgcgtcacatatgttgtagctggagaagccgatgagtcctcatgtaagggtggtagccctttgtaccgatgtcgagatagctgggcttaaaggcaaagctatgctgaagatagccgaggtcgacgtagttgtggtcggtttgtgttggtggagcttcaagcacatgagaggcaacagagtgatgaaggagacatgtcgaggcaattacgtgtgggggggatgctgaggtcgatgcagttagggtcgatgtagatgaaaggcgataatgcaattgaggctgacagggaatcagggatggaacaggagggttgatgttgacatcgatgcagtcaaatcgcttgaatcgaggcatgggttgggtttgccagacccagcaatgtgttcggaacgaaaacgtgtgccaatgtagccaataccagatgaacgaggtagagggcctcaatcatatatcagcatccgagggaccaacagagaaggtctcaatgacgattgcggtgtgcagaataacaggtagaaggtgctgatgtagcatgcaactgtcgaagtagatgatgttggtatggacgaggcgacgacactaacaacgtggttgtgc

SEQ ID NO: 193178 - DNA, 921 bp, Zea Mays
ccttgccctaggtggtcattgcctaaaagcttgggtaacactttggtcctaggcattacttaactcactcatgcttccaaggtcttaagtactccctctcctccaaattttaaccacatgtgataataggtatgtgtgccatcaggaagccaacaccttggtaacacctggggtgttacataaataaccccacaaacccagggcaacgaaaggctatcttagatacatcctctccggccataaaaatctggttataccctgcattaccatccaaaaaactaataattttattccccgaagcctgattaacaagttcatccgctataggcatcggatattcatctttcggggtggctctgttcaaatctctaaaatccacacaaatcctgatcttccccgtgttcttcttctcaattggcactatattggagacccactccgcatacctgcatggccttatgaaatttgctttcaacagcctatcaacttcttccttaactctgtcatggatgtcgtggttaaatcgtctaggtggctgcttgtgtggcctaaacccatgcttaattggtagcctatgctcaaccaactccctactcagccctggcatctcagtataatcccatgcaaaacagtctctaaattctctaagtaaatcacataccttttgcctctgaccggctattaatttagcacttacaaatgttggtcttggcacctttccgtctccaatgtccacttcctctagttcatcaacagatgagaacccctgtcctaactttccaagatcatcaaaatcatccaccacctctcccatatcgtttttgtttaaacgatattcatctgtcctctcctgtaaccattttaaactatcgtgttcattcatttataatgttgagtcattgagccgtgctatgtcagccg

SEQ ID NO: 193179 - DNA, 466 bp, Zea Mays
gtgaacgactaggccatgcgcgaccggatgtgaagcggcgagaaagagggaggcacacagagggagagagatctgaggacgccgccggcaatccacgttcttcgagtgccacgaccgggattgtcgcccctagggctctggcgggttctagcgtcgccgcgtgctcgccgaatcgtgtggaggttgccggaccgaccctcaatttcgcaacgccgccgctgctccgctagctgccgcgggcagagctctccgttccaccagagccggttagtattcttccagtcagttcaatgcattcccctctgcgtgtgtgcggtagtgattgaggattggacgctccgggatcgtagatgtcctcgccggagtacagtttggcaccgcggcgccattccccttcattcgccgcggaggcagggaggaagacgggctctgtgccgttggatgagtggcggagggctgagatgtg

SEQ ID NO: 193180 - DNA, 638 bp, Zea Mays
ctgcaagtactgcttttatgatctgtgccttgactgctgtgtggagatccgcagaggtgagattcctggaggagaagagataatgagagtaaagcctgaagatagaggccgagcatatctttttggtactactaactcaaaggatgggagtaaaaggttctccatgaggaggcacagctcatccctggagaatgagccttccaatgtagtaggttctagtgagggggcaaataactctctggagctgtggaaagcagaaagtgatggtagcataccttgcccaccaaaggagctaggaggctgtggcggttcgattttggatctcaagtgtttttttccagaaaagatgctttcaaatttagaagaacgagctgacagaattatgaggagcgaagtatttgcaaaagcagtagccaaaagaagtgaccagtgcccttgttatgaccattcaggaaacataagaactcaggacgtgcgagagactgcaaatacgaaaggctcaagtgataaccatctctactgcccagttgccactgctatcaaggaggatgacttggcgcactttcagatgcactggacaaaaggcgaaccagttattgtttctgatgttctgcatttgacttctggtctaagttggg

SEQ ID NO: 193181 - DNA, 487 bp, Zea Mays
acaccatctcagtcttactcttccaaaccacctgtcactcagacttacatttgtcgtcctcgctctactcccacggccagtcctgatgatgatcctgttgctgatacttgtactaacaatgatgactctcatgttgtttttaatcaggggtatcatcttcgtgaccgtggcactattgcagctccagaacgttatgggttttcccgtgctggtgcagtcattgctgaaccatcatcttataaagaggcttctggtatacctgagtggcagcttgctatgactgatgaattgaatgcccttcatcgcgcatgtacatgggatgttgttccgttacctactggtgttgtacctatcacgtgcaaatgggtcttcaaggttaaaaccaaatctgatgggtctattaagcgatataaagctcgtcttatggccagaggttttcaacagactcagggtattgactataatgagacttttgcacctgtggcac

SEQ ID NO: 193182 - DNA, 366 bp, Zea Mays
agacttagcacttgactgggctgtacagtctcgtttgctagcatgtgctaaggaagccagggctcaggcccgaattaaagaacttagctcaactatcgacaatctgcaggtctactgcaatacgttgcacaaggaagtccatgtactatactcacaattacaccctagtgtgcctgcacaccctgctgaggcggaagccggaccatctcacgttgcgggacgcgcgctgggtggggagttagacctttttgagccccctccttctttgaggttggttgatgtctggactcccacacctaacgatgaggccgccaagagtgatggaaagcaggaataatggtgtaatagaagtggagtagtgtattg

SEQ ID NO: 193183 - DNA, 466 bp, Zea Mays
ctttcgagcattgcgatcttatttggaaaagttgggcgcctccaaagtgtcgattcttcttatggctggttgcccacaaccgttgctggacggccgaccggttggctaggcgcaacctcgaccatcccgacgcttgtgtcctttgtgaccaggaggaggagacgatcaaccatctgctactgtcttgcgttttcgctcgacaattctggtttatccttctccaaaggattgggcttgctggtgtggcaccgcaaccgggtgaagaggacttcatggcatggtggaaaggcatctccgctcccttgggggatcttctcaggctggccttatttccatagtgatcttgggggcgtggtgtctttggaagcatcagaatgattgtgttttcaatgggatgagtccaaatctttctgctgccttagccatggttggaaatgatattatgctttggaagctggctggtgcc

SEQ ID NO: 193184 - DNA, 734 bp, Zea Mays
gaaagggggggtgatacaccattggcttggcgtgagagtcgggtggtgtacccacccatgcacatcactgatagacatgcacatgttgggcatagcgatgaactggcataggcgagggcactagagagagccccatgggtgggagcgatgtcaaaggagatgccactagggctgaaggcggagccacgaaggtccctagggacccaacatgggttgacaggggtggcacacgggttaataagggccaacagggtggctcggagggaggctgggggagcaggagccatgagggccatcgggtcaccgactgaagctgtgtttggggacctgtagttggaaaaacaaatagtggctgacaattggttgccacgaaatcaaggtcatggagaaaatccaactcaggaagggaggcggtgggtggttcggaagtaggcgagaaagggaaatccatcttgtcgaagatgacatgacgggagatcaagagacgatgagtggtgaggttaggacaccagtaccctttgtgatcaggggagtacccgagggagacacaacgagcagagcgaggagcaagcttatggggagtagtatcagaaaggttgggtagcatgtgatggaatacgtcttggaggcgttgtggaggactgcagattagtattgcagtttttggatagcagccttgttgcgttgtggaggactgcagtttgtggagctttttactgtgttttagcatctag

SEQ ID NO: 193185 - DNA, 289 bp, Zea Mays
tgggaaaagatgatggcagctttggatcagctgacagggaaactggaggtgatggaaggggttcatcatcaattgcttgggcaatcagtcctgatccattcgaggttagcagcagaggtggcaggacaggagatggcgggtttgaggttggaagtcgtggctagggatatggagatgttacctgaggaatggagttgggtggatgcaaggtctgttgcacaaggcagtcagtgtgggcttgatgcacaaggtgttggaggtatggaccttccgatgtttgatgaaatgt

SEQ ID NO: 193186 - DNA, 307 bp, Zea Mays
cagatcgtggactctactttcgggtgcgacctcttgtcctttctagatgcctactctggtttccatcagatctggatggctcgggaagataggaagcataccgcttttgtaacagtggatgtgctctactgctatgttgtaatgccctacggtctgaagaacgccttgccaacatttgtacgggcgatgagtaagaccttcggggacctgattagggacagagtagagatatatgtccatgacatcgtggtcaagactaggagagggtcgaccctagtgtaagccttaaccctagtctttgacaagc

SEQ ID NO: 193187 - DNA, 326 bp, Zea Mays
aacaggaaggaaagaaatggctccgaggtctgaaatgtggcagcacttcatcaagattaaggatgaccaaggtgtgttgaagaagggaaagtgtaagtattgtagtcgtcccattaaggcagatccgtatgtcaatggtacaactgcattgcataggcacttcaatatttgcaagcgtaatccacataagaataataaggatccgaagcaaggcacattgcaagcaattcaaggagaaggcattaccacttggaagtatgaccctgaagcgattaggcaagcttttgttgaaatggtcatagaagatgagatgccttttgttcaag

SEQ ID NO: 193188 - DNA, 460 bp, Zea Mays
ttcccctgtgccaaaaaaatacaaattgataaggcgctggtatatttttggcccaactcttatgtttaaccaattttaaccacaaacagaaaaatgggtaaatttggcacatcaactattaatactgttcaatttggaccccagtctagttttggtagttttcaattagcttgggccctcctgtcatgtgctccatctctccttccacaccgaaccctccaaaaactcacctccccatagctgtgtccatgtgcatttgtgctgctgcagaccaccctgctgcctcatacccatgtgcagccatagaccatcccttgctcgtcaccggaaagatggaaggagaaaggacaccgccacgccatggagcaccatgacagctgtagggccaatctcgccatggactggatgagagacggagggagagggctgtggtggagggtcggcagaaaagataaaagag

SEQ ID NO: 193189 - DNA, 354 bp, Zea Mays
ttcaactctatcggccaatgtatgatttaccttcttttctttactttatattcctggtagcatacatacatatcacggttcatgaattttattttactatgtacccaactctccctttttagcactctgagataaatcttatggagggttcttctttgcaacacgtatctaccgataatacatcacagaaagactccatggatgatcaggtttacatgcaacctgaagacaacagaatgcggagactatctgaagacactcttttatgtgacagtgaagaatctttaaccaaaagaaaactcgatttttctcagcctattggtggtgacaacagcacagctacacttattcctt

SEQ ID NO: 193190 - DNA, 350 bp, Zea Mays
gtaactgctcctcaggtaccctgaggcacttctttagctgagatacatgaaatacattatgtacatctgataggtgatcgggtaactccagttgatatgcaacctcacccactcgctttaagattaagaaaggtccgatgaagcgaggggacaactttcctttgactttaaatctcctcataccacgaagtggtgacaccttcaaatagacatgatcaccctccttaaactccagtagtcttctcctattatcagcatagctcttctgcctggattgtgcaatcctcaaattttctcttatcattcgaacttgttcttctgcctcttgtataagttcaggcccaaagaac

SEQ ID NO: 193191 - DNA, 470 bp, Zea Mays
ttaatcattaaaaaaaacatagcatgacttacacaaagatacatgtttatccacatacactaagagagttaatcatggtggatataacaaatgaaagagctacccatgaatgattcaaaagatatatcctagagtgcactagtcatgattaaacaaacatcattatgattcatttagcacaggcaatcataaagcataactactccaaggacaggtagcacaacaagctaacttaagagcaatactaaattgcagttatgtacttaaaatacacgagtaccgtcctttggagagcacgttgtagattctcatcaaagtcctttacttgattcaccaataatgattcaggacctatacaccttatttcacttgagatgaacatgggattagtgttttacaataaatcaaccttgggtcaataaacaccaaaacaattaaaaagcttaagcatagagtttgatataaccgtc

SEQ ID NO: 193192 - DNA, 318 bp, Zea Mays
cagcactccttcggggatatagtgttcacggaaggctgctttaaactcatcccaggtgacttgatggttgacaggttgaatagccacgaaatttccccaccaggtactggcaggaccacggagttgttgtgcggcaaacaacgacttctgcgtctctgagcaacggagaagaccaaacttttgttcaataacccgaatccactcgtcagcttctaggggatcttcagctttgacgaataggggtggacgagtatccgagaaatccagataggtggtctcacggggaccttgcggataacctcttcccgcctgctgctg

SEQ ID NO: 193193 - DNA, 530 bp, Zea Mays
gtcctgatggcttcagctggggacagttgttcttgaagtgactgggatctccgcagtgccaacatgcattcgccgggggttggttgcttgcaactgagggggcatgaaaggagctctgactctgctgactgaactgtgacggggtgggtccagctggcctactgaagcttggtcccttgggcggaaatccaaaggatcgggttttctggtgccgatcttgctgctgagcccggaggacttggaatttcctcttgagatggcctttttcttcctcctttgccctttccacttgcatggctttattggagaggtgagagaaaccgaggaagtcttggctagccaggatgttcttgagttctggtctgagccccttcaggaagcgggccatcttcttgacttcggtactgacgtcatctggcgcgtagcgggccaattccgtgaacttgtgcacgtactcgctgatggatcttccgtcttgtgtcagttcccggaattcgtcttccttgagctgtacgatcccttggggcaca

SEQ ID NO: 193194 - DNA, 337 bp, Zea Mays
atcaactcggctctttttatcctatgatgtgcacgaatcagcgacgagaggagctggacaagacaaattgctgactgcgagactagcggaacagagaagaaaccaatgcattccttgtttgttttttggcaagaagggcgcacacgcctggagccccaactgacttccaagctggcacagcagcaggcagcagcacacaaccacaacaccagctcacgcgtccagcacaatccccattccccccgtaaccacgcattaagcatgggtttgcgctctaatccgcacacgcacaatccggactgggaacagtgtttcgaaatctgaacaagacggtcgg

SEQ ID NO: 193195 - DNA, 568 bp, Zea Mays
tgttaatggagcggataacacgttcaaccttaccattttgagctgaagtgtaggggcaagacatacacacatgaagttgcgagcttgaaggttgtcaaatttgcgaccattgtcgcactggatgccctggatggtgacactgaactgcgtacgaacgtaggcaaagaaattggttagggtggagagggtgtcagatttgaggcgtaaaggaaatgtccataaatagtgggagcaatcatccaaaataacaaggtagtatttgtagccagacacactggtgatgggtgatgttcagagatcgcagtgaattaactaaaagttacaggtggcgcgggaggaagaggtagggaatggtagacgaacatggcgtccgagttgacaagcatgccatggatgagtgctagtatttttataacaaggaattgcagatgactgcgctagatgagataaaatggcgtgaccgggatgtccaagacgttggtgccttaaggtagacgcaaggaagaagccaggaaccgcagggggtacaacggaccagagctattacatcagaagatcttgcgccgag

SEQ ID NO: 193196 - DNA, 392 bp, Zea Mays
tgtcaccatagcgagctgagaaccaatgcagaatggccacagctttctgagacgacattttgatattggatcctaaagcatcttctggaagctcccattaggaagccctttatgacatggcagaatgaagggaggatatttccacccttatctccaaaagatccataacccatataatccttacaggattatagcaagttcacttcatcattttttaattgcaaaataacacggttttaggactattgtcaccatagcgagctgagagccaatgaagaatgggcctagctttctgagatgacattttgatattggatcctcaagcattacatcagagctcccataaggaagcccatggagacatggcagaatgatgggaggatatttttcag

SEQ ID NO: 193197 - DNA, 774 bp, Zea Mays
atgaagaagggggtgggcattgaacttgttgtcctggaggtctcttggctgctctttttaaagctttctttcctcctttgaatcatatgagtgtgaagcctaacatcactacacctttaaagtgggagtttcatcgtgcgttgggccaggccatggcactattaaatgggtcgtgccttgggcccgctaggcacaacccatttggccatctatagtcaatagtctagtactcctccctcatcatcgtacctgatctcgtgagtgtggaaaaagatgagagaaaacacttcatcttgtttgaccccacaccacacagtcacatacctcgccatccgcactcacctaatctatgtgtttggatcgtgtttgaataactatcccatttaagcaatgtctacctatatgatatatagaaaccgtagcgatgcactggcaactaactatgaattagtcatgcaggagctcattcagcaaatggcgaatgtgcagtacaccgagaacatgacagaggaacaggttgatgctatggcaggaagtgagactttgcggcagcaagcttcactgttcggagcaacaagaaactataaggttgaagggacattcatctatctcagcagcatatttggatcaaacaattgtcttaccaaaaaatgtaattcttacgcaggtgttgagtaagtccacaaacaggctaagggattcgttgcttccaaaagatgagcccaaacttgcagttcctatgttactgcttattgcccagcatcgatccaagta

SEQ ID NO: 193198 - DNA, 514 bp, Zea Mays
atcgtgctcaccatcctcctcgtggtcatgatcaccgcggccagcgactacaaccagtcgctgcagttccgggacctggacagggagaagaagaagatcgacatgcaggtcacccgcgacggctaccgccagaaagtgtccatatatgacattgtcgtcggggatatcgtccacctgtccatcggcgaccaggtgccagcggacggcctgtacatcgacggctactcgttagtggtcgacgagtcgagcctctccggcgagagtgagccagtgcatatgtccagtgcaaaacctttcctgctcggcggtaccaaggtgcatgacgggtcggccaggatgctggtcaccgcggtcgggatgcgaactgagtggggaaacctcatggaaacgctgagccaaggcggtgaggacgagacgccgctgcaggtcaagctcaacggcgtggccaccatcatcggcaagatcggtctggtattcgcggtgctcacgttcaccgttctcatggcacggtttc

SEQ ID NO: 193199 - DNA, 450 bp, Zea Mays
gccaggctctggcatgagcgttttggccatgtcaacatggcggcactccgaaagctagctcggggtgcaggggttaccgtccatcgggcaggtggacagggtatgcgaggcttgctaagccagcaagcagaggaggacctcattcataacagaagttgagtatcacgctcatcagcgcctcgagctagtgcacgcggacctgtgtggtccaatcacaccggcgacgccacgaggtaacaaatactttctgctcatggtggacgatctcaccagatacatgtgggtagccgcaatccattcaaaggattgtgatgcggctgccatcaaggagatacaagcacaagtagaaggtagatctggtgcgaagttgagagcactttgtacagatcgaggaggcgaattcaccgcagctgaatttgcggagtactacccggctgaaggtgtacatcg

SEQ ID NO: 193200 - DNA, 305 bp, Zea Mays
agaaaaccgagttaacaagctcgagcctgccagcctgcgagaggagggcagaagtgcatgaaagtcgtttttgaatcctctgaatgagtggtaaaaagtggcatattttaggttttgcaagcccccagcgggatacccagataggtaaagggcattgaacctatctgacagttaagagttccagcaaggatcaccattttagccggactgacgttgatggggtacatacttgatttgttgtaattcaccttcaaccccattgaaaaagcaaaagagttcaggacagctcttagaaagaatagctg

SEQ ID NO: 193201 - DNA, 583 bp, Zea Mays
ttctcccatgtcggtatatgaaagttgtcacacgccttgcacgtgcaattggtttcttgaattccttcaagtttcctatgtcctccaacattaggtccaagcaatgtgcagcacatggactccaaaataatgcaggaatcctctccattagaagcttgcctgcagctttgtaattggcaccattatcagtaacaacttgtacaaccttgtctctcctaatctcatcaacttttttctcaagcaaatcagcaagcatgtatgcatcatgtacttcacttgatgcatcaacgaactctaaaaagtaagtgccctctgggctgttcactaagaaattaatgagatggcgtcccctcctatcagactatccatcagacatgagtgtgcaaccatattgtttccatgcacgctcatgttcctccctcattgtatttgttgacttcacagcctcttgtagcaatggctcgcctagttggtaaggtgttggaggcttataccctgaaccaaactgtgatgtggcctcaattgcaatctaaaactgcctagctgctgcggcattgaaaggtacaccacactcatagaagaa

SEQ ID NO: 193202 - DNA, 430 bp, Zea Mays
cgatgaaggggaagcaggcaggcgaagcgtgtagaggggcctggggctgtcacaccgaacgagaagggtcctggtggcaagatccttcacagacagaccaaacgggtcaaactccatagaacaagagttgtcagtagtgaattgtcggacggaaagaagattttgaatgatgtgggggcgacaaggacgttggttaagagaaaaggaccgggaagaaccgcgtcgtcgacagaggtgacgggtagggcagatccgtttccaacaacgatggaagaaggaagggaggggtgggggagaggtggaagacagaatacctgcgtccagggtggtgtggtaggaggcgccggagtcagccacccagtcagagaccgaggtgggtggggccagcgtcatcgtggagaaggagctggcgagagactgcgtgtcccac

SEQ ID NO: 193203 - DNA, 455 bp, Zea Mays
gcttgctcgtgcttctcaccttttgatgacgctgctttttccgttttcgtgcgcctgccctgccccctgagcgcgttcgtgtgtgtgtgtgtttttgtttctcgccgatgcgcatgcgcccgttcggttgggtccttagcttggccttgacgcttctatggtgcgctttcctgtgcttaatctgttggtgatgtatttagtgatcagaggcgggtagtttagtttgcgaccgtttctcttcgttgatcccctcccccttttctacgtttttatgcaggtttcatgtgtttttcttatatcctgtttctgattcatttttccctaattccttttcctaaactctggtgcccttcagtactagtctttactactgctagtagtatcacaaacggcatcaacatttttgttccccactttatcagtagtataatggaaaaacgtctggcgaaattcgg

SEQ ID NO: 193204 - DNA, 607 bp, Zea Mays
ctttttttcaccaacaggcacgatataggaagaagaaaaatttcattgccacactgaaagtagcagacagaatcttggtagagcaggaggaaaaacaagaagttgtgtgggatttttataataatctcttggggactgctgtgcaaaggaactgctctctcaacctggctgcttttcatattccaacccgaaaccttgagcagttggaaagggatgtcactgaggcagaggtatgggccactattaattctatcccttcagacaaggctccagggcctgatggatacactgggcgcttctataagcatgcatggccaattattaaaggggatttcatggcagctatggggaggattctgttgggtgatgtttcaaatttgcaccttcttaactcagctttggtgactttacttcctaagaaatctgatgctgcagagataaaagattttaggcctatcagccttattcatagttttgctaaaattgttaccaagttaatggcaaaccggcttgctcccacgcttcctgagctgatatcccctaaccagagtgcttttgtaaaagggagaagcatacaagacaactttattatggtgcaacaaacagc

SEQ ID NO: 193205 - DNA, 394 bp, Zea Mays
tcgaaggcgcctatacgcacctaatgataccccgaagtcatgtccagactggaaaataatttagtgccagcaagctcatccaaaatctcctcgaccaccggcatcggaaaccgattcttgatggtcatatcattgagcttacggtaatccacacagaaccgccacgtaccatccttcttttgcactaaaaggaccggagaagcaaatgggctcacactgggggtgatcaaaccatatttcaacaacgcatccacttgcttctcaatctccgtcttatgatgaggagaatatttgtagggtcgagcattcaccgggatggacccagggagcaaacgaatatgatggtcaaatggtcgagatggaggcagttcagttggtgtaacaaaaatgtcac

SEQ ID NO: 193206 - DNA, 515 bp, Zea Mays
tgcaatagtgccactgtcatgaagatgatacccctgagtaaaaacaacatgagagtcatcattgttagtacaagtatcagcaacaggatcatcatcaggactagccgtgggagtagagcgaggacgacgaatgtaagtctgagtgacaggtggtttggaagagtaagaaggtggtttggaagagtaagactgaggtggtgtggaagtggaaggtggtgtgatgggaataagaacatctggggtagaaacagtagatggtggtggtactgctgaagtttcagaaatgggaggaaggctcatgaaggaggtagactctgtggaataaaaagaagaatgagtggaagagttgtaaaagaagggtcagttttcattaaagctcacatctcgggaaatacgcatgcgacgagaagatggatcataacaccgataacctttatgttcagggctgtatccaagaaaaacacactcaacagattgagcagtcaatttagttcgttcacgaggagataacaaaa

SEQ ID NO: 193207 - DNA, 276 bp, Zea Mays
cgcagaagtcgcctaagggtgcagccggacttagcacaacaagtgcgagaaattccgatgtctatcgcgaagactatccgcgcagaagtcgcctaagggtgcagccggacttagcacaacaagcgcgaaaaattccgatgtctatcgcaaagactccgcacaagagccgcccaagggcgcagccgacctagtacaacgaaagcagaaacgacagcaagaccaactgtaatcacaccggcacagcataatcaaccataccagacaaagtacacagcg

SEQ ID NO: 193208 - DNA, 1163 bp, Zea Mays
ctcctgatgctgaagcctccgttgatcctaccgctgttggtgacgatgagcacgactccaaggaggtcgttctgcgcaggtacttcctccaggagtgggagctggtctcagcgatcctccaccgtgtcgtcgccggcggcggcgttgccgaatccgccgatgtccataggatccgctctatcgtaagcactcttctatccctattttcaaatgctacctgccgctgaaccttagatctctgagagaagagggtgtagctctgagagcaacattgacttttgtttgtttattttaaaggatgtaatctgctttagcgtctgatttaaatgcacaacagccaaattcgaatacatcatgcacaatttcttgcaatcttttagtcgtctaggaggcattttaaactgtttggtcgaggtggttgaggttagtctgtgaatgcacattttattgctaatataggctagcaaaagctcatctgagatacaaatgacctacataaatcaatcctaggtcctagaatgacatgttatttaggaattacattctgctttcctgggtaaataaaatggttttggggagagttatgattaatgatcgattaccacctctatagataaaggcaagagcaaaggtccacatgatgtgaaaactattaacattaggaaaacaattgatgtttgacttagaacaaaaccaaatcacttcacaatttggaacagggggattaatttactttttttggctcacagatgaatgatatattagacatccacatggtctcctgagcacaactttggccactactttcaattatgatagtacttctaagaaaaatctgtacatatcattttcatatatccagtgttaatgtttgtagagcatcaattttgaactcaattgtttaagtgaacgattgaaatgactttatgccaaaactatcatgcttaagagcttgcatgataaattttatcttttctgttgagcaatagatggacaaatatcaagaagagggtcaactattagagccataccttgagaacattgtttcaccacttatgtcgttggttcggtcaaagacaatggaacttggtgctagtactgatgaacttcttgacattatcaagcctctgtgtatcatcatctacacccttgtcacagtgtgc

SEQ ID NO: 193209 - DNA, 298 bp, Zea Mays
caaaaaggctttaaagaggctcatggttagattaacattaaactcagactttgtaataattttagtctgatgcctgattttatccatcatctaaaaacaatctaaaggcaacgctttaatgataatttccctcctctcaaaaacacgttgatatgcctagtgagtttcattccatgccttttatgttcaactgtagcgaacgtaattaaacacaaaattgaagctcaattgagcaaaaggcatgtttatacaagccatgtactagcatacatcaaaatgtggagaatttgaagctgca

SEQ ID NO: 193210 - DNA, 433 bp, Zea Mays
ttcgtagatcattgcgtgatttgagacatcagttgccagtggtggaggcagcaattaaggtagaacatttttctgtgaatgcatctttgattgaaggtccctggttagattatttacttttcttatagcaccattgagatactcatttatttttttacaatatctcataggtggatgttttgaaagcaacactatccaatcgagaatatgaaattatttctgaatgtgcattgtctaacttctctgagacaccacatcctgtgcctactctggatgatcctcgatatggcacttccactactccatcccatgtatcagcttcttcttcagaaagtattcatgtcttgtccgaaggtgcagaaacatggatagctaataaattttctgtctcaataaatctggttgagctttctctgcattcaggatcgacaag

SEQ ID NO: 193211 - DNA, 397 bp, Zea Mays
ttaaacaaaacccttggttagttcagacgaatagttcaacctacagattcttgcaagaaataagtagcagcatgccaccatacagcccatgcatagctcaggctgctctacctctccagaccgtatatgtaagcagcagcctttgcaatcttgatttggcaaacctgcacacgcatggttttcaaactgtgctagcaaaattctaatacgctggtactggtaggctaggtacgacctaaagaagtaaacatgcttgagggctcgataaaattgccataatgttattcctacaaagaaattgccaaacttgcacaatggtctccaaatttgcacatgttaatggtctccaaatttgcacatgtggcctgccgagtgttcactccatgttaccatggag

SEQ ID NO: 193212 - DNA, 415 bp, Zea Mays
cattattgcaaatgagcatgaaagaccaggagggatgtgaccactttgctcaactccctgatgttcttaaattaatttgtgcattggctgcccatcgaaaatttgctgcactctttgttgatcgtggtggtatacagaagatcctctctattcctagaattacccagacatatatgggtctttctgcctgcttattcactttcgggtctcttcaggtagacaaccatacttgttcatgaaatcttaatgctagtcttctacttccttttctgccatgctaatcttctgatatgcttgcagtctaccatggaacgtgtttgtgcgctctcctctgacacacttgacagtgttgttgaattagcacttcaacttcttgagtgcccacaagatttagctagaaaaaatgtgggcatct

SEQ ID NO: 193213 - DNA, 381 bp, Zea Mays
ttctcttcataactcctcacagatttatcccctaaaatctaacatacacgtacgtacacatagacagaggatcaagctacaggtgatctgcgggtcgacatagggttgtggcagtcatgtcaaggggagcagggatgagggctggcacacatgcctcactacaatgcagccagggacgacatgtgggagctgatgggggcaagggcacaccagttcggtggcatacgacatggagcgcaggacagaggctaggagacaccatggcgcgaagatgagagaagaacgacacagatgctggaaagagaagggggtggtccggtggccatggacgggcagaggcgagattgcggcggccaccatcggtgagaaaaggggcagtag

SEQ ID NO: 193214 - DNA, 362 bp, Zea Mays
gtggaagtggcgaaggtacagtgtgagcggagagggccaaagaaggtgccccgacagaggcactaggaagggagggagatgacacgggctcaaccgcaagggaggcgatcgtagcacgtgggaagacaagcggtccaggcacgtgacggcccgcctaagggtggacctcgacgcagtcccgaagaatagggttccagactggatcgaaggacacgaacatgccccggatgagctggtcgtcgtggaggaggacacgcacagtcacgagagcggcgggcgaggtaaagctcatggcgaccggtgcaggccggcgcagggaggcgcggactggacaaccgggcgcggaacagcaggggcggttg

SEQ ID NO: 193215 - DNA, 522 bp, Zea Mays
ccctggctgccttccagactcctactctgactccgccgatgggtcccgagtggatcgcggacaccggtgctacctaccacaccacccccgaccctggtacactcacctctgttcgccctccttcttcctctctcccttcgtccatcatggtggcgaatggctcgtgtcttcctgtcacatctatgggtgccgccagccctcccggctcttttcgcattcccgatgttcttgtcgctccttctttggtccacaatcttctttctattcgtcggtttactgctgataattcttgttctgtcgagtttgactcttttggtcttactgtgaaggactcggcaactcggcgccccctcctcagatgtgacagcaccggccccctctacacccttcggcttccgcacgccacatcttcttcgtcttcgtcacctgacgcagctgctgtttttgttgccgccacgtcttctaccacctggcatcgtcgccttggtcaccccggacgcgatgccttgatgcagcttactc

SEQ ID NO: 193216 - DNA, 604 bp, Zea Mays
acattattgctagtcggaaggaggacatctgttttgaagagttatgtgatggagcatcgtctgttgataatgattctgtgaatcccagagcaggaaatgcaagctggggtctactaaatgaccatctgttagcaagaatctttcattttatgagggcagatttgaaatcacttatttcttctgcagctacctgtaagagctggaatgctgctgcgaagtattacagaaacatgtgtagattcattgatctgtcttctgttggtcctctttgcactgattcagtgttttgtgatattatggtatgtgtcttgactatctgtttgaactcttgagaaattacttctgttatatcctaacgttggactcaaaatcatccatcttccttttaggctggctttgagaagcaaaatattaggactcttattttagctggttgttcgaaccttagttcacatgcccttggcagagtacttgaacaccttccacaaatatcttatgttcatattcaaggttgcagtcatctaggggatctgaaaaataaatttcagcatgtaaaatggatcaggagctcattgaatccagaggggtcatatcggaaaatgaa

SEQ ID NO: 193217 - DNA, 533 bp, Zea Mays
gttggagaggcaaggttggatgggatagggccatccatggatttaggatagaatcatagaatgatgctcctacatgtattagctcattaggttggacggattgcatgagccaaattcttgtttggttggttgcaagttttcaaatgggatgatccagcagatttttgtttggttggttgtatgtggatagataagcagggtatgataatcttcaaattggtgtgttcaagttttgacacatccaaggcatgatgggaaacacaatcaatagttgctaaacttgaataatgtagctcatcatcatgaattggattcctgctgagaaaattacattactaacaaataattagaggtcaaaatttcacactgccgaccacaagctgcacatacacatgaacattttactcaacttactaccattgactaaaagcaagacaagccacagcattgcattaacctttccggacaaataactaccaccaaccaaaatttccaataacaaacaccacaaacaataagcactcttgcatcta

SEQ ID NO: 193218 - DNA, 282 bp, Zea Mays
ggtgtcccatcctgcggacgaagttttaaatgaatatccattggtgttgcaactgtccgtgtatcagtaattccagagcgatcaagaagatcttgtatatacttggactgagacagatataaaccttttgaagtctgctgaacttcaatacccaagaaatagctaagtggacccaaatcagacatttaaaattccttactaagttgcttgacatgagagatatgttctgagttgtcacctgtaatcaacatatcatccacatataatagaagtaaagtgcgc

SEQ ID NO: 193219 - DNA, 295 bp, Zea Mays
ttcatcccagggcagtatcgaagttataattgagtcgcaagtaatggaagcgacgtctcggagttctacctctgactcatcatccaacaactcctatggagttaacagaagggaaagaaaccaaagtaccagttagatctaagcaggaccttttcatggaagactatagatcaacaaagcaagtaacatacctggatgtttatgactttatcccatccaccagtatagagccatttgccactcaatttaactgcataaacagcaccattttgaagcttttctgatttgacaagca

SEQ ID NO: 193220 - DNA, 294 bp, Zea Mays
gtgggtagatctgttgaacacaaaggatcaggcattggcatcactacagaagataaaacaaagagctgaaattgagttgggaggtaatttgaaagctttgaggacagatagagggggagagtttaactcagggtccttcactgttttttgcaatgagcaaggaatcaaacattacaccaccactccctattctcctcagcaaaatggggttgttgtgagaaggaaccaatctgtagtggagatggctagatgcctgctcaaagataagggtgtgccaccaagattctagggaga

SEQ ID NO: 193221 - DNA, 548 bp, Zea Mays
ggcttgcggcggagcgtcaatggtgggatcagggcttcttctgtagagaaagggaggaggtcggttagtgttgttggatccagggcctccgaggctaggagagggagtgctggcgctggtggtgatggcactagcagaagggagaggcttgatgcgaaggccaaggggttggatgagatcagcaggagaagagatgatcttgatgccaaggggaagcagactgatgagattggcaggaaaagggagagctttgatgcaaagcccaagcagatcggtgggaaaagacagggctttggtgtgaatgtgtccaagcaatgtgatgagatcaaggggaaaactgacgcattcgtgagtaatatgaagaagcaaagcgaagatgttggtgggcgaagagtgggctctgattcgaaggcaaaggcaggtgaagaaatcaatatgaggaaagaggggctcaataaattggtgaaggagatgcatacccaaaaggctgatccaggagaagtttcttccaaatccgtggaatgttgtgccacccagaaggatgatga

SEQ ID NO: 193222 - DNA, 374 bp, Zea Mays
gtgaagcagacgatgggggtgctccattgcgggggtgtcatagctgcaccagcgcgcccgagtaacatggttgttgttcacctccgcgtacaagaggttgcaagacatggtgcccctctgcaacgctccgtccggcactggctttcatctgcggcgaccgggcaactaccacgactactctccttcgtacaagggggtctgctggcctcgccaccatctgctccagccacaccaccctatgcgcactggtggccgcgggaccatgaggtgttgcactgcacgagattcacttgctgcaagcaacaccaacgttggcctccacgggcctgcctccaaaggttgttgtgtctttacctccgtggttccagttcgcg

SEQ ID NO: 193223 - DNA, 671 bp, Zea Mays
gatggtgctaagtcctgcctttgccattgagccacgagggcgggatgcgactacctttgtcttggaggtggaagcggaggcggtgaaaattgttggcaagtactcatcgaagacggagctgacgaggagttgggatatacgaggttcgaatgctaggctgaaccgtgtttttgaattaaatggtttttggtatgatccatacccttaggagggttctactgatgccggggaagaacgagggaagaaggtgatggttcgggtagacaaaggctgcttgaaagggaaagatggagttgtggcggctagaaaagaaaaattgaggtgaaaggtaagatgaaggcattgaggggttcgaaggcctcgaggtgttttgttgaggagttggcggagacgtgcgctagacctagggaggtcatgattttccccgacctccaggaatcatcttcgtgaatgctgagggtgaccaggggtgagtggcataaaaaagaccttgtttcctaggccgccggtgaagattacttgacgtcccgtttggctcacgagtttaaattctatccttatggaagaaatgttggtgttgttatgtcggtagtgatggaaaagcatcgttaagctgcggaagaagcggaaggcccttcttgggctggtggatgcccgttgtgacgcgaagg

SEQ ID NO: 193224 - DNA, 437 bp, Zea Mays
gtgggagagagaaaagaaaacctagctctataccatgttggaatatgtgaaaccctaaccctaatcctgggttgggagtatattttatagaagagttaggtaggcaagcacattacaatagggtttagggtttagggtgcagatggtagcaggcttcatgacgggactaaacgtctcatcatagtcaacaccaggacgttgtgtaaaccatcgaagaacccagtgggctttgcaccaatccaaagagtcattgactttcccttataggtccagactcacttgccagtcaccacattgccgcctaggggaaggggcaccaaattctaggtttgattggcaaggagggcatggtactcttcctccataacacaacgtcaatgacgatcgacaagggcgctatggacgaaagacgacataggagagatcgaaggtgaggc

SEQ ID NO: 193225 - DNA, 300 bp, Zea Mays
cctggttattttcacctgaggttgtgttcaacatgttagtggcatgaaaattgcctcaattgggggcaatggcatctagtacaaaatcagatttagtgtctggtagccctgatgggcatggatacttcaatgcacaacgtgggtcctatgcagctgcttcattggaaaggtcaggaagcttccgtgaaggcggtgatggctatgcgatgttttcagcatcaaactcatcaaggtcagcggcagtgaactctatcaatctagttcagtcacttgcactggacttgagaccggcaactgtgg

SEQ ID NO: 193226 - DNA, 297 bp, Zea Mays
tatgtgcagccatgcttctccagcatgggctcctacatgcttgtcttatatcgcaaaattaattaatcaataattttgtggaagcaggaaaaaggctaaatttactatacactgaattccacagcagggaacaaatccgacgcattacatccattgtatccatgaacgtgtctctagctcaatcaggtagccagcctaaatattttgattcaccgtaagagtgaattttaggttggagttaaaagaatcctctcaccgtacctccctatttggaagcaccccagcctggggtaacgg

SEQ ID NO: 193227 - DNA, 403 bp, Zea Mays
ctgaagccagatcttcctcatcacaatgaattgggaaaacattactcttctgaatgttggtcttcagaccagaggcttcaccaaaaagatgtagaatccccttaaatgcctcaatatcaaccacatccgaccgaaggaaaacaaccacatcatccgcgtataaagaaatccggtggtgaaggaatctcgaagaaaggggctggagaaccccttctgcagaggcacgctacaccataatattaaggacatccataaccaagacaaagagcataggagacaatgggtccccttgacgcaaaccccgccgatgatatatgacttctcccgggcatccgttaagcaaaatctgagttgaggaagaggacaacaagccgcaaacgacgttgcaccaaatctgtccaaa

SEQ ID NO: 193228 - DNA, 492 bp, Zea Mays
ctcctggaaaatgtaaattcttcatgtggcttgtggcgcacgggcgttgctggaccgctgaccggctggcgaggaaaggcctgccttaccctcaaagctgtctgttatgtgaccaggaggaagaaactatgaatcatttgctagtatcctacatattctcaagggaagtcttatttaatatcctgaaagctgttggtttgcagcatctcactcctagtcttaattctacttcctttgatgactggtgggaggaagtaagcctgacccttattggcccttccaataagaagctgcacaagggtctaactcccttatcatattaggggcttgggccatttggattcatcgcaatcgatgtgtcttcaacggagaacagcctagggctagcaaggtcatcaattgggttatggatgagtctcatttttggtgtagtgctggggctcgcggtttatctgatatccttttacctcagcatactaatcggtgatttgg

SEQ ID NO: 193229 - DNA, 271 bp, Zea Mays
caagaactcgacgaaggaatatggcatttaggggtatcttgagttctctccttgtcacgtactattatgtttggttgctcatgggattagcatatagaagaaaatgtctgagaatagaaagaaggttaagaaatagagagcgtaggatggagaatttaaatgaactcattcgtgagagtgatagaaaatgtgttagtgagcttcatatggatagaagaactttctttattttgtgtgagatgcttagagatgttggtgggctaaaggccac

SEQ ID NO: 193230 - DNA, 564 bp, Zea Mays
gttggcaacacatctgctagcaatattccttctgagatcacaatttttcatagagtcattaagcttgatgaaggcatgagatcatggtatgatattccatttactactgctgaatcacttttggcagatgaagagttcacaattactgttggcccaacattcgatggttcatctatacctaggatagattgtattgaaatttatggccgagccaaagatgaatttggatggaaggaaaaaatggatgcagcgcttgatatggaagcattgggtggtaatgctactggtggtagatctggaaagagactccaaatcgtgaaggctgctcctatccaggagcaagttctggcagatgcccttaggattctctcacgaatatacctgctatgccaaccaagttgctttactgacatggttgatggaggcatggaacttgataatatgaaatgccgagctttactggaaaccatttttcaaagtgacagggaacctctgctacattccgccgcatgtcgtgtccttcaggctgtgttcccaaagaaggacatgtaccatcatgtaaat

SEQ ID NO: 193231 - DNA, 450 bp, Zea Mays
taacgaatcgagctcgatcgagagtccgcagctagtggcggcgtttggtgccagcgcgcgaccagggccatggccggcgccgcgttccgggctgtggttttctccctcctcggcgccgccactttcttcgtgggttcctcttcggcgtcgtggcatgcgcaggtgttcgtggtcggcggcgagccgagggggtggaggaagccaacggcgcccaacgaggagagctacaaccactgggccgccaggaaccgcttccacgtcggggacttcctccgtgagtgcatgcatgcactaatttaaccataccatgcatgcatatcgatcgagaattcgctacattaatttggtatctggcatgcgcgttgatgcacgcgtgatccatccatccgatccgccgctgcagatttcaagtacgagaagaacgactcggtgctggtggtcacccgcggc

SEQ ID NO: 193232 - DNA, 660 bp, Zea Mays
ccattgcagctccctagcaattcagcggagatggtgccgaagatccagcagatgacgatgttgtccattcgatcccagaatgaaccgttgtctgagggacaaataagatgtggtcgacaaggcgtacagcttgagcacaagcaacacttgatcacaccaacaggagtaattgtcagaggacgcgagaacgaccatcaccaacgatacgaagtcgggaccaacagctgcctagacatggttggcgacgatggcaacctcataagatgcagtagggtcgtcctgtggggaatgccctagggtgggggccgacggctgtggagtgctatagcccaaaccctaccaggcagcgacggccttctcctgttcgagaagggtggctgtctggagatgaggatgtgtgttggtagcctccttgttcgtagcttgagccatggtgagcatgtcgtcaatcttcttgcgaaaggccacaacctcctcgatgtggccacgctccacggcagtcgatgaggtacctgccatggtaaaggagatgtgtgcgttgttgcggcaacgcagcacaagggaggtggtggccctagattggcggcaaccagggaaggagcaaaagtgagattacactcgtgataccttgttagagaaggcattaccacttagaaattc

SEQ ID NO: 193233 - DNA, 300 bp, Zea Mays
tgggtggtatgctgacaaattgtagggtctctcttctcgcccctctcccaaggggtgagatccagttgttgttggcgatcgtcgccgctcatgcgcacacacgaatcgtctaccctaagttgcgaatcgttcctaccgtcgtagagagcacgttgttagtgattagcaccagatcgacgccaacacattttttgcgactccgctggggacaactgagattgaatttatcagatcagatccataactaggtttgacctaccacagaacggtcccatatggccggttgaaaggataaccctg

SEQ ID NO: 193234 - DNA, 1199 bp, Zea Mays
cgccgccgcagttgctcaggacaaggagaaggtggttgcggagatgggcggcagggcgccagagatcgatgaggacctccacagccgccagctcgccgtctacgggcgcgagaccatgaagcgcctcttcggctccaacgtcctcatctccggactgcagggactaggcgctgagatcggtatgcctgctcgtcacaaacttcgagcttatgtatgtgcggtaataaatttgtgagacaaaaaaaggccagctggtttacttcaattgtgcgcctgtaattccttggccgagctgatgtcgcaaaatctaactattgttgtgctactaccttttgtaaagcgattattcctttctttgtgtaagagcaagagtaagatgctgccaccagcgggtgtgctgtgctgtaggattttgatatgtgatcaccgcctcaatcagtcaattctcaccacacctcacttagttcattttcactagacgacatacttctcattgatttctttccatgtttgtataaacactttaatagcgttcgaacttgtataacataaatgataacttagtttcttatactagtgcatttttgtgattacacgtgaatacttgttctgagactagctgcgacttttattcttgtgaactgaaactgtctcaatgcagcgttgcccttaagtaactttcagaatgttggcctctatagatcttattatatcaaagctttctgcaccgcatttgcgcattaagctcactctgttttggtactccataccaaggccagaggattggacatgttttactggcaaatgtagctagccttgttgcttcctaaagttggatttatgatgtaatgctcatgtttgccctagtgtgtcagttatttacttctcttattatatcgatttcagtatatcatgtttaacttgtgaattataaattgcttatgaggattcagattattcagttttacaaggattttgatttatcttctgctctttctatgattggcttacggccacttaatttctgcagcaaaaaaccttgtccttgcgggtgtcaagtccgtaaccttgcatgatgatggcaaagttgagctatgggacttgtcaagcaactttttcctctcagagaaggatgttgggcaaaaccgtgctctagcttgcgttccaaagctacaagagcttaacaatgctgttatcat

SEQ ID NO: 193235 - DNA, 482 bp, Zea Mays
ctggtctgatcgttggctccttggtaaaactgtggctgaacactgtccaacccttatccaggtgatttctagaagggctttaaagcgaagaacagtagccgaggggctcacaaatcgtcaatgggtgtcagatatttggggaggattgtctgtaacggtcctagtggagtatctgcagctatggaacttggttgatggggtagttctgcaacctgacatcgcagaccaacacatctggcgcctctctgctaatggtacttattgtagcaaatcggcctatgatgctctctttgttggtctatccattttggcccttggcgacgtgtctggaagacatgggcccccttaagatgcaaattctttgtatggttggcaatcaaaaacagggtttggacagctgatcgactggcaaaaataggtctgccccatccagttgtttgccctctgtgtgatcaggccgaggaaaccatccagcatattct

SEQ ID NO: 193236 - DNA, 1307 bp, Zea Mays
caagataggttccgaccacttctatcaggtgcccctgccagcacatttggttctgggaatggaaatgatgtgcacaaacctatgttttcacacaattcctctttgacaactagcagcaatgcaagctcttatcatggtgccacttttggctcttatatgcatggcagccaagaacaacatgatttggttggtgaatgggaagcagatgatagttctcggggtcatgaggatatatttatgtttgataaattggatgagctcaataaagaagacattcattacaagagcacgggatctacggataattcactggtcatagtaaaacatctagtaagtagcagacatgacttggaaggaagcagtagacctaatcagtccttatgccattctgctgatagttctcaggttggcaatagtaaaaatgctaattgctctagatgtgggaagttttttgatgcgatggatgtggatgaagagggtgtctattgtgatgtatgtgcttcaatgattggaaatatcttaaccagtcctattgtacaacctataggagaagaaaaccagcaatttgataaaactacaaatttgaaacattgcatcgcatctgaccctcctatacccacaggttgtataggctatagcaaagaagtatctcttgatcatcaacttgtgaacagtgaatcgtacactgattgcctggaccaggtccctccaattcattcaatggggcacacacctcaggaaatgctactggggcgggaggaaaagattgacgcagagcatagaaagaaacatgttggggactcattaggaaatacaaatgatattgtcttccatcaatctaatgtgactgaatgtgaacaaatagaaccaacatctgtggggcatgaccttttcatcagagaccaaatggataaccataatcatggatcgtcccaatataatgaaactatctctgaaactgtgaccagtgacagttctcatcaaccaggatcaactacatatcaaaaccctaaacttgaaactactgagggtactgggatatcagtactattagtccctaagtcaaacagcaataaatggcctattgtagaagggagggccctggctgctacaaatatgttgtgttcagaaccctattatgcaagagatggtgtcagtatgatgaagcgtagctttggactggacagcacttcagctgcttcttccagtgatcttggatcttcaaggcaatcaatcatatgttttgagcgccttaggagtggtaagaggggtgacttcgagaagtctcagataagcagcactatgag

SEQ ID NO: 193237 - DNA, 1947 bp, Zea Mays
atgaactgaaagaacggtgctcaaacctgcataaaggatgtaaaagattcatgtacatttctttgttgtctcctgttccacatttgcaaacatttgagatgttctaactgcacataactggaggcaaatgccataaatgcatactgtcttattgcataagtttctgataaggccctttcataaaaattccttttagttcaagaaatacattcagtattttttctttactttgctgttccaggtttcttgttttagtttttgtaatgttccatgagctagtgctcttttattatgttgctaattaccttagtttcaggggatcacttgatgaggcatatgcaggggatctatcatttgcagattctctgcaagcatttggtgctggtctggatgatcctattagtgttgccattggaggtcagcaaaccgctaatgtatctattgcttaaatgcttagttctgtccttccatcctatctatatctagtaaaacaacaacaacaacgccttttagtcctaagcaagtcgggataggctagagttgaaacttaacatttgtgtttttttccgtttctaatttctagttgttccactgccactttgagtgttttggatatttacggcatatttttttaatgtctgtagatcagaacaatggatccttagaatataaaagtacagatacatacatatccatgcactcattaattaatcaaattcctcctatttaaaattgcagagcatgataattgatagctacaaatttagtcatttgttggtgtttctctattgaaattctctcaaaactatattctttactatgttgcagggcccgtgatgtccaagtttactactgctttcagggagcttgggacatacaaggaactccttcgttctcaggtactataaatcatacagcatgaaaatggacctataatttctgctgcataggtagttcgtgtaacacaaaaggaatgaagaattgaaaggaaaataacattactgttttgcagtctgagttttcatttttgaactcaacacaagggcttgctcctgtgagtctgggcatgatttgtatttttttattggcatgatctgtattagtttcagtttacaatattcacatcgtttcttttcttatgtttttgagttatttctggaacttctatactcaatctgccacctgcagtttcacatgtttaccacctataaggttcttggattactttgtaaatttcaaagatattcaataaacagaaagcacaagtgataaaataagttggcatttgcagaaccacaacagaaaaagtatgactgatgcattttttatttgttgaaagatatatctaccactatccttatgactgtaatactgtatacttctccttgctcaggatgccacgacgctggttactgtagtgaatgctgtacagttttttttctcctcctttcatgctaggtagcaaatcgttttttccctcctgcgtggggttacctgctagtatttctatgtctataaataacacagataggaagaaattgccaattggggtccttgcgtccagtactggctgcattatctagaagcaggaattttgtgttgaatagaataatcatttgttctgcgatggagtttttgtttgtcctcacactgatgtctgtagatttattaaatttcttttgctcaggcatgctgatatatcacatgtataaacaggacaaatgatattttttgcattctaattataataagcattttccctccaaacagcttgagcacatgcttagtgatcgcctgtcacagttcattaacgtggatttaaatggtgtgaaggtaaactctcctctcttctctccacttgaaaccgcacaacatagcatacttgtaactataggttgtaactgaagtaaacaatatagtagttcaggtgctgattttcaatgggca

SEQ ID NO: 193238 - DNA, 364 bp, Zea Mays
aaatagtaaaaaggtgtgagggaataccattattgactcattctcttggtttagttgtacaaaatgaagtcacaaatgtgtggttagctgcaagggatgaagagatatggaaactagaaagaagagttgccactaaaatagaattgttttcaccattatatcaaatatacaatgacttctcctcaactattaaattgtgctttctatatttatccatatttcctaaagggtctacaatagataaggaaaaactgatccaacagtggattgcactcgagattattggatcaaaacatgactccttgcctccttatgtgaatggagagatgtgcatccaggactttttgtcaatatattttctcca

SEQ ID NO: 193239 - DNA, 372 bp, Zea Mays
agctccttcaatgatttttgcaaatttgaattcttctcgatttcggtcttgagacttgtttcgaggttcttcttttcttgttcagatttttctgactttttgagtaattcattgtttaacctgttattttcggcttgggcttcagccaatgaaccttccatagaatgaatgacgaagtccttcttttccaaggcagcttcgtgatctttaactttgatttcaagatcttgaacaatggagtctttttccttcagagcagcttcgtaatttttgactttgttttctagacctttgatggtagcttcgttcttttcatcctcaagatcttgttgcattctcagcactttacttagaagtatactctgccaaaac

SEQ ID NO: 193240 - DNA, 332 bp, Zea Mays
taggattagaagccgggtaacggttcgaccttggcttgttaggaccgtccgatgcggggcgaacgcgtaggatttaatgcaaggcaaaggaatccggatccatcggatcgcgatccaacggactggatcgcgtaccgattggggatggggtcggtctaatctgtaccgccagtctctaatccaacggctaggaattaaccgtaccccttcgcgggtcaatttttctaaagagaccctcacctctctagaaatcaacccgcagtccagaccagtggcgcgctgtgtcttggagatcttgcgggttagcccctgaacttaccagtaattgaggc

SEQ ID NO: 193241 - DNA, 367 bp, Zea Mays
tcaataaatggagtcttacgttggaacgaaacaaactgacggtgccatatcattgtcgtaggcatatcaattcggaaatagaagctcatccaggattccatcccatcgtggtacaaatttgtttattttcttaccaagtgttagttcacaaaccatgaatccataggtactgtttgaagtttatctaagtgagtttccaagctggttctaacttaatcaagtctactttgagccaagcgtagatttggctggaaggttagagaagaatagttgatagttgggtactcgggttgctcttactcctagttgcacaggcctcagtactcctttgtttttttggtttagtttctttgatattttggtcaag

SEQ ID NO: 193242 - DNA, 395 bp, Zea Mays
gcaggcggggccgcgcggggtggcgcggtggactgacctgcaaggaaggggggcgaccgtaggagacacaaggtcgagatcgaggaacacatagagctcggtgagagaggcagtggaagaagtggaaaagggaaaatccaactcctcaaaaatgacgtgacgagaaatgaggactctgtgtgaggtgaggtcgagacaccggtaccccttatggtcgggggagcatctgaggaagacacaacgagtggagcggggcgctaatttatgaggagcagtggaggcgagattagggtagcaagcgcacccgaagacacgaagatgatcataggaggggtggatgccgaaaagagcgaagtaaggagtggggtgggcaaccgtctttgtgggcagacgat

SEQ ID NO: 193243 - DNA, 796 bp, Zea Mays
caaggactttcggcctattagtttagtgcatagcatggccaagctagtcactaaaatcctagctaacagactggggaataagctgcaatttatggtctcccaaaggcagagtgctttcatcaaaggtcgattcatccaagacaattttatgattgtgcaacaaactgccatacttctccatcagcaaagacaagcaagaatccttttgaagctcgacattactaaagcttttgactcagtatcttggcctttcctccttgaagttcttcaaaaactggggtttgggcagatttggatgaatgttctgtgtggactgctatctacttcgtccacacaagtactgcttaatggtgttgctggcgaaaaaattcagctcaaaaagggcttaagacagggagaccccctctcacctatgctgttcatacttgtcatggacgtgctaggatggttaatttcaaaagctgatctcgaaaatctgctgcatccattggcttctagacctttgcaacacagagtgtccttgtatgctgatgatgtgatcatgtttttgcatccaaaagaatctgatattcaactggttctcaaaattttagagatttttggaaaagcttctaggctgaaaaccaacatccaaaaaagcagtgtgtacccaattagatgtggggaagaggaagtggcgacccttcaggagtgtctcccgtgtgagatctcttctttcccctgtaaataccttggcctgcccctgtctttgagcaagctttccagaaatcaaactcaatacataatcgacaagatt

SEQ ID NO: 193244 - DNA, 272 bp, Zea Mays
ttggtacgcaaagtgtttagcacgctgtcctagagtagtaacttgatgtgaccgtggggcgtaatcatatcgcccgagcagttgaccttagtccaaatggtgtcgtgttacgcgaagcgacgtctgctgcctgacttgctttcaggcggtttgaattgcttattgaatacttgcgactgttcggtgagcgtggtaggagatgaacagttgcctccagctcctataaatagcctgcttgcaccgttgttctcttcacacatcctccgatcatc

SEQ ID NO: 193245 - DNA, 537 bp, Zea Mays
gtcaagtggaagcttcaggacagtgtacagtcagtccacaaggtccaattttagtggacaaacaaatggatccgttctccagtcaatggaaagagaaagactatagtggtggaaaccaaatcataagaaaagaatgtgacataaataccaaatcagattatgaagccaacgctagaggtgaaagtctcggtaggaaatgcatacagaagagtaaagaaggtcgtaagggtgggtttgaagatgaattcagtaatggaagaacacatggacaaaaaggtagacacggtaacactgacagtcctgaagatggaatcgttggaaacaaatacaaacataaggccgatgatgttgttataagcagccttgaagataaagatatgagcattaagtatgaacataatggtagctttagatttgaggaacttagtaagagagatgaaaaatgcaacaaaaaggatgacaacaatattcttgaacttgagagcatagctaggggatgtgaacaggacagaatcaaagatgactgcggaaaactgc

SEQ ID NO: 193246 - DNA, 551 bp, Zea Mays
caaaggggtacagttaagtcctagccgttggattagagactggcggtacagaatagaccgaccccatccccaatcggtacgcgatcaagtccgttggatcgcgatccgatggatccggattcctttgcctcgcattaaatcctacgcgctcgccccgcatcggacggtcctaacaagcctaggtcgaaccgttacccggcttttgatcctagccatccgtccccgcatcaacggcccaggtgtctcccccaatatccttgtcgagctacggtggcaccgcccagggcacacggcggaccatcgccggagcacagcgcgcacccgatttgaggccccgtaaccaaattctctgcttctactctatccccatgagttagcgaatgcaagggtagtgttaataccttaattcgatgtgctgaacgccctggccacggcagcgagcacggtcacggcggagtccggcgacggtgagaaattcaggacgtttgggcggaccactgagcgcaatacttcacgcagacgatccccacacgccgatgaacaatcccgac

SEQ ID NO: 193247 - DNA, 318 bp, Zea Mays
gaaagaggatccccctgtcgcagccctcttctatgagaaattatgcttcccggatgaccattaactaacactcgagtagaggaagtgagaagcagccctgaaatgatatctctccagatctgcccaaatcctagattctgcatgacctcaataaggaagggccaggaaaccgaatcaaaagctttagtaatatccagcttgatcatcaggcaaggatgcctttgttgatgaagtaattagccgtctgctgaaccaacatgaaattatcctggataaagcgacccttaatgaaggcattttggtttggagagaccaaat

SEQ ID NO: 193248 - DNA, 980 bp, Zea Mays
accaatcctgtggcatctgtcctgtgcttgttggtccattgcagggttccagtcactgtcatagaagatgacagtgtctgcacctacaaggttgattcccacaccaccacttcgagtggacaaaatgaaaaggaagaactttggatttgtgttgaacctctgcatcagagtctgcctctcttctgggggagtagaaccatctaaacgtaaatatgtatatccatatagatttatgaactcttccaagacatcaagcatcttagtcatctgagtaaatatcaaggccctgtgcccttctgacttcaagcgccttaacagaatagcaagttcctgcaacttcccacaatcaaactggatcaaacgcctatcaggaaagtagacttgacgtcgaacaatagcagaccttataggagacaggatgggagaaaactcgttcatgcatttttctctatatgctggatcaataaaaacaggagagtttcctttgctgtaccagcaaacagggggaggagctcgagcagcaggaattgcgaatgtaaatgattcaacaatatcaagcattttctgaaagcgttccacagatggaagaacaagatctgcaaggcttgatgaatagtccatgtggcacaaagggttgttcctcttatcaagaatatttgatacatgatgctttacagtcaaaacatgtatcatgtttgtgccatagacaggcctcttttggcatctaactctattccaccatgcaatggaagctgccctttctctggattcctttattctctcctcctgtagtgctttctgaatatcttcaaaaatgtttgtcaaattacttccctgacgatccttattagagcaaaaagtatcaaggtcatggttccaggaagtggtactcaaaggaaaggcagaaatgacctcatcagcttcccaggaactcatgctaaattcattttgcgtaaacactaaattcatatcagacagtc

SEQ ID NO: 193249 - DNA, 597 bp, Zea Mays
cgggtgggacaggcagtaatgactcgctcgaggccatctgcgagtgggatagacagtcacgactggcccaaggccaacctccggcaagacaagtagtcacaactcgcccgaggccatcctccggtgggatacgcagtcatgactcgctcgagaccactctcgggcgggataggctgtcaagaatcgcccaaggccaagcccggtgggagacgcagtcacgactcacctgaggacaccctcgagcgggagacataatcacgactcgtctgaggctaagcccgggcgggacaggcagtcacgactcatccgaggccaagcccgggcagcagacgcagtcacgactcattcgaggccaaactcgggtagcagacgcagtcacgattcgcctaaggccactttggcagaactgtccgcacccgacctcctccacctcttcccgcctctcgctctaactgcgccacgttccacatgtcgcgacctccatccacctaacgccctccaatctgcctcccgacgcaattcgcggtcccacacacccgacgccccgccccccgagcctacctcccaatgtcacctccctcgcatgttgacccgaca

SEQ ID NO: 193250 - DNA, 389 bp, Zea Mays
aacttggttgtaccttagagccttcggattctataggtgcatcttgttgaacttgaacagattcagctgctacatccaccaccattacatcctcttcctcctcttgttgctcattatcatctaggaaaatagctcttttccttcttttggattccaagtaatccctcatctcctttctaattgcagtagtggtctttgaacatatctttgtatctccatagccacctgctagatgttgctttagcctttttatccctccggaaactatgatgtcacaaagggtgcatgtcacttgatctctatttgccaaatttgcccaataaccatacttccaacctggatcatttgagctagccttccttgctttgtctgtctttggatcatagttg

SEQ ID NO: 193251 - DNA, 412 bp, Zea Mays
gtggatcgactcaggtctgaactacgccccgggtgtagggagcgtgcgcgcaatagtcgccgcattgctgaactatcagctgaagttaatcgcctgcagtatgaaattacggaacatgatatgaccattaactgggctgtaaactcgcgctcattcgcttgggactgtgaagccaaagctctagctcgagtagcagaacttagcgcatccctcgaaaacctacaagcgtactgcaataccttgcatgaagaagtgcacgtattgtatgatcggctgcacccaaacgtgccactagaagtggaagcaatgggagctggaccatctggaacaataaatggaggatctgatgggggaattgacctttttggagcccctccttacatgaatcttgcagatgaacggtctcctgaag

SEQ ID NO: 193252 - DNA, 1573 bp, Zea Mays
ggctgggggaagagatcgcttggtacgcggatggggacaccattgtgcggagcgagcagaatcacagcatcgcttacgcgtacggtatgtgccagatacctgttcctggttttccggggatggatggatcacacttgtgtatcgaagcattataatagttactcgtatggatgtttggtttgagatttgatgggttccatcaactttcatgtgaaatgcgagtttgtattatcacacgatgctacacttccagtataatgcgtaatttgtcacattttctttacttctttctttcttcttttggttgagaagagtgatttgtgagtctgactagtggagatgtggcacgtgaagtcgtgaatgcattgcttgagaccgagaattaactccactagtcaacacggttcacctagctgttgttttcagcataaatacttcaggaatgtattcgatcgggtggatcatgatgttactggactttatgattttagtatggaagacagtacttagatttcacatacggatgaaaaaaaatcatgctgcttcttgttttcagttaatttttgttcatctgggtgtaatatgaaattcatatgcagatcgggtcttcggaccaactacaacaacccgacacgtatatgatgctgcagctctgcatgttattagtggtgccatggagggaataaatggtatttgaaattctcctctcttgtccatatagtattttttttgtttgaataacagtctaatatgcttatgaggatcattaatattattttctgggcaactttagagtaaactacagtgcacaatgtcaatccatgtgaaatcattgattgaaaatgcttttagtacagagtttatgcgatcatggcacacttgttttgttatttttcatgaatagtttcatttttttgttgataattttcagttctctgtcataggtacaatatttgcatatggagttacaagcagtgggaagacacatacgatgcatgtgggaaaacttattccaatatttttcctttactatgttttacttctgtagagtgtatgtttctagtcctgtgctttgaagtatgcctcatgctaccaattaacatgcaaaaacttggagaaaatagatacagtttaaaccttttgttaagtcgctttcttgtagactccccatgggcgcaatataatgttttgcctccatttcacatatagatctgttaaagttttcagccttttgttttgtttgtgacaccatatgttctcactgctcctgtatatgatctgtgatatgtccctttcctgaaacaagaaagctgctgtctttgccttcaacgtatttgttgacagcatttctctttcccaactttgaattaactgtagtgtgtacaaggttgaaacatttcttatggtgccattcgatggcttatatttggactgcttttattcttaatacaatgacactcaactctcttgcatgtccgagagaacaattcattttttttactttctcagtatactctgttttttacgagcagggagatcaaagatccccggggatcatacctttggctgtgaa

SEQ ID NO: 193253 - DNA, 365 bp, Zea Mays
agaagtttaaggttcagattcattagttgacgccgaataccatggtggtcctaagcaagtatgtttgggcaaggaccaccttcgatggggctgcgttagttgaggtctttgctaagaattactacttgcactagaagaagaggtctataggtggggttgttgaccagttcaggagctacacttttacctcgaagacagggaagaccaaagagaaggtagtggagttagccctcggcctcggcattactgcttggacggagaattggttttatgtgtgattgtcctaagggcgaggactggcctcagcccaatgttatgtctccatttcaggtcgaggcctttccctgttatgctgttgctaaaag

SEQ ID NO: 193254 - DNA, 642 bp, Zea Mays
taaagattgatgatcctgatatatgtgagaggattgacattgtgggctccccacttgctgtaacagatggaaaactcagtaatgatagtgaaggtaaggctggaacttccagtgacagtggaagtgacagcgatagtgatagtgacagcagtgacagtggaagtgatagtgagagccaaagcagaagtgctgcggaaactggtagtgggagtagcagtgatagtgacagtgatgcctcatcaagcagcaaggaaggatctgatgcaattgttgatattacaagtgatgatgacaaagcaaatacagcacacacaaaagtagtagatgaccttaatttgtcttcatcaccaagagatttgacaagacttaatgttgacgatgaacaaattgacattggaacaaatctggactacaggagtgcatcaccccatattgatctgaacaattttaatactggcaatgatgatgcagcagcagagggctttagttctggcaacctgaacaagccatctgaaatgccgggaagcaagaacatgacaaacaccagaatggattctatcggagttgataacaagcacaatgaaatgtctttcgtggacaaccttttcgatgattccatgagagcagccagtgagaactcac

SEQ ID NO: 193255 - DNA, 348 bp, Zea Mays
tcagtgggagacgggacaaaggtgtccttgtggaatgatgcgtgggtgcaagggttaagaccgaaggacattgcgcctctcattttcaatgtgtcccgaagaaagaacagatctttgagtgaagcgttgtggaatcatacttggattagggacctcaacctgttttctgctgaggtgacagaacaacacattgtggagtactgtaggctttggtcaattttgcgaagagtatccttgcaaccgggtatttgcgactctattagttggaaactctcagaagaccgacagtattcggcgaaatcagcataccttgcccaattcctcggctcagagcttacaaatatgaac

SEQ ID NO: 193256 - DNA, 687 bp, Zea Mays
cattgcttttactttctatgtgcagcaccgttggaggtaatttcctagtttaatatgattggatgtgtctcagattcatttgctgatgaatatatatgctgctggcaggatatcaaaagttataagcttggtgacccatcatcattccactatctcaaccaatctacgtgcattaaacttgacgaaattagtgatgctaaggagtatcttgcaacacgaagtgcaatgaatacagttggcattactgagcaggaacaggtttctggcttgtgtatctttcgattgattgtagagcatgtagatatgtgtatagatttttaagcaaacatgtttgtattacaggaggctatattccgggtagttgctgctgtgcttcatctcgggaacatcagttttgtgaaagggagagaggcagattcatctgtaataaaggacgagaaagctaggttccatcttaatgcaacagcagagctcttgatgtatgcctaatatttcctccatgttcctataattttctacaaaccctgttttgttcttgtaaaagaaagggagcacaataaggaaacaaactgtaatgcgcatacattcacatttataactatgatgcactgtgccattcttattacaggtgcgattgtggaaatctggagaacgcattaataaagaggaaaataaatacaccagaag

SEQ ID NO: 193257 - DNA, 304 bp, Zea Mays
ctctcggtggaggccgaattgctcaccggttcgtggacatcaccgtcgggccgcatctcaccatgggggcaggttctccattgctccaccgtcggtaaaatactcctagaattattctgggttgattccgcttcgcgtttttgctacttcgattggggttcggtcgtcggggtgttggtttcacgggcatcggtgagctatcggggcggagctcttcttccgccgccctgtcgtgcagtcgggagcaggaagaagcatggagtccattgatctagtgatcaacggtggctataggaagatgaag

SEQ ID NO: 193258 - DNA, 283 bp, Zea Mays
gttttgttgattgttgaacttattctgcttcaggtatggacaatcctttataaaatgaccagactttccacagttgaagcaaccagtgaagaactagggagagtggggaaacaagcaccaggggcactcagctgatttgtagaagtgggggcagtggtaggacgaatgaaaacaggctatttgaatgggtaggagggtggacgaggcgaagaacgattctgattaaaaggtcggattaccaacctggttcgcttctcaggtccctgattagacctgtcacctc

SEQ ID NO: 193259 - DNA, 418 bp, Zea Mays
gtccccgccgtggataaactccagccgataaagaattccggccaccgtaccgtgttcaccgcggtggaaaccgataagaacgccggtgactcccgtcgcacggccttgtgccacgtatccgaacacctctgtcgcatcgacatgactctttacagccgtcaaatcgtcgccggtgagctcgccacgactgaggacacgaacccactgcgccatgatccttccatgtttccggccgccaactctgcccggccaaattgagcgccaccgtcgaagccctctataaattgatggccggggcagctgcgctatgtcatcgtgaagccatagcacccgctcccacccttaatcattcacccgagcccgtgaatttcgaacttcccccaaattcgatccctgccaccgtgaagatcagctcgtc

SEQ ID NO: 193260 - DNA, 284 bp, Zea Mays
gttgaagcgaccacagggcggtgaacggtaagggtgctgaatcccgacaggggcgggaggaccaccatccagatagtggcgtgcaacgcactcggcacgcaattctgcaaccttcgcccgaaccttgcccaactcgtcaagggcatggtccaactctgtgttgagcatgatgaccagattgaccatactattcagcctgggattgccttcaccaactggcgagacaatcacacctccagcactgccggtcgaatggcgaagatagtacttcaggtcaaggccat

SEQ ID NO: 193261 - DNA, 420 bp, Zea Mays
ccatttcaatctcaacaccatcggaagacgcaacatcgtcattatcatttttcacctcattatcctcctcatcaacaaccatttcaatatctacgtccattccgatagcttcagttaagtctatctcaaatcgccctcctagctcatcttcttggaagaactctccatcatatgtgtccaggtctaagttgtaatcttcatcgttaggaacagataacctcccgtgcggcgataacttatacacaacatcccaacccttaagatgttctttcgtttggcacgtatatgggagataatacacttgtgtggcctgttgggccacgatatagacatcgtctcctgctaaggtggaatcttgttgaatttcgactatcccaagattagaatgtgtccgtctcgtcacttgagggtcaaaccaat

SEQ ID NO: 193262 - DNA, 969 bp, Zea Mays
gatgccctcaaggctattaggggcagcttgatagatccacacggaaatcttagcagctggaaccgaggagatccatgcatgggaaattggtcccatgttatctgttacaatgcaacaggcagtgatggatacttccatgtaaaagaattgtatgagcataagcgatctctttgtcaatcaagtgcttgttatattccacactacaccttaacatttggttatgagttacttttggtgatgagtgactaaacctgaacttagttttgttataaatttgtttactgccttagtaggccaaaagtttgcacctggatcttttttccaacatttttgggaagataaaaattgattacctattaactgctatcacacattctctctccaaagcagaaatatgttggagcattcattatactcttcctgatttgcattgttggaaaatagacaatattttgtttggaacataatgtgttaatactattctgttatgactgaagttagctatttttacaatcagatgtaattactgtgattctgtgcacttgtttcacttgaccacatcttccatccaccagtttcctctcaaaagcataggagagcaacatgtcatttcaataaagaagagaataatttacaaccgcaaaaaagcccaccccaccccacccgccagttaattccatagctattaaagcatttacgtgtataacacaaatttgattgcagacagctcctaagtttgaatctatctggaattttggctcctgagcttggtcagctttctcaaatgaaaattatgtgagtggatttaatttcagctggcaattgattgattgctgagctaagtttagcttgtcatttgaactgcccacttatttaatcgtacatgcacaaagatgctgagtatttatttcttttgaagggattttatgtggaattcgattggcgggaccatacctaaggaggtcggaa

SEQ ID NO: 193263 - DNA, 301 bp, Zea Mays
agatgtatgtggtccatcttcctttgtttcaaaggaaggccttcgatattatatatatttttatagatgatttttcttgccacacgtggatttactttatgaaaatcttagtggggctttatccatctataagatctatgctacggtttgtactcatttcgacatttctatttgtgtctttcacgctgactctgtaggagggactttttgggactcttcgcgaggttctttctgagcaaggtactcttgctcaatttcttgtcctagtgctaatgcttgtagtggttttgccgagcgtaag

SEQ ID NO: 193264 - DNA, 410 bp, Zea Mays
gaaataaaatgctaatatcagacaatatcatatgattatatagagttgatagtgagtgttattttgatcaaaagcagcatgtttaaagatatgtcactacaaaagatgagcttagcagaactgctgctacgttgcttgcaaacagtcatatgtttatacatactgcaaaagagttttggttgcgagaagccaaattttgttgttctcgtaagtagaaccacaaccgatctatttctattgaacaatagatgcaacgtctcaaaagagtagctatgtagaaggtaactaattgttcttcatctttggtctttttgcaaagactgaaagttggtcagcaccatgtgtttcttcctataaaagagggagcaatataggttaattaaaaatattaagtacatatattgatatct

SEQ ID NO: 193265 - DNA, 597 bp, Zea Mays
acgtttgagaccatggttcttagcatgaacaaggacatcgtatgtgtactgagaagatgagtaatcaccaacaattatggcagctatctcaccgcttgaaggcaaattatattggacatcgtgtctagtattgcagcccaataaacgtaacgttatatcgctattgtgtgtttgttctatgcgttcacgagcacaacgaaaggcctttacaagctcgttatgcgcgtcaagcatctccatcaaggactgtgtaacagcggagtctgggcaagcaacaccagcatcatcgctcccaaaaatgtggagcctactttggagctcagcgtcaggatcatgtatgtaaagctgagcaaacttgggccgtgaacctggacgaggtagcaacgttccaattcgatgatgaaccacaccgttaattcggaaaacatacggtgcagtaccattgtttatagccttgtcgacggcagcacccaaggaggtgaaagcgaaaagcgagttgtaatatcgtatctggcgcaaaaaacgttttgagcgagcgtcaccatcaaacctcagaagagttcgcagaggttcaggtggttttttgtaaggctccaa

SEQ ID NO: 193266 - DNA, 384 bp, Zea Mays
ttgtgacttccttcggtaatgaattttacttcaacccttctattggaaccttacctatcttacccttgattgttttatccacttcgccacttcgcgattcttgccttaactctatcctttgtcatgcattttgttattattaccttcaccttagacacctctatatcttacttgatgtttgtctcctacctgccctttaaaatcacctctctcccgtcttattctgagagctatactttacctatctttaccttggtcgtatcctcttctttggcttgcgagtttgtaacttcgtccttagttgtgcttttgtttgttattgcctccacctatcccatctctcaatcttaccttggtgattacgctatgttcgttacctaaaac

SEQ ID NO: 193267 - DNA, 2238 bp, Zea Mays
atttcattgtgatcgatgatttatgggctacatcagtgtgggatttcttgagccgtgcttttcccaaggataactgtggcagccgaatagtaataactactcaagttacagaagttgcatttgcttgctgtaacaaccacacagttgatatattcaatatgaaacctctggacgacgatcagtcactgcaattgttttacagtcgagtaaagcatataaatggttataatgctgaagaatgcaaggccatatcacatggaatcgtcagcaattgtggtaatctttcaccgctagctatcataaatatagctggcatgttagcaggctgggcggatttcaatatgaatgactgggagtacgtaagcaagtgttgtacatcaacagcaaatcttactaccgaggaggcgacggagagatttctgaaccttatgtacaacaagcttccagccaaattgaagacgtgcctgctctatctcagtatgtatccagagggctgtgtcatcggaaaggatgatttggtgagacaatgggcagctgaaggtattttcagtcaagtggtggaaccaaaaggtagagaacatgaagtgggttttatttattttgatgagctcctgaaaagaggattgatccagcctgtagatacagactacaatgatcaagtgttgtcatgtatagttcatcaagtggtactggaatttattacaaagaaatcaatgcaggaaaacttcatcactgtcgtggattatcgtgaaacagggacagtgcttgatgataataaggttcatcgactgtctgccaggtttgaaggtgccaaaagtgcacagataccgcggagcttcagagtacgccaagttcggtcctttatgttttctggattcattaaatctttaccttcccttctcaagtattgccttgtccgagttctgattcttcatgtttggagtgatgatcaaggcaagactgtggttctagacctttctccagttggtaatatgcttcatgtaaggtacctgaaggtggtaagcaacatgatagtcaaactcccactcattattcgaggcctgcgacacttagagacactcgaggtggatgcagaagaagtcgctgttccactggatgttttcatcttgaagagcctgttgcatctccgacttccgagcaaggcttatcagcctgattcagatattcaaaggattgatttaacaaatacatttcctttaagatttctgcccttcgtcagagcgttgtcaatgctagggcggtttctcctctcccatggccatcggattcgccatttgacatcacttcaaagtcttggctactttgacctaagcacttgctccagatatactgtgtggcaacttggcaagctgaccaatttgagggatcttcatctaacctgctctgcagttcgttccaggcatcgaattagcaacatccaatgccttgcctctgttctggggaaatgcaccagcctcgaatctctaactatccgtggcgaagcatcttcaaaccagagcatttcttttgatggcttaagcagcttgtcttctccaccgtacaacctcgtgagctttgtgctgtccccgaggattttcaaaatggcgaagctcccaaagtggattgggcaactcagcaggctcagtacgctaaagattgctgttggcgagctgtcaagtgaagatgttgacatcctcaaaggactctctgccctcactgctctttctctctacgttcggagaaaccctaagaaaggaagctggatcctattcagtaagggcttcgcagtgctcaagtattttaagttcacttgcactgcactgtgcgtgaaatttagtgaacaagctatgcctgctgtccaaaggctgattgtgtgcttcaatgctaacacaatgcagcagtacaggccggaagatgcaggaatttggtacctgtcaggccttcaagttatctctgccagaataggagctgccggtattgatcaagccagcagagaagccgcgaaatctaggttgctggacgccattcttagcaaccatccaaagcctcctcctatcagaaacgtgcaaatggtggactgggttattcatggcgacacagaggagtgttcaaccggtgtgatgatacgtaaagatgaaagcagccgtgagcatactaggtcatttttaagtcagttcccgttcagaagacgacccctgcttccctccatattcacaaggcgtggccaggatgatgagc

SEQ ID NO: 193268 - DNA, 376 bp, Zea Mays
ccatttcagtcattccattacaattttagttattccgttacagtttcagtcatttcattatagtctcattcattacagttttagttattccgttacagtttcattcattccattacaattttcgttacattttcagtcactttgttacagtttcagtaattccattatagtctcatccatttagtaattcagccattccgatatagtttcagccattctgttacagtttcagccattctgttatagtttttgtcattccattaaagttttagtcattctgttccgttatagtttttagtcgtccggtggagcacgggacgcgtggggatcaacacgcagcgggctgttggggggggggagggttgattgggtgtgg

SEQ ID NO: 193269 - DNA, 537 bp, Zea Mays
acgccgcctcctagtctcatctgtagtgtgaataacaactcaagaggtgcagcaccaaatgaacaattgaagaaccaaaagaacacagagattaccatctgtagaggtgctcatttcggttaagttcagaacagattggtgcagacggttgccggagcagagcagtgagcagaggcgagcgctggagctgagcagtgagcagaggcgagcgccgaatctgagcagaggcgagtgcaacagagggcagagggcagggccaccggagctgagcagaggcgagcacaacagagggcagggccaccggagctgagcagaggcgaacgcaacagagggcagagggcagggccaccagagctgaggaccaccggagcagagggtagggccgcagggcagcaatggagcagagtgtgagagggggcagaggcggcggcttagggttttactgttttagggtttctaactttctactgtgcggcggcacagtggcagacagtagagcttgtttctactgtggacgggagagtggagacagtgggc

SEQ ID NO: 193270 - DNA, 328 bp, Zea Mays
ctccggtccggaccttttgtcacgtacttgaacagatatttgatgaatatgcttttgttacaccattctacattgatgtgtgcttgatatttcttgagcaatgtcaagttatatggaacaatccatctgttatctagtttgatgttagacttcataacaaatctattattgtttgatctcttgtagaccgcaaatccatttgtatcaactacagtttcattttgaaattttttgggatagtgttttgaacattgaccttttttcacgcaaggtgagctctgattgtaagatccacatggcccgtgaaccatatgctccgcaatcaaag

SEQ ID NO: 193271 - DNA, 303 bp, Zea Mays
tcttgaagttgttatccgaattagggacatgtagttaagataaagtagtaggtggagcagctagtttagtaggtggctatgagattagtcagaatctggttgggttgttttgcttctgaatggtttggataggttatgtaacctatgatgtatgtcaaattgttgggtatggcctgagttaatcccaatcaccaatttaggcttaagtgagttaggagtatgtcttatcttctgtacccgcattaagtaactcactctagattagatcatattagattaaataggatctagattagattggat

SEQ ID NO: 193272 - DNA, 285 bp, Zea Mays
ttccatagcagtacagactgcaggccagacatccttgccaaatgacttgtcacctgttgcagcaaaatccctgtaaatctgaagaacgaacttgggattaagatctttccatctacttgtgtcatgtatgttgtaagcattcaattcatgccaaggatcatgtgctccaagatcatgggcgacagcaccgattactttacgaataccccaggtaccatcagcaagaaatctgactcttctgttatcttcccgcaaaacagctctagcaaaatcacgttgaatgct

SEQ ID NO: 193273 - DNA, 637 bp, Zea Mays
ttaggagattgtatacttgtactccaagttaccttggctatatatatgagagatcacccccctcattgggtgtggtgtcttcccaattctatctctctacatggtatcacgagtccagggtctccctgattttgtgccctccctcccgcttcctctaccaccaccatatgccgccgcctgacctagggcgcggcacctacctgcgccgcccctccctctgctgcgcagaagccttggatgtccacgatcacccacgtggactcctccgccggtgacagcgattccgactgctccgtcggattttctctcctgttcggcgacgacgttcttgctgcccagatccatctccccatggcgcttccctacgccacgatctctgtgcagtcctacgtccccatgaagctcgacctccacgcggacaacttctccaagtggaaggcctgcttcgaagccctgtgtggcaccttcgagctgctgtcccacatcgacgggacggcgcctcccaatcccctcacgccggtttggctccaggaggactgttgcgttcgtgcctggctctacggcaccgtctccgacgccgtccacgacctcatcatgacgcccgaaccgacggcacgcaagcattgggctatcatca

SEQ ID NO: 193274 - DNA, 373 bp, Zea Mays
cccaaatagaatcgtggtgctgggaggtattgggcaatcccacaataaaatccatgcaaatctcctcccatttccaagatggtatgggaaggggctgtaaggtgcctgccaccttcaaatgactggccttgattctttggcaagcgtcgcattcagatatatacttagcaatttccgtttacattctggtccaccagtacaaagatctgagatcatgatacatcttgttactgccggggtgcatggagaatttggaaaggtgagcttcatccaatattttctttctaagatcggggatcttaggaacaaccaatcggtctccaaaccataggattcctttgctgtcctgacggaagcatttgtatttgtccac

SEQ ID NO: 193275 - DNA, 296 bp, Zea Mays
gtgcagtatgctcggccacaaatgcttgctttcatgttcaggcatggccattacactgaagcatgctctctgttcttcccattcagtcaaccaaccacggaaggggaaacatctttgtcttcagctccatggagtgatcctttaacaactgattatgggacaattgatgacttgtgtgatctctgtcttggatatggtgccatggctgttttggagaatacaatacggacaataacacaatcgcccacatatcatgaggcacacatgattcagtacatgaacactattatcacccg

SEQ ID NO: 193276 - DNA, 513 bp, Zea Mays
gctggcaaactcgttccgcacggtcgcccttcattcgccagctatgaccgactcggtggtcgactctggcgcgtccaatcatacgacacttgacactagtaacatctctctttcgacccccaaattcagcctgcccttcatctatcattgttggcaatgggtccactctaccagtcacctcagaaggcgactcggttcttcccagcccattgaatcttaataatattttgctcacacccgacatcgttgataatcttctttctgttcgccatttcaccactgataatcgttgttccatggaatttgacccgtttggtgtttctgtgaaggatctgtattctaggaacgtggtcgttaggtgcaatagcttcggatccctctacaccttgtgcctacctgctgctcgtcctcttgccacactgtgtgtcttggttgcagttgccctactacttggtactgtcacctcggtcatcctggagttgacgtcttgtccaaactcactatttctctcgc

SEQ ID NO: 193277 - DNA, 675 bp, Zea Mays
aaaaggcaaagagtgaaagaactcatccagctgggttattacaacctttgcctgtaccacagggtgtgtgggaagatgtgactatggatttcattgaaggtttgcctaagtcggatgggtttgatacaatcttagtggtggttgacagattttcgaaatatagccatttcttccctttgaaacatccttttactgcgaaaggtgttgctcaagtctttctggacagtgtggttaagttacatggagggcccaagtcgctggtatctgacagggataaggtgtttactagcagtttttggaagaatttgtttcagctgatggaggtcaagctgctgatgtctacagcctatcgcccacagactgatggccaaagtgagcgtgtcaaccaatgtctggagatgtatctcaggtgtgctgtcaattctcaacccaccaaatggaagaattggttggctctagcggagtattggtacaatactactcatcatgctgttttgggttgtacaccattcagggtgttatatgggtatgatgctcctctgttagcccttcctagactcatcaatattgaggacccagatgtcactaagtgggtcaaggaaaggaatgctttttctgccatgttgaaggaacagttggctagagcacagctgcgtatgaagcaatatgctgata

SEQ ID NO: 193278 - DNA, 303 bp, Zea Mays
caacaatgttagcatggtctacctctccaaccatgtgcagcatcagcacacgaagcacgtggaactcgaccttcactttgtccgcgagcgcgtcgccgtcggtgatgttcgcgttctccaagtcccgaccacctcgcaattcgttggcgtcttcaacaaggggttgtcgtcgagtgtattcattgagtttcaatcccgtctcaacatctgtacaggattgagttgagaccgcgagggtgttagactcctgttagggttagccttagggtttctctgcaattacccaattacccctattgtgat

SEQ ID NO: 193279 - DNA, 506 bp, Zea Mays
tgttttgctaaataacgctagctttttaccaatcgcactcatcgtatcaacatcgtgccgactgcctccacataaagaaaaatgcccatcttgtcacacacacccacgaaacgacaggcgcctacttccaaaccccattttgtttttgttttttttaccatcgagtaggctgccggcgctaccaatcacgaaatgattttacctaggcccgatagccaccatgtcatgtgcatctgcctgccaaagcagccatctgcgtctcctttttcgctctccgacgagaaagaaagagatgctactagtactagctctcgtgatcagccgccagccacacacagacacagcccacgggggggcatgaagaaaggtgcgcagcaaacaccgagccgagcgtgacgtcttcctcgcgcgccgccgtgtgggtccaaaaactgttgacgacgtggaggtggagcggtagccggcagagcggcaacggtggcctacgagcagcagctgacctgacc

SEQ ID NO: 193280 - DNA, 615 bp, Zea Mays
ccttgaaacctagatccgagcaccttctgcaaagcaaggcgcagaaacttttctcaccccacctcgtagcgtctgcccgcaccaaatgcctcgcagtcgctattataccccgcgtcgcggagcgagggggtggaaaaaggagaatcgatgtgcggctggatccccgtggcgaagaatacccagcaccgatggcttgaactgggaggaggaaaaggaataatgacaccaccaaaaacaattacttgaacaccacgaacaccgccgcagcggatggggtggtgggtgaggcgacgaagaagggaaaggataggggtgtggcggagattggcgaagccgcaagccaggaacagcagcaacgggcgtgtggcgactgctcgaactgggattattacccacgcgctgcggagatggggattgggttcggatcgctgctgccattgtgtgcagccaataaaaaccaaacccccttttttcctctccgcccccgttcgttcccttttcgcctggggggtgctggctgagaggctcaggcttcgtatttcttttgttttgttttgttttttctccgtgggagagtggagtctggagtgtgttttgtgttgcgcggcagctgct

SEQ ID NO: 193281 - DNA, 344 bp, Zea Mays
aaacgaactatctggtcgatgtaaatttccgcatacttctccgtccggtgggtggtatgtactggcaagaaatgagcggtcttggtcaatctgtccacaataacccaaattgaatcatggtgcctggaggtgttgggcaaccccacgataaagtccatgcaaatgtcctcccatttccaagatggtatgggaaggggttctagaggacctgctaccttcaaatgactagctttgatcctttggcaggtgtcacactcggatatatacttggcaatttccctcttcgttctggtccaccagtacaaagatctgagatcatggtacatcttgttgctaccagggtg

SEQ ID NO: 193282 - DNA, 447 bp, Zea Mays
gaacaatcattagtggttccaacaactttatcatcccatacaaaactcgagtcatcgcatgcaactactagtgtcattttgactgcaacttcattagtttccaagattgatgggacgccaccgactaacaggaactatagatattatggcaatagcattttggggaaacctccgttaatttatgcacaagaaatattgccatcaaagtttgtggggtctaatacatcaccagaaggtcttggaaaggcaaaggtgaatccagttctcttccaagaaaagtttccttctgaacttaatggttcagttccattgcgaaagcatgacttcatgatagaagaacatgttccaaacgaaaaagggatgtgctcagagtcaaagaccgaacaagtagatgtgaccatgccaagtactgcctttggattggaggatgacactagtgttgctaaa

SEQ ID NO: 193283 - DNA, 591 bp, Zea Mays
gttaagatgtctgaagcgctcgtgccactgccatgccccgtcgtcccgacgaggagcaaggcaacaaggttgtgccaccttcacgttgaggatgtaaagccgatttggactcctatgtaccttggcaagaaggcgacgagaggggtcccaaatcctcacgactctgtgctcgacctccacgcgtgaaccgttctcatccagttgtcccaagataatgatagagttcctcaacgcggggatgtactagactccggtgagcagcctgtgctcaccagacgcgacggtgaagacgactgagccgacgcccttgatctctacgccggaggcgtccccaaacttgacggagcctcgaacgctagagtcaagctcgatgaagaactctcgtcgtccggtcatgtgatgagtggcaccggtgtcgaggcaccatccttcgatcatgtctttgctggagtcgtcgccgaggaaagcgcgtgctttcgactcatcaaggtggaggagtgctactgcggccgatgccgctggagatagctcgatgcttgcatgtgctaggagcagagcctcctcctccgcctccgcctgtgcgacgttggc

SEQ ID NO: 193284 - DNA, 895 bp, Zea Mays
gcctgggcattcaacaacatgatttgggggatcttgagcttgttttttctatggaggaggtttggtcagttgtaaaagatctgcctttggacaaggctcctgggccagatggtttcacatgtcgtttttataaggtttgctgggatatcatcaaggaggatatgatgggtgctttgcttgctgtgcaatgtgggcatgtctccaaactcaaaatcctcaacacggcttttatcaccctcctgcctaagaaggtggatgccctgctggtcaaggattacaggccaataagccttgttcacagctttgctaagttggtaaccaaagtgctagcggctcaattggcacccgacctgccaagtatggtctctatcaaccaaagtgcctttatcaaaggaaggagtatacaagacaatttcctactggtgcagcaacttaccagatccttacaccacacaaaagagcctcacatcctgctgaagttggatatttccaaggcctttgactcaatatcctggccattcttgcttgacatgttacaacacttgggttttggtcgaatctggtgcaaccttattagtctgctgctttgcacttcctctacacggatccttgtcaatggcgagcctggggaatacattctgcatcataggggtcttcagcaaggcgatcctttgtcccccatgctgtttatccttgtcatggaggctttgaatgctatggtcagttatgctttcaaggaacatatcctgcagccgattgcaaatcaacatgccaaacattgtatctccttctatgctgatgatgttgttttgttcatgcggccctctcatcaggatatctcagcaattatcagcattttagacatctttggtcatgctactgggctaaaaacgaa

SEQ ID NO: 193285 - DNA, 308 bp, Zea Mays
gaaaatctaaactgatggcgtagaagggattgcataattttcgatggcatataggagattgttatagatttgcatggcatacaaggaattttctcataataaatagtgaagtatgtggtgtgaggtgggacaagattaaatttttttctctcacttttttctatgttcgcaagattaggaatggtgagatggaggtactagactatagatagtcaaatggttcatatctaacgggtcgcaccgagaaacgattcatttaattgtgatgtagcctagaccgacatgattcaaaataagtccataccgat

SEQ ID NO: 193286 - DNA, 342 bp, Zea Mays
ctcgactcgcagctgcaccgagccacatcgagccgagcggctcgtttccagccctattttcagtgtttgaaagtaaaaatctgattgactttcattcagctccctctgctcgtctcaccgattctacagtattaaaatataatggagtccccacccatcaccagcttaagctttgactgaactgtttctgcagtgcatcgtcaacccatcctccccatagatcctatagagtataggggactaggggtacaaatgataccgatgtttttcggccgtattcgagtctaaaccgttttaaaatgtttagatctatatctattcacaactgagacgtatacgtgt

SEQ ID NO: 193287 - DNA, 584 bp, Zea Mays
atctagcatccttattacacatagcaatgactgatgcgagcttggatagggtctcgtgaccaggatggccaagacgacgatgccaaagtggagtggagctggcgacgaagctgtgtgcagcagggaggcacatgggttatagcggcccggagctattgcacctgacgatcacgtttcgagacaacatatccttcacagagcaaccagagggatcaaattcaatggaacaattattatcagtggtaaaccggcgaacagaaatcatgtaaagtggtggagccagtggaaatgactggaagaagggagccgtcaccgacaatcacggaggaaggtgtagtaagagagggagttgaagtgtttgatagggtaccggcgtttgaggtcatgtgggaggttgcacctgtgttgaagtaccagccgatctgctggggcggagtcagggacacggtgctgaagggactgggcacccaatatggagtggccgactatcccaggatgccatagggaacctgggaaatacctccctgcagagcgtcggtctgcaggttgtgctgcagtggggcaccttcctgtccttgtagagt

SEQ ID NO: 193288 - DNA, 642 bp, Zea Mays
tgcctcgtaggtggagagtgccaccaccttctgcttctgggattaccatgaaattgcgcacaatctgaggaagaagatgatgctcgtcgtgctgcgccgcccgtcgacatctcctgccatctcgctgtcgctgtaccctgtcagctccagtcgtccgcctcctctcttcggatacacaagcccatgctcgatcgtccctgcaatatagcggagaaggcgcttgatcgcggcgaggtggtcctcctgcggatcctccatgaaccggctcagatagccgatggcatagccgatgttcgaccgcgtgtgcgctagatagagcaaaccgtcaacgatgctgcggtagctcgtcgcgttcacccttggtgtcggtctgtcctttgacagcttgagcttctcctccattggggacaagcacgacttgcagccgcccatcccgctgcgctctagcagtttcacgacgtaggcactctgccgcagggtgatggagcgcgccgtctgctccacctcgataccaaggtagtagctgagcaatcctagatcactcatcttgaacaacgccgtcatctccctcttgaattcgtcgatgagccgctgcctggagccggtgatgatcaaatcatcgacatacacgccaacaatcag

SEQ ID NO: 193289 - DNA, 283 bp, Zea Mays
cgtcaccccactaaaaccctctccttttccaccccttaccaggccttgcacggtactcctcccgactacacccacctccgtgtctttggctgtcgatgttatcccaatctctctgccaccacgcctcataaacttgctccccggtcttctctctgtgtgtttcttggatactccaacaaccacaaaggttaccgttgccttgaccttgccaccaaccgcatcataatctctcgacatgtcaccttcgacgagtcctctttccctctcgctactgcggcccccg

SEQ ID NO: 193290 - DNA, 468 bp, Zea Mays
ctcagagagtgaatcgcttcctcgtgttgtagacaactaacgagacaatcattgttttgtacgtcaccattttcagaaactacactagaagatgagctcacgtcaattagatccacatcgttagaagactcttcgtctgtggaccagtcaacaccattcatttgtctgccagattgtgaaccagagtttggaccattggtggctgacactgtgggagcagaatcacttgacagtggcaagtccacacaggttggttcttcaccactgcttgcattatccaatcccaatgacgagtctattgcaggacctacttctggaggttcggcatacaatactttgtcaccttccttgttgtgacggttcaattcaaccagttcaacactggcactgggatcacattcagttttcatttgaagaccttctttgttttccatgtccgtgtcattagaagcaccaatgaagttgtct

SEQ ID NO: 193291 - DNA, 274 bp, Zea Mays
aggattagatcatacttaaaatgaatcggtatgctattatggccgtcagattggagatctatggcccccattaaagtacccgatcaacccatccggtccatccgagactaatctaacggcacagaaccgatcaccaaagggtatgcatcctatctgatctggatcgcttgttcgggaatcaacggctcacatccacgcagcgaaggaataccacgaaactaatcctagccgtatgaatcccaatcgacggaccaggagccatcgcctacctccg

SEQ ID NO: 193292 - DNA, 296 bp, Zea Mays
tgtatctattgcatagtgttcagtatacactagggttgactagccccttggggtagtgtggacgcgtccgggtttgtatgtggggatgtgcattcatgttgatagcgacttcctggtgcaccctcggtttgctgcatgtatgtcctgttgtggccttggggtgacacgtcttgtccttgctgacgtgggtcgggagtacttgactaggggcacatggatctggttcggtggtgcaccggaccactttggtgcgctcgtagacaacccaaatctacaagtttctatggaaggatgca

SEQ ID NO: 193293 - DNA, 321 bp, Zea Mays
tctaaagttctaaccttcactctgatttgcataaatttttgtgtcaggtcatgcataatggaccgctttatcctcggccagacaattttggtggtcataacatggcacctccgcattcagtaccaaatccatataatcttggtccattgcctattggaacttcagtgaggccaccgtcaagtatgtttgctcctccagattttccaagcgtatcttcagctgatgcataccgtcaacaccatgaagtcactgccatggtaaggagttgattgcatggacatattttgttgcaaaactaagacagttcaaaatttctccaga

SEQ ID NO: 193294 - DNA, 734 bp, Zea Mays
tgtaaaggttccaagatatagtggggtgtctgccttcaattttttaaacatggcatctgtcgttcgtagttcttggcttctctagtaatagcacaagtttatgcttgcaggtgccaattaagagcatcatgcgtaactctaagccgccgagcaaactggccatgcttatggcgttgctgtcgctgtcgtttctgttttgttatggagtcgagaaggtccattgctcgacggttcacgagaacaaccaagattttcactctctgctcgatttcaagaagggcatcaccaacgatccaaatggagccatgagcaattggaccaacaacactcatttctgccggtggaacggtgtgaagtgtaccttgacaccgccatatcgtgtcatggagctcaacctcactggcaacgacttggctggccgaatctccacctctgttggaaacctgacctaccttagtttgctagcactaccaaataatagatttagcggcccaatacctccccttaacaaactccaaaacctaagttacctttccctggacaacaactttttgaatggtgtgattcctgagtcacttacaaactgttccaacttagacacactaggtctctctaaaaataacctcacaggtgttattcctcctagcataggttctcttaccaagctaaaagttattttcctttataaaaataatttgtccggggtcatcccatcaagcctaggtaacatcacc

SEQ ID NO: 193295 - DNA, 481 bp, Zea Mays
agcttgttgagttcttacagttgcagaaatggctaacctcttgcaaacacctttccttgtacccttcctactttccatggccctaataaaccttgtgtgcttcacggccactgtcagcagtgaggacgatcagttcgtctactcgtgcttctccggcaaaaacctcaccctcgacggagcagccgccgttacagcagacggcgtccttgagctgaccaatcgcacggtgcacgtcaaaggccatgccttctacccagctccatggcgattccgcaggtcccctggtgagacggtgcagtctttctcggtcacctttgtgttcggcatggtccccatctactccgacaaatgcaccgacggcatggctttcctgatctccccgaccaaggatttctccggtgcgcaggagtcgcagtacctgggcctcctcaacaaaacaagcgacggcaaagcaagcaaccacatatttgcagtcgagctt

SEQ ID NO: 193296 - DNA, 451 bp, Zea Mays
cgacaatggtgcaattcaatgtgaacatggaaaggttccagcatctaaagtcacatcaatgaagcggttatcatctgtagcttggcagaaattacattcgaaagtatggaactttcctagatcttggtttgcacttcctataattttgacttgcattaaagttaaatggttttctgtacgtccaaagcatcacattagttgttgcactcatattgtaatgattgtgtcataatattgacgacttttctttggttgtcattgcaataattcaagtatggagggggacctatattgaacagtgacgatttttgcatggagtgtcttaaagacggggcaaaaagtgcagtatctgctgatgtttaccgtgaacgaagagcatcattgaaaacactcgcagaagcagcacttgctggtaattgtccagatggtccttcttactttatctcaaaga

SEQ ID NO: 193297 - DNA, 357 bp, Zea Mays
gctgaaccggcttaggctaagtgggctgttagcaaggcccttttagcagtagaataaagaggctaaaggccttttaggttaatctgtaataggaggttatttataccttaattgcaataaaaatgagaacaggctgtgatcaacatattgttgatcagccgccgccctgccctaatttctcctcccctgttgtcttctcccaggccgtgagaaccacggcctcctctcatcgccaaccgctcaaggagcggccacctaccacacacagctacaacctaaggagaagagggcataccaatgagtatctgaggcaacactatagacaaaaggggagaatgcaagggtaggctgaatcca

SEQ ID NO: 193298 - DNA, 750 bp, Zea Mays
taaagtggttgctgctactgtttcatgcaaaaacatgcacataccctgttggaagttgtaagttccatggttgtgttcaggtgcaggagcttttgaagcattttcagaactgccaaagtaaagattgttcatacaggagctgcagtaagtcaaaaatgatgtctcaccattataaaacttgtgtcgatgaacaatgtcctgtgtgcagcgttgtaaggaagtttttgcgccaatcaactgaacaggcatctaagcaaaaagctctcgagtctagaaaacttgctcaacaaaatgtgcctcagagaatcatgaacgggatagaaggtgatagaatggatgttgacccaatgtcagttgaagcatttgatgatcaaccattcgttccaaaacgcttgaagacgcatcctccatcacccagtggcctagagaatgatatctctgtagtctccaattatcatgtaaactcaggctttgcattgcaggaaacacagcctgagcagcttgaccacaataacaggacatcatatctgaaacgagaggtagatgcaaaggctgacatgcgagctcctcaaaagcccataaaaattagttatggtattgatggaaatgtgactgcatcaaggcataatgtgattcctggtgttcccagtgagattaattctcatatcaagcaagaaaacttgttggttgacaaagagacaagtgaaaccgcccttgaggttaagaatgaaacaaatgatccaactgatg

SEQ ID NO: 193299 - DNA, 314 bp, Zea Mays
tgcactctgctcgcctgaaacagttgagcatcacatctccaaagtcttgtttgaggatgtcgtctagcaacgatgtttatattagagctccaattctagtgtatccttgtgcatgcaccgtgaaggtgtcatatgatgatgttgtgcccagcttttctctttacgatatgtaatcagtttatattgattggtggttcttcagggtttgccagatttacttgtgtacgagacatactgacaggaaaatggggaaattttctggactatggaagcttcttatgcaaaggtgttgattctgatgcccaacattgatc

SEQ ID NO: 193300 - DNA, 345 bp, Zea Mays
cgttagtggtgatgtagaggtctgcctctcgaaatagttgttctgaggtggtcggcgctttctgtggtatggctcggacgaaggccgagtcattggatccccggtagaaatcttcaatcaccgctgcctcggtgactttggggatgcggtttctcatggtctgaaacctcttgaggtatgaccgaagtgtttcatcgccctggcgcctgatggatttgaggtcccatggttgtgtcggtttgtcagagagggactggaagttggcgatgaaccaccgactgaagtcgctccaatcatcgatgtagtgtcgtggcagatgtcgtagccactgcagtgcatcttgcc

SEQ ID NO: 193301 - DNA, 288 bp, Zea Mays
agaaaataaaatctggttcttctgttttgtagtttcactttcgttcgtactgatctggcgacaaggaattccatagtactcacaacaacaacaacatgttccaagatcatttgtctgttggtgtgcatccttttgttcattagttgtttcatttctagtgacgtttcgacttgccaacacttgctggtatgaggaggtgagttgcgatacattctgtattacaagagcttgtgcatgtaacaacttttctaagtcaactatcgagggtgatgttgtggttgatgtcat

SEQ ID NO: 193302 - DNA, 475 bp, Zea Mays
ggaaaccgtcaggtcaatttctgaggtacgtggttctgttgataatgctctagagaagctgattgaggttgaacttgagagaacatctcttgctgaattggaacagaactactctgtgaaagttggcagaattactgagcagcaaatagctcttgaagaagctgctgcaagaggtagagaacatctatcatgggaagaagcagaggagctagcttcacaggaggaaatctgtagggctcaattggaacaattacatgaaacatggagacagaaagatatgcgtattttgtcacttatgaaagtagaagacaatatcatgaattcgctgctttcttctaaacagtatgtttcatctttggtggaccatgatcaggaaagtgagtttcattatggacaaattaaggccctcctttcaatcttcgcaaagccctttgctgacctggaatcgctggaccatatgctatcatcatctggc

SEQ ID NO: 193303 - DNA, 434 bp, Zea Mays
tacataacaggctacaactttgttcaatcagaatcacaatctataagtaactcatcttcggagccatccgtcgcgcaatcctcaacgacaacctcgttccacttgttgcattgtcccgcatcacacttgtcagcagttctcttgtaataattggcttctgttcatctgcagcttgggagaatagctcatcctcagcctcatcagacttctgcttgtaataagccgcctctacctcttcggcggcctgagacataaactcgtcctcctcctcttgagcacgtaatcctgcctcagttagtgcgatgagctcactcaaccttgatgtgtcgtcctcctcttccccatgtaatcctgcctctgcgagagcgataagctcactcaatctagatgtgtcgtcgtcctcctcctccatcagctccaccgttgccattttt

SEQ ID NO: 193304 - DNA, 304 bp, Zea Mays
gtttgttatagcaactgttttcaaagtgttacagggatccaaaaacaaataaacaaaactgttttaggttgatttcaaactgacccaaatctgaacttttgcaaattacttcaaattctcccacaccatttggagagctccaaatatgaaaattgttcacttttccaagctccacaactttgacgtatggacttttagcaaaacatagctagatcttaaaatccacttttgggctagtttagagttgaaattggacttgatctgcttcaagtgtttcatcaatttattgcatcctactaaaaac

SEQ ID NO: 193305 - DNA, 281 bp, Zea Mays
atctatttaaatcatcaaaggagtcatccaattgggtgtccatagtctcattctcaccattgaaaagattgtcaaaatacctctgccacctctgtttaatgtcttgtcctttcaccaagagttgatccatctcatccttaatgcatttaacttggttgaggttcctcgtcttcctttcccgaatcctagctatcttatagacatccttctccccttcctttgtacttagtcttcggtaaagatcatcatagacttgagcctttgcctcactcacagctcgt

SEQ ID NO: 193306 - DNA, 272 bp, Zea Mays
attgttgttaccctgttttgctaggggtgtgccacccatattgttgttaccctgttttgctagggttgtgccacccatatagttcttaccctgttttgttaggggtggcacccatatggaaatataggcttatattctgaagatagttatatgcttgtctcacctggctattctaatcacttcatttatttgtttgcccactaaaagtttggactagttgagctttagaggttgttgtgcatcgcaggtcccttgtttactagctttctctc

SEQ ID NO: 193307 - DNA, 349 bp, Zea Mays
cttcacacaggttcttcctcaagtgttccttctataaactgaaatattttgcagctccccatcgttgattcgaaaagcttatttgaacaacttgcttctataataggagcgtttgtggaaaaatacagttgcagcacagatgtcccattggatttcttctagaggtcgagcggtatttgaagaagcaagcattcagagaaagcagaaatctgttgctagagttctagccaatggtattatgaacttttggtgttcagtccatactttacgagctagtggtggtattcctaaaccaataaaaatcgagcaaccgaatgagctagaggaaaataagcttggtgggttcaaa

SEQ ID NO: 193308 - DNA, 303 bp, Zea Mays
gggaacatactgttgccaatatcctgatcttcaaaatcttctggctgatgagcgtcatctgggggcgaggagtgcaatccccccaaatccgtgtcctcaggattgaccatggttgcgctgatattgatcttgtatgataaacaacccttgtcattgctctgcaaccctctctcaataatgtgtagcgtcatctgccgttgtaactttttaaaatcaaaacaccatgctcgcactgtaaaggatgagagactctttttcatcagggtatcagaatggatctcaacaatatgacatgagtcgtta

SEQ ID NO: 193309 - DNA, 281 bp, Zea Mays
ttaatcggtagtgtctcgagtgcatgccacaacatggttgtatgcgagacaaggtaacataaggtgtgctcgacacgaatgttcggtcgacataagtaggaaattgtgtttgcttaattagagaggtggtgacatgccgaagtagtcatcgctttctcaatatttataagtcgaatcgaatcgatgcgtattttgtgttcattaaattatgcttcgcatataatgtgtgattgtgctcacggattcgagtagacacttcaagcaagtcaagtaggtttgtg

SEQ ID NO: 193310 - DNA, 958 bp, Zea Mays
cgattcctgtatcctcttcaaaatctgtgacctccagatagaatagacgcgggcaccgatgaccacgaacgtattgttcgtcacagttgtaacacagtccccgtttgcggcgctcagccatctcgccgggggtgagcttcttaaatggacgttgtgcccccatgctggttggtgctgctactgttacagtggactgttgtgctggaataggaaatgacggccgctggggaggcctcgacggcttgctggtagttgatgtctggtggacgtcgagtgcctgagcccttcgttcacatgctcttgccaaacttaatgcatgattgagatcccgaggagccataagttcgacatcgatcttgatacgctctggaagacctgtcgtgaagagttgtaccttctgttccagagtgagtggcgtggtgtgggccagtaaatcccagaacctctcctgataatcctccactgttgtccggaatggaagccttgccaattccccgagtgggttgctgcgaagcggtggtccaaatcagagttggcatagctgcttgaaacgcccccatgacaggggtggttcatcacgcaggagctggctgtaccaagtccgtgcagcaccgagcatgtgatatgaagccaaccagactttctcctcttccaacgtgcgctgtccctcgaagaattgttcacatcgagtcaaccagtgcattggatatggtgtgcaaactccaagcggtggaagcgaggaacagagcagatggtggtggagagaaagcactgggtatggtgtgcggtagtgggggaaaggatggaatgggagacggtgaatgtggtaacggcagcaggtgcagtggaagtgaggtggtggtgtgtgctggtgcggatatggtggtgggtggtggtggaaggtggccatcggccgctgtcatagccggtggcagtccaccatatccaggcatgccgt

SEQ ID NO: 193311 - DNA, 451 bp, Zea Mays
gttttctgccaacttctaccgagttacactggttagactgttggagaaactcccatcatcagtctgtacaaaaacgggtacgctatggactagcatatctaccacgttcaaccaagataacatataagtacaaaatcattgatcgctaccatttgacttgtagcgcagcagaagaagagcacaacgatgtagtgtaagtagtcgtatgttctcgtatgccaggagtagcaacacgttcactgcttattacgttcgttgtcgatcaacatcgcaacaaaaacaacaatattaccattcgtgcggggacgagaagtcgcgacgccggtgtgctaggctgctagcacaatacacacaacgaaaagaagggcaggtgtggtgaactctagggacagaggcgatggtggctatgatgtgtctcctagcacttcagccccttcgtgtgtgtgtatat

SEQ ID NO: 193312 - DNA, 458 bp, Zea Mays
ataggtgcggaaacaatctcattcatgcttgcatgatgttctcctgagttttcaaaggcaaacaattttgattccagcaagtgaagcaataacaagatcttttgagcggtttctgctgcttgctggaggatctagtgctgtaaatacaggtgtatcagaggaaggccccaagggggctaaggaggtcctgtatattttgaatgctttgatatgctgccttccccttatggcctccaaaccttccaatactatcttgaaatattttaaaccactattagatttgcatcaaccaattttgataaggagtcttctggacattctgcatgctgtttgtgagagtccaaccgtacagctcaaatctgatgtgttattggaccttctgtgctcgttgggtctgtcagtgtcttcagaaaggaaatcaggagatgaaatggcttcaattgcacgacttctacatg

SEQ ID NO: 193313 - DNA, 330 bp, Zea Mays
aacgacacacgcaagagtagaggggttttgtgggttgtctaacctcactcacacaactaggaacaaacatagagaaagcgcaatagcatccaactaacctaagcactttgcaaagcatatacactaatcatcgagtgattatctaagaacttgtgtgattgggagcaatggatatgtgtttctacacctttgatatgttccttgggctccaacaacttcaaatgaacgactaaggggtttacatagaggccccattcaattgtaaacgtaggcagaaagctgctgatttctgtctatgggcgcaccggaccggtctagtgcatcacgaga

SEQ ID NO: 193314 - DNA, 320 bp, Zea Mays
aattaatcgcaacatgtggtcagctggaaagctgagatttctggttggtgcaaaactttactgctgttgcacatctggcatctgtggccttggctgtcatttatgattgctgttccactgcctgcgctttgatcattctgtgtgtattgtgcgctctggtcactttctttatgttgtgctcacggccgtctcgtcaatcgcccggagatgacatgtcagcagtccacgtcaacagtggctctatctaatgtaagggccgtggctgagatttcctgtgtttttgtgtcgaggcatctgtcactgatttcggccatccacag

SEQ ID NO: 193315 - DNA, 313 bp, Zea Mays
caaaaactgacaagtcccagaagtagacttgcgctccaaaaggcaacccgcaaaatcagcatcagaataaccgcacaaggacaaaacgaacaatgaggagtaccacaaaccaaactcgggagtgaaacgtaggtacctcctaatccgtttcacagcctttctgtgagatgtgcgtggggaagcctggaaacaagcgcacaaacacaccacgaagtgtatatccggcctcgtcgcagtcaaatacaggagagagccaatcatgcttctgtactccttctggtccatgggttggccatcctcatcagtgtcaagt

SEQ ID NO: 193316 - DNA, 278 bp, Zea Mays
tggggtgctaagtgatcttagtagccgacataagagaagagaagcgcacagatgaagccggggtggctttaaattttgtgaccacacatccggacagagtacaccggctcaccatcgtctggccccttaacaatctcgcagacatccccagtctaaaggtcatttgctgtcaccaaatgtttccagccctcggtgaagcccacaaataacgggcagtggtggtggacgacaggccataatctcttcttggggtccttcagcattataacatcacagcc

SEQ ID NO: 193317 - DNA, 725 bp, Zea Mays
gatttatctataacagattttgatcagacccttgaggatgtcattcctgaggatatgctgtcagagccgactgatggtgatatgatggatatttgatctgacattccagatgtgggattagaggtatcccgagcagcatctcgcgcgtcatcgaccttggaaggcggtctttagtgtcaagaggttggtcaagattgcccgactcccatggaggtgactgaggatccttcagccttagaggtggttgttgaagaaaacccagtccttaagggtggtgctggcggttacctagccccagagggtgttgccggtgatgatccggctcaggtgggtaacacaagctataacccagcccccgagggtgttgccggtagcgattcggctccgatgggcagtgtgagctgcaacccagcccccgagggtgcccgagcgagctctccttcccatacctctatggatgtccacgtcgagttgtctccaccacattctgatggagtgatagtgatgcatacttctttagcttcaagtgagggagtcgccttagaggtcggcgcaccggatgacaagattttgatatctgctggaggagctgaatcaacccccgacgatgcttttcaaattgtctcagttgatcttccttcattgagttataacacaacttatcatgacttgggattgccttcattcttttctaatcttcaggtaaatcagcttttttcattctg

SEQ ID NO: 193318 - DNA, 296 bp, Zea Mays
caagattaggaaacaaacgatttgactcttttgtcagtgcttctattcccaaacagttagggggttgtggtgagggcgatgagatcacaacattatgctgtaggctactgcttgctcgtgctatgtgccttaggcattagccgcctgcaggctactgcttgctcgcctgctgctggccttctggctcctgcaattctctgctcgtcagcttgtagttttctagttttcaacccaaggcgtcagcctacagctcgccatttcagcagttcttgacttcctaattctatatatcatgg

SEQ ID NO: 193319 - DNA, 461 bp, Zea Mays
gaggagcaggatcctccaatgtaaatcaagggaatgatcggtcacctgctgaagctttgactgcatcagagaagcaagttgcataccatacttgtgttgctctacggcaatactttagagctcatctccttcagcttgttgactccattcggccaagcaaaagcatccgcagtattgctcggaacacttctagtgcacgagctggctacaaaccttttgacattagcaatgaagctatggatgctgtctttcgtcagatccagcgggacagaaagttaggccttgctcttgtgagagttcgttggcctgtgttagacaaattttttgcctcaaatggtcacgtgactatgctggagttgtgtaaggtaaaacacactgcacacatgcattgttgggttatgtgaggcttgttaataacctgatttgattcacagtttcaggcacatggtgatcgctatttg

SEQ ID NO: 193320 - DNA, 655 bp, Zea Mays
ctctctttgggattgctaggatcagatttggagcaaggtcagccacactctttccttgcaaccaattgtctgtccagaatttggaagaaataacattcccaatatttacagttacggccatttggaagaatgcttgggcttgcttaggattattaacaagaagaccaaaccatagttttgagggatcagttttcataaaccataaccagcggatacacaatgcccaactcatcctttccagataatgtactccaagactgccaaacatgtaaggtctttgcaccttggcccatgagactaaacaatttcctcccttggcctgttcttgccctttccaaaggaatccccttctccttttatgaacagccttaaagaaccatttgggcagattcaagacgagcatttggtgaatgggtgttgctgacattacagatttgacaacaaccaacctgccaaccttgcttaggaggggggctttccatcctggcaatttattggcaatcttgtcaatcagaggtgttagaacagcctttgaaggtttatgaatagaaaggggaatacccaaatatgaacaaggtaagcttccaatggaacaagaaagaattgccgatgttctcccaatatcttcatcggagcattggattggtatggctga

SEQ ID NO: 193321 - DNA, 560 bp, Zea Mays
gagagagggagcgattaggataatgatctttcttaattccaactcaggtctggttacaggaatatataggcccctaggcctaatcgcatggagctaactgctccctaattctaggcatgcaaacaacccttaaatctaggcatgcaaacaacccttaattctaggcatgcaaacaaacttatctagtttctgggcgtgctcacgctcgcacatcccgggcgccgttgcctgacgtagggccggccgtacatgacagtagaatgcatgaaactggggctggtgtaactgcataatttaactactgtccgtttgcattgttgccacatttgtttaatatttaatgtgtcatgtatgtgtcagattgtgttattagttggtttgtttaataattagttaactcatcaacaatagggtcactgtggttggtggagtccgaacataattgtgctatgtggttgggtcaaggtctgactttgagttgaaggggacctgtatgccatataccgtaggcctagagcctgttttagattagattgaattttattgttgaattattcctg

SEQ ID NO: 193322 - DNA, 719 bp, Zea Mays
cacccattgggatcagcgtcagtaaattcaggcacgggcacttcctcagcagcaggagcagaaggaccagcatcccgatccaagctagacactcgccgaagacgtctcttcttctttttctgcccatcagcaggagaaacgggctgattggatcggcaagggcgcttcgagcgaacattgtcaggcctctgaatatccaaggctttaccagtttccgggagaggcgccaccaccaatgttccagcaggagcggcatcagaagaatcctcggctaacatatcaagcatgacacttatctctgcatcactgggatccaaaggcacctcaaagtgaacctaccgttcatcatcaggaatttcttcaagcgaagcaaccaaagcactaacttcttcggtagagggtcgcactctaaggcccaaaccgccatcactagcaggaggatttgacacgaaatgagtaaagaccttggaaggaggcaggttccaggccgagtatgcaacaggggcaccaacatttgataccttgcctctgagtatcatttcgagccggctcaccaagcccacagcaggaattcttctgttggtgacccgggtggagtcagctaggccacggtacagataggccgggtatgccctgtccttcaatggttgaatattcttgaagacaaagtcagcaaccacagcctctgcagtcagacccctctccttcaacaatccaac

SEQ ID NO: 193323 - DNA, 309 bp, Zea Mays
cttctccaggctatcctctatcacactgccagcactagcaggaagaagctcctccatgcttccaccatgcataaccatagcagctgcctcactcagtacatcagacctgctggtctcatctaccacctcaccctccttctcagccgattcatctaagacttctccaccttgagcaataacccttcatgcgtatgagattcaaattgcatctccccatcccatgccacttttagacccactttactgaacaacggatcacccaacttccatggagcattaggaacaacaccctgctcgcaattgttgtgc

SEQ ID NO: 193324 - DNA, 377 bp, Zea Mays
gcctaggaaccttcgtgatgatgtatgaccattttcttattttagcaagacacattgcagatgcagccttgttttgccctgcattctatgcctttcttaagattatgcaccctagctctctacatagtgtttttcagtcctcaacatgtacttagcagtggtaacacatcatgatccaaatgtttcttcataatggagtagttctgcatttttagcatgtctactgggatgatgaaatgaggaaaaattgtctaaactgtctactatattgtataccaagatcctcaccttttaaatggcttgtaggtctgtcaccaagagctggagttcaattctgcattttgctgcattttagatggcctgtaactcctaattca

SEQ ID NO: 193325 - DNA, 449 bp, Zea Mays
gtaagtcacagattaactcttcaaagaattatacaacaaagaaattagcgctcagaaatgggatctttgcatttttagtcttgctcattttttattattcatgtatgactcatggttttctagagaaaaatattggaccgttacaataatgctaatatggtgttaatctaggattgctcattttgagtattcttgtacgactcatggttttctagagaaaagatcttggactgtagcactacctccacttgtgagatctggacttctgtagttatatgccatagcaacactgaaagtgacaatgtttgaatggtatagttcttttccttggtcggtgatatatattcacttgatggtatagctctgccaaaagcacaacagctcgtgcttgatccacaaaaaataggatgctcatgtgattgtattttgattttttagttttatttttg

SEQ ID NO: 193326 - DNA, 644 bp, Zea Mays
acagttcgttgcgcctagtggtgtgtgggaggtgtcgctggagtgccatacgggcggggttccggcgaagatccaccattgtgagccttgcgtcgtcggtcagagtgacggggggaagaagatgggttcggcatcgtagatcatgtaaccgacggtcgtgattaggccagggcatgacttttcgcgaaatcagatgtggaccatggatctggaatctgacgggtgaaagtcgactatgggtgttgttaaatccgatccacagtttcttcatctaacggctatggggagaatagggtgtcacgaaccgtggactgtggatacttgatccaacggacgtagtgcaatgatgggacctgggaggcccgatctaatccacaccgttggtgtgtgatcctgcggccgagaatcatccaaaccctttcactagttcgttttacacatgaaccctccgggaatttaggaactaacccgccatccagtttgactgttctccgagtctaagaaattttgcgcagaaccccctgcacttctctgtaatagtgcgcccagtccaaggagttaagaaatcagataaatagatttagaaagtgatttttagtgttaaaataattccagaaacttatttagttcatagaaaatccatc

SEQ ID NO: 193327 - DNA, 474 bp, Zea Mays
gctgctgattgtcagggttgacagcaagttcagttgcgaggtgctgtagatcatagtatctacggtgaagaacctcatggaaatcatcatctgatagcaattctctggcatgatctgatcctgattgtaagatgatccttttattgctttcaatggcactccatgtatgctcgtaatcatacatgctttctgcaggcaatgacaaaagaatttgcttcattctcttcagaggcagctgctgtgtttggaggaacctatgcggtatgagatattttacacagtctggcctgataatgctttcctcgaacatcaaacttgaagacaggtttagtatggttgggattattaacttgtggaatatcctcaccatgtcagtaacacttttgctggagcatgcaagcacatcgacggatgactctaatgtacttcccagcaccactctgacatggatactattgaccactgtataaataa

SEQ ID NO: 193328 - DNA, 563 bp, Zea Mays
atggtgacgaaaatatcgaattttatggtcgattgaaagaaataattgagttgcgttataactcagatatgtccaaatgtcgcacagtggttctatttcgttgtgactggtttgacacttatagcaagaaggttagaatgaaagatgatggatattttagaagcatcaaccatggtagttgttggtacaaggatgatccttttattctatcaacacaagcaacaaaagtattttacttggatgacactaaacactgtgaaagctggagaattgttcaaaagtttacacataggcacttatggaatgtcactgaaaatgaaaatgaggaaacacccatgggcttgggactatcataccaagatgaaacatgtgcaggttttcatgtacaagtgaatgaaggcaatttgaatgatgaagtactggatagtgaagattgtcaccacatcgatacaagtttagttgacgagtttcgtaaaccaaggcaagacaatgtgcaaggagacgggacaagcgatgatgaagatgaaactatatggcaatatgttagtgatgatgaaagtcca

SEQ ID NO: 193329 - DNA, 636 bp, Zea Mays
caacgacgaattccggtcgtcacaacagttgattcctccccaatcggccacgggtgcatcaccaacaatcccacgaagcacccagacacgtcatgaacccctaagctccaggcgcgcacggggccggtgttagcagatgcaccctgaccacgtctctctcttccgcacaagcgttggcttctggctttggcgaccggaaacgagagggaggagaaggagggaccgatagataaatcccaaggaagagggcggcgtgggccgcaacaaccctgccggacacgcgtgattttttgaaccacaacaacattcgcgcggagcagggagaagctctgccaagcggggcccacatgactgtgagccacacgacacatgtgtgtaggtttagcagcatgcagagaaaagcgactgacaaatggtccgtctagtcagcaacaaggcaagggttgcgctaggttgatgacatgcggatgcggctgaggtgtggggctcgggtgtcagtgcgcgcctcaaagtgggtatggcccgacgaggtagaattccggcccaagtgcagagaagagtttttttttcttttctattttcttttcaaattccatattcaagtattcatacttaaatttaaactcctgttttaaa

SEQ ID NO: 193330 - DNA, 359 bp, Zea Mays
ggggcaatctcttcatgtccctccgctcaggatgcatattcgaaggtggtctcgtcaggctttcgctgctggaggtgggcagccgcttgtgcccgttggcgttgaactacgtggaattcctgcgcatctctgggggattgaggctgctgaggctgttcttggtgctttctgtttgattcatggttttttgcctggcttggtcgaggaggaagacatgtctgttctcagactgaaagtttggtgccggtcacctgagctgctgccggcggtggtggatctccttgctgaagagccgatggtctgtggagaggatgggagctgggttcctagcacgttggtgttccctgtttctgtggtgg

SEQ ID NO: 193331 - DNA, 471 bp, Zea Mays
gctttctcgaatggttgatgctaggattactctatcaaatttatcagatgaatatgttgaaaatccacagaaggatttccccgttggaatgcttgtacacggaaggtgagatcttttaattttcaaatggtcatgtaaattacagatatgttctctcgcgaaactaacaaaactctgcaggatcctgtctacagacccatcatcagggagagttgaggcatcacttaggaagaccactggttcaaaattggaaaagctggatgatattagttatagtgacttgcatgttggggatatcgttgatggccaagttaagcgggtggaatcctttggattattcgttacaattcggagaagtgaattggtacgttatcactacacagccttttgaaatcattgtatattctgttttgtaaatattcttttgcaggttggtctgtgccatgtatcagaactttctgatgaacctgt

SEQ ID NO: 193332 - DNA, 1587 bp, Zea Mays
gacgaactgggtgtcccaaaatggggatccctgtgggcagtcgtggctgggggtcacctgctcgggttccagagtgacagcaatgtgagctagctgaaaccttcagacgggttggttgttttcgcgtaacggcgaccgatccttctcggctgattttccttttttcttgtcctgaataacgctcgacagaaagttatctgggatgaggcttaacggcaccttgggctacaacatgaaccagctcactgcactagttcagctgtaagtgagacctcacatgctcttaaatctcgatgctcggatgtttgcagacaacatgccattgttcggttttaatttaagtttggtgttctgcagggatatgagcaataataatcttggaggcagtgacattccttataatcttcctccgaatctccagagcttgtgagtcatgtagtcatgtttgtatgtgtacctaatcattcgtatttacgttttaaaaaatatttttgaggtcttacttacctggtatgcagaaatcttgcagtaaataacttcactgggactgtaccttactccatctcccagatggttgcacttagggatttgtaagttgcctatttgggattacctttctttgagcactttgacaagatttggacaaattatatctttcactctccttgctgtagaaatcttgatcataatcagctctcgaacatcaacgatatgtttagtcagctcacaaatttaacaacgttgtgagtgatttccctttctttctaactgcttatgcatgttactgttttcatcgctccacaaaccacagtggtaaacatgaactaactgttcaatttccagggatctatcatacaacacattctctggtgatatcccacatagctttaactccttgacaagtttgaaaacactgtgagtactccacatgttctgtttaacttcgtcaattggaaaacacatcacatggttacttacaaatccaatctcccctcttgccagttaccttcagaacaacaaatttaacggcacaatagatgttctcactgatcttcctcttactgacttgtaagttgacatgcttaccacctactccagctacaagtttaagttcttaatgcaacgtttaacaatccttgcagaaatgtcgaaaacaaccaactcaccggttggatacccgataaactaaagggaatcaataatctccagtaagtacctttactgcaaccattgcagtgattattatttaagtatatgggatggatacaacaatctactcatcattttacaggacaagtggaaactcgtttaacaatggccctgctccaccacctccaccatcaccattatcacctccatcgacaaatacccctcctccctctcggcagcatgctgttccaagtagcgctggtaaaaataccccatctgaaaatggtggaaaacactcgaaacttggtggtggtgcagtagcaggaatcataatatgtttgctggttgttagcgcaatagttgcattccttgtgatcaaaaggaaatcatggaggttatcacagggacaagaccctgaacaaaatgaacctctcagcc

SEQ ID NO: 193333 - DNA, 394 bp, Zea Mays
gcctgttgtagcccctaggaaaaattccaccatactacatcaaatgttgtcagtagatctttgagggatgttgttaggtttcataatcgtggaagaattagttcacatcttcatggatgataattcctttctagctgcatctgaatattacgctttggagaacacctaacagctggtgctgtggtaagtggtaacctcttaccaaaagggggtttgtgttatggtgttttcttgtcgctcttaatattagcatatgtttttgccatggggtaatgattgtgctgatagatttactctgttattcttgggggcacaatagtttttttagttcacttaaactgttagtctcttttacttaatttttaaacgtagtttgacaactttcttgctatgt

SEQ ID NO: 193334 - DNA, 299 bp, Zea Mays
gtcaggaaatttttcagcgcctctagggcttcctatgcctctatggtccactgaaactggtccactgaaactggtccaccttttgagcaatttgtagaacggcatgcctttctcgcctagtcttgatatgaaccttcttagggctaccatgcatctagaagcctctgtacctttttctgtgatcatggcgcttccattctcatgttggcctcgatcttttctgggttggcttcaattcctcggtggctgacgatgaattcgagtaacttccctgctggtattccgaagacacatttctc

SEQ ID NO: 193335 - DNA, 663 bp, Zea Mays
attacatttctatattgctgtgcagtaattagacataatgcatggtggcagggcttccctgtatgttgccattccttacatgaacattctctaagatgagccttcaccacatatctagaaaaacaatcaccattgtctctcacctatgcaacatagtcatcgccttttatgacctccaagtgtccaagtcctctagttcttgcattgagttgtgctatgatagaaggtaaaatctttccctccaacctccttcctatccgcctcctcttgtataatagttgcatgatcattatcctaattttgtcagccaggtcacaaacagggaggtccttgtagtcctttatccagttattgaacacctcagcaatgttatttgttacatagtcgcatttgatagtagggttgaatgcacttcggtaccacaacaaggaatggaacctatctaaccaagcagcaatatcaggattgcttctgacatttgcaatgtacatgtcatatacttctgccttgtacgccctggcagcagggtacatgtattctgatccagcatattgcttgacataattgttcattaggtgccgaaaacactctcttttctcagcttctggaaaaacatccttcattgcatttgttagccctttgcaagcatcagaacacaatgct

SEQ ID NO: 193336 - DNA, 347 bp, Zea Mays
ccatttttctcacatgaaacgtgtggtgcaggatctgattcgtggctgtgcagtctgccaacgcaacaagcccgaccatcagcacccagccggcttgctgttgtccctgccggtgccgcaaggggtatggacggacatcaccatggatttcctcgaagcgctgcctcgcgtccgcggcaagaccgtcatcttcacggtgatagactgcttcagcaagtatgcacatttcgttcccctggcgcacccatacacgaccgagtctgtggcgcaggcattcttcaccgacatcgtccgtctccacggcattccccagtcgatcgtctctgaccgggactcggtgttcacct

SEQ ID NO: 193337 - DNA, 416 bp, Zea Mays
gggggcgggccgttgtgcgtcattgctattggcatgaacattgaaatctcgatgtgatacgagagtgccactccattcctcctgcgacgttgccctatggctcttcaattagaggctccattgatcctgggatgcgctttggctgtgtacaccagacttgaactccaaagatttcttgttgatcatttgtccctggcttcattgattcaatgaaacaaatatcgtctaggagtagagttgctgtcgcgactccccaaacatgagacgtgcccccctgatttcaacatccatagcttgtcggagtacattgcttgaggccttgacgaaacacgatcatcgcaccaagtgagcacgaaaggaattcatgatcatcgattgacctccattaaacactttgtttgcagtttcctcatctg

SEQ ID NO: 193338 - DNA, 885 bp, Zea Mays
tatacaatctgcagataggcagattttaactcaatcaggtgtgggtgacacaacatccagagccagtaaaagtgaggcaagaaaatcatacagtcaggagcagcataatttgaaatggaagcgtagccaggagataaagcctgttaaccttcttccaccacttgatacggatgttaagaaagtggctgattctccaaccaaagaacgaatatcttcctggaaaccttttccatctcctgttacgaaggtcccaaaagaatctactcctactaaattggaatcacctaataagaaaacagatgcacactctacagttagtagccatgttgaattaagcagtccagttgaatctttaccacaacaacagcttcctgtcaagcatcaacataaaacttcatggggccactggtctgaccagccaaatatttctgaagagggttcaataatgtgtcgcatatgtgaagagtatgttccaacacagtatgtagaagaccattcaagggtctgtgcaattgctgacaggtgcgataaaaaaggtgttagtgttgatgaacgcttaatcagagttgcggaaatgctagaaaagatggtagaatcttattcaccgaaagacctgccaaatgctgcagtcagcccagatgttgcaaaagtttcaagttcaagcatcaatgaagaatctgatggtccctctcctaaactctctgattggtctagaagaggatctgctgatatgcttgactatctccaagagactgataacactatttcattggatgacattaaaaatcttccttcaatgacatgtaagactcgttttggaccaaaatctgatcatggaatggccacatcatccgctggaagtatgactcctaggtctccattaac

SEQ ID NO: 193339 - DNA, 480 bp, Zea Mays
ggggcttgttgaagatcgcatcgtactgctagagtagacggtccagcaacaactgctggtggttgtcggtgacagagcggaacaacagtggtgtgttgttgtgaagggatcccacacccgcccataggatgcaacaatcacctccctagaatgaatgcagagggcctcaaaatccataggatgggtcccaaggtttggaggtagtcgataccgagtgcaaggtcgaacccacccaagtcgatgccaaagcagttgatggtgaactccagaccaacacacatggctacgttgcgtgcgacgccctcataaggaacgtggttaccattggccaccatgacccgcatgttggtatggttcgttgtcgctagtccgatgcggtgcatgactccggtattgatgttgttggtcgagccgttcatgccgatgaccatggatgtaggtgtggaggtgcatggtgtccgtggtgtgtatgttgacgat

SEQ ID NO: 193340 - DNA, 354 bp, Zea Mays
ctcatgtatagtctcctattgctctctgtaccgagcaattggaatttggccgaagtccatcaccggaacgcgcccttgccttgtaaaacgccgctgtgaccccccctcaccgtcgacccgctcctcggttcttgttctgcccaaaccaaagtgtgtacgtaggccctggtgaacccgtgaacctttacccagcctcaatttggccattcccgtcgctgtttgatcggaacatgttcatcctcttgtccatccgctcggtcaccgtgaactgattgattcagtgtcccctaggtgaaattgatggaggggaaatggtcggggtggatctaattgtgtccctgtagcttgggagct

SEQ ID NO: 193341 - DNA, 996 bp, Zea Mays
cttttctaccaaatatgctggccaaactcatgaggaagaatacacattccatagtctcacagatgctattcagttgcaggtaatttaactattttttgaatactttttatcaatttcgctaaagttcttgtctcactcagtttatgtttatacagattgtttcttctttaagagtcacccctgaatatgtcttattagttttccatcctgaagcacaggtgaacttttgctcacttcttgtatatcctgttcatggtctgaagtaatttaagccccctttgctatttatgctcttatacatttgagccacaggaaaacctgattgtaagtggtggaacatgctccctagatgcttctaccaatgacacacatgtggtgcaaatagttacacatccaggaaaagccttatgttctcaattgattcttgcggctaaaggtttaggcgaagctataatcataatccaggatgttggcctttctccaagagcaactactcattctttggtacatcactttggcgcttatcttcctaattctcctgatactttttatacttgttacaattcaatcaagtgacttctgttgcatactatgtttatactgttcaaatggttgccaacatcccttgagtcatatctttgtatctgtgctttgtctagcattaatcttgggataatgataacttttgaattttgatatatatctgtcatccctaatttacagtcaacttctatcagactacccctcataataaagatgtgctaatcttccttttgaggccactgatatcaaactgacagtagtttttgtggtgctgttttcttatctgtttgcaggttagagttgcaaatgttgactggattaagataacagcagaagagcaaatcagtcttatggtacgaggatctccatttttattatgtttttttgtattttttgctgattttttttcatttataggaaggaagcacaaaagatttccaaatattagctggc

SEQ ID NO: 193342 - DNA, 454 bp, Zea Mays
tttaaatatttttcttaagagcttcgtgcatttgatttacttcaacattcatgtcatggtagtttccgaactggttgtggtgaataattttaccactgttttagacacacagcgaaccaagataaaatgtgtgcaaaactatacatgtacacaatagacaaacgatgtgtgtgaaaatatgtttagtttgttaataccactcataatccaataaccaaactgattagtaaaattgtgactgaaataggatataaatgtacttcaacatgtggtacgataaaactctttaacaggggtactatttggtactgttttctggttattggaaaagaggtggtctgcaaacagacaaaacgtttgtcttatacaacagtagtcccataccattcctaaaattgagttagtttgttcagtttactaaaccctaaataaaaatagaatagttcccttacgc

SEQ ID NO: 193343 - DNA, 359 bp, Zea Mays
gctgtgtttaacaaatttttagaatatggtgtcttggttgattaattagctgtatgtgtgagacataatgttcaacttgtatacaagtatgttggcaccttgctaaatttttgtgcctcgagaaaaatatatagttccaggcaagacggctttggttgtgcataagcaggctttggaggattaatataggcatataactaaagatggatgatggatcaacatgataaaatagataaaccagataacagcaagttgcctggaactggaacgccagctcaaatttgccacccactctgttcggttgattatatgctcatgtttttggctatttaaagaatagaaataagttgaattttcag

SEQ ID NO: 193344 - DNA, 473 bp, Zea Mays
atgaaggcttcactaatcactacgacatcacgtccatgtcatccgttggattagttacattatgaattacagccacgattaagcttcctgcgttcgctcaaccacccggtttcccactaacctgtggccccttggtcggactcaactccaatcccaagcagcaggatatactcgacgaggtgagattttcctaggctcaacctcctaagccgtaacaaccaagcgataaattctcaccacggactcgtcctggcgctatataaaatctggctgcaaccctttccgatgaagctaccccgaaggacgagctagatggtggctggaaccaagcgtcatcgttgagggattgtcgtcggggcgagctatcgtgctgatatcgcagttagatttctcgggtgcttcgctgggccaagaaaagggggaaagtcatgctcgagcagcttcctagactcattggcggattgacgctctcc

SEQ ID NO: 193345 - DNA, 304 bp, Zea Mays
cctggtttttgtcagcagcaccgcacaacatgttaaagtcaccgatcagtagccatggacctgagatgctggggaggaggtctgagagttcagcaaggaaggttggggagtcctggtggttggatggggcataaacgttggtgatggtgaggggcgcgtcggcaaggtgtgagctgaaggtggtggtgagggagaaagagcgagagatgctggacgtgagttcaagcacagcgctgtcccaggcggtcacggcgccccctggaaccgacagcgttgaggcagagaaagctgggtagatttttag

SEQ ID NO: 193346 - DNA, 313 bp, Zea Mays
cttgaccttgcgctgactagattggtggtcgtgcaggccagcctcctacttgcccttcttgtgggcaactgacgatgaagtggttgggggtctctgtagttgaagcatccatccttcgacccgccacgtcgacggttctagcagttcttgtgaaaccacatgaactgactggccataagcgccagctcctcatctccgagactctatacctactcttgtgtgatagatagcaaagaagatagggcaaacaaagtaggtgaggggttagaagcagaaccacctctagagaccagggctatggtgggtgcaccag

SEQ ID NO: 193347 - DNA, 295 bp, Zea Mays
gtaaccccaaaatcttctttcgatagcccaagttcagctctcaaattgttggcaacaacagcttcatcgatgcccaatgcagttcctcccccagcattcggtaaacccaaaattaggtgcaccgtatcctttgttattttcagctcctttccagggccagctcgaattgtcatgtcattggggtcgagcttttccatcagccaagctaagtgtgatctgctgccgagtgcatccagtctcatatcaagaatactagaaaatcccctacgtgcaattgcttgttgttgtctgtcat

SEQ ID NO: 193348 - DNA, 385 bp, Zea Mays
gcctgggcccacgagtcatcctctttgggcgccggttcctgggtgcagagaagtcgaaccaccgctcgcgccagtaccatgcctcctcggggccaccgcagaagacagagaaggtgaattttcaaaaccaatgcagcggtatcaaggcaccccgcgcgtggcccagcaaggccatcaagtgcggagatcacgggtcagtcagccgcggggacaggcgtggcagttggcgtgaccgaagacggactggcagtaattacgtcagcaagcgcacagaagcagcgtgccaatcaccaatcaagctttggccccacctgcaggctcgtttcctcccctaaggcgggcccaggggccactgtcgttacccaaaatcaggggtaccccttac

SEQ ID NO: 193349 - DNA, 559 bp, Zea Mays
cctgatccagaccttaaaatctcatgtcgtcaaatatcacctttcattcctcatgattacaaggatagcagtcttccaacatctgtatttgtgtatactgtaagtggctaatggaattccgtttatgctgagttgaaaattcttgcaggtctacattttgtactttcctgtttcctattccctagcaagacattttgaaaagcctactatgcatatttatgcaagatatttcctttaaaatggagttcacatatggccattcaattaggtgctgaaatatcatctttgtgtaaactctatttcaatattttgtaactagtggaatatgaaatcattgtcgccttacatgaaatttggaaatgccaattgttgacgaataataaatgaatagttcaatgacggtgtatctgccaattgagttttgctatttattgtagatgattttgatattaaaatacccttttgctccaataagttacctaacagcctttctatttggtggttcattgcagctagtaaacactgggagagatcgtgcaaaagtaagcctgttaatgac

SEQ ID NO: 193350 - DNA, 471 bp, Zea Mays
tccaaacacaagtggatggtctggggtaaatgagggtgtgacgagcttagttgctcgctcatttggtttcttctcctaccaacgatgcctagggggaaagcaagagttgagcatgaagatgtgatgggggagaagcaaagctggggggagtacatgtaaagaagattttttgcgttgtatttttatatgctgctgcagtgcacccaaggttaagagaggtataaagagcatttgttcttcaatcatgacgaatcctgtgtcttatttttagcttagaaaagaaggcgcgctcggactgggagtccgtgcggcgtcgggggacctccccgtcagctgagtgagtgtagtcgggcggcgtcgggtgccaatgcgtcgtcatacacgctacctggattcctggttccgatcgttttgtgtgatggtccagcatctgctcgtgccaagatgctgccctcgatacacttcctgagt

SEQ ID NO: 193351 - DNA, 378 bp, Zea Mays
gaactgtccaaacataggttaaggttgtaaggcaacttttttccaccaaacagttgctaaaaagttggaatataaagaattcaaaacaatatatcaccttttaaacctcaaatgacgtttctatgatattgtgggcattgtattcacactagagggtattagagtacaactagtggatgaagacgttattgggctagctaatgaccttttgtgatacctggtttccaccatactgttgctaaaaagttggaatataaagaattcaaaacaatagatcaccttttaaacctcaaatgacgtttctatgatattgtgggcattgtattcacactagagggtattagagtataactagtggatgaagacgttattgggcta

SEQ ID NO: 193352 - DNA, 383 bp, Zea Mays
aggcctggagtgctgacagcacttatgggtgtcagtggagctggaaagactactcttatggatgttttggctggaagaaagactggggggtatattgaaggagacatcagaattgcaggctatcccaagaaccaagcaacattcgcaaggatttctggatactgcgagcaaaatgatatacattctcctcaggtcacagtaagggagtctttgatatactctgcctttttgcgccttcctggaaaaattggagatcaagaaataactgatgacataaagatggtaagtcatgttttttttcctgttgctgatattgttcttgtcatggggcggcaacccagggcatggaggtccataaggataggctcagggttaggattagt

SEQ ID NO: 193353 - DNA, 310 bp, Zea Mays
catgtgagcgtggaggcataggaggcggaggcggagaaggaaccccaaaatcatcatcatcatcaactgctgcatcctgagcttcgaactgacgaagagcagcatcctcggcctgagagtcaaaaactggagcagaagctggcacaggagcctcaggcgcaggacggtaggtcccaaagacaaggcgtgaggcctcaagtgtgccctgaaactggggaggccgaatcaattgcgcaaaaatgtggcacaagtagtgagcataaggaactggcgtcgagcacgcagaccatccaatacagtgtcctcaatc

SEQ ID NO: 193354 - DNA, 748 bp, Zea Mays
gtcgtccaacaatgattaatagaggctagccaaatgaagaagccttgttaaacagaggttggattgctgatattagaggggcattaactgtgggagctttgactgactatcttcacctttggaactctttatctggtatggtgttgcaacctaatactaaggataaacatattttttcagttgcccctgatatccaatattctgctagttcgtatacaatggcctctttttggatctgtttcctttgaacattatcaaaggatctagaagtcttgggcacccccaaatgtaagttcttttttgttgttggtggctcataatagatgctggactgctgacaggctggaaaaaagaggcttgaatcaccctcctagatgccccatttgtgattaagagccagagaccaaccatttgctggtatcttgtgttttctcaagggtgtgctggtataacattctaagaaagtttgggtcctcttcatgatgacactcacttcctattgtggtggaaaagaatttcagccattgtgtctggcttgacaaggattggactctctgctcattcttggggcatggttgatttggaagcataggaacggagcgatatttgatggtgtgtcaccaagcctcaccatgctcttggattttgtcaatgagaagagggagaaatggcaagctgctggagcaaagggtctctcctttttggttgctcccagtaccagtggtggagggctgcagtctcggtgttt

SEQ ID NO: 193355 - DNA, 543 bp, Zea Mays
gatctctcgtgccagtaactttctttccctccgaccgccagcacatcttcgtgaaattgagcactgccgcccctagaggctataaattgctgcctccgtccgctccactaggtaattgcgcacccagtgaagcaacccgtgcctcagatcgtccaccagagcgccccaatttaagatttcccccaaattggtcaagaacaccgcgtgtgtgagctcgccgcggtcagcccgtcacatgtccgatcacgtcctccttgttcttgttttagcatccctgtgtgcttgtggtgcttctcgacccggtcaattaaactaagactccatatatcgccgggaacgcgttcggttgtccgtgacacccgctgttaccgtggccagaacaaattgggtagccgttcgtgaaattgagtgaggggaaacgctcattagatcttgaattcggtctcggctaaggtagggcgccagtatttgagtgaattggccggtacactagctcgtcggagctctacgcgacaccgcccgccgtcagggactcgattcgtg

SEQ ID NO: 193356 - DNA, 273 bp, Zea Mays
tcgccgggattcgtgccacaggcgtatggattttgttcaccgggtaaatatctcgtcgcggatgtgcctgagctactgtggcctcgctgtcccctgcccctttccaccggcgacgtggcctcatggccgtcaccggagttgccgtgctttgctgcggctgtgccatgctccaagtcttccaccatgccatccctagctgtaatagctcaccggtaaccgccgtagctcctcaaccggtggtcaccggaggaagcgccacggtgaaagccaccc

SEQ ID NO: 193357 - DNA, 324 bp, Zea Mays
cttcatatataaataacttattaaaattcatctgactccagaatattcaccaaaattaaaacattttgtgaagactacccgaaattgttttggtgcaggttcgtttatatctcattaaggcaaatttaggaaccagatatatatgcattctcatgttaaaaataaagagacaagaatggaaaatattaatctttcctatctccacgccacctctttctctttctctggaagccgctcaactccagttccttccatcaccgttctcttttcctttatctcccagccaccgctcccacctggttctcattgcccagcaccaggaac

SEQ ID NO: 193358 - DNA, 739 bp, Zea Mays
accaagttgtgttgtgtgtagttgtgtacgtgccctattgcattgcagctctatttgcgttgtctatctatactatatatatatcctccacgatccacacgtctcagcggcagcgctcagaggtcacagcacacagacagcattcattctttcttctccgtcagttccctccactgccttcttggagctgaagctctgcacccttctcctctccccacaattggatcacgccctatctgtccgtccatccggcctcaagattccacggcgctgcgcaaggtgaggctgtccctgctcttttttctcaccttctgttgtcaccttccacaaatctgttatggccgtcgtcggtccagtccacccatggtggaaagtgatagcaaatcccgcagagaatatgaatatggcgccatttctcctcttgccgctacgtacgtacgtaacatccaagattcattagattttgcatgcgctactagtacactactagatacagtacttcgacgtcatctgatggaagcatgagcaagaacttgatgcaagcgttgctcttctttctcctgctgctaattaaattcttcccttctcatactagcgtgcctcacgcaatgaatgccatgcaggaccttccatccattgccatgtcgtcaaaccagaacgagagcggcggcggcggcggcgcgggaccgccgctgccgacggcgttcaagagcccgtccacggacggcaagagcggcag

SEQ ID NO: 193359 - DNA, 388 bp, Zea Mays
attcatttggtggcgaagagctaagtccgacacctgttcctcttttaggagaggaaattttggaatgcaccaaagatctaaaaacagtttatggcaaggacccatctcgtaagcccacaaaatatcagaaacgtaaggacggtgaaccattagtctttttgaaaaggagaactatttggttcatccttccatattggaaggatttgatggtccgatataattttgatgccatgcacatagagaagaatgtatgtgacaacataattaacactttattggacattgctggaaaatctaaggatgatttgaatgctcacttggatcttcaagatttaggaattagaagtgatcttcatccagttgaactagaacataaccaattttattt

SEQ ID NO: 193360 - DNA, 315 bp, Zea Mays
tttccttattttccattgctcggtcttgtcaattatatgggaattcattgaggatgcatgcattcttatgttgttatgttaaatcgtttaaatgggtcattcttggtacaggggttggagacaagcacaaccaaagaagggtggaagtactttgaagatattaccgatcaaaaaaaggattttgtctaggtagatgaccaagatggcagtcatactgagttagcatttagcaagaaacgaattgctgataggaaatagtggcttacaaatttctaggttaactctcactttctccgtcccaaattataaggcatt

SEQ ID NO: 193361 - DNA, 291 bp, Zea Mays
aatacaacggctccccaggctctagggctaccagtattggtagggacaccaggtgctgcttcaactcttggaaagcttgctctgcctcttcggtccaagagaatcgaccggacttccgcaacagcttgaagaagggcagcgccctctcagccagcctcgaaatgaagcggctaagggcggctaatgaccccgtaagcttctagacgtctttgatgcgggccggaggcctcatcgcttcaatcgccttgatcttctccgggtttgcttcaatgccccggtacaaaaccagga

SEQ ID NO: 193362 - DNA, 1004 bp, Zea Mays
cactcatgagctctttttcttgtgcatcagtcaattggcgcttaatcttaatattgtgctcggacggaacatggagaaccttttgacaaaatctctttgtgacagtaatcttcttatttatgcctgtcatccaagtcagtgaggtcctactttgatttatggacaatgtggagtagaactgtttgatcggctcttcataccagttctgttttatagccatcaattcatgaagactaatgtcacgacttgctttctcaacatatggcatcttcggtaaacgtttgatatttttccaatcgatccatttgttgtcagcacatttcttcttgctataaatactgttgtatagatccatatgctcgttggaccaaaaacgcccatcgcttgcagatctgacctattcatataaatttacaaatttaaccaatttcaaagacttcttccgttttgaatttttgtagctcacaggcgtcctggctacagcctcagctagttggggcaaaccatctagaaggtcaatttgaggacggtcttcttcctctagtgtagccgcttcttcatctgtgagttgagcacctggagcaaactgactgagacgggccctctcccttgatggactgggcgagagccgagcaagatgcacttgctctgcatgtgcaggctctacaaccttttcatctgttagttgttcacctggagcaaaagaaggactgagcgagagctgatcaagacgcacctgccatgtcttctctacagccctttctgactgcacaggcacctgctctgcatgtgcaggctctacaacctgtgccttgtctggtattgtggcacggttgtcacctgtgagttgtgcatctggagcacactggcattcaatgttccatcgtgaaacattgtctgtcacctgtgagttttgcataagtctaaactgatccattgttctagcaagaaaatcatcatcgcgagttttaaggaaacattcacgatccttcgcgtctttgaca

SEQ ID NO: 193363 - DNA, 878 bp, Zea Mays
aaactcatcacatcctccatattgccatcaaaggaaaacaatggtgtcccatctttctctctgccgtgaggtcctctcaaggcaaccatcatgtttgatttccaccgaatggcatccggcaatacagtgctgtcccttataaactttactatttgctcttccaagtcccagcgtttactcttgttaaaacctatcaacaatgatgttattgtaaccaaatcaacactgaagccttgctgctccatctccttcaccaactctacagcctctgcaacttggtccccaatcccctccttgcagaactccctcaccatgatactataagcaattccatccaacagttgccctttcctccttagctcgtaaaaaagccgacatgctgcttctgccctcccattattaaacagcccatctatcacagtgttgtgtgtgcttgctgagcattggattccatcagccaccattgtctcaaaaaaactgcatgcctcatcaagcttcttcactttaaacagcccatcaagaagtgaattgtacaccaccacgtcactcaccccaatgatgccccgcatctcatgaaacacacgcagtgcatcatccatccgaaaactcttgcagcacccattcatgactgctcgataagtgaatacatctggctcgattccagaagatttcatttcatcatagatcaccaaagcatcaggtacccgcccaccaacaacaagggcccggatgactgaattataggtgcatatgtccggctcaactggaggagtggcggccttcattgctgcgaaaagccccagcgacatgtccagctgcctccacttgccaaacgcgtggatgcaaatgttgtataaccttacattcgaaggaaggcc

SEQ ID NO: 193364 - DNA, 531 bp, Zea Mays
gtgctcgtactcttttgatatcttcttttgtaccttcgcacttttggagtgaagctgtttccactgccgtgtatctcattaatagacaaccttcatctaaactttctggtaaatcaccaggtgaagttctttttgggacttctccacgatatgatcatcttcgtgtgtttggatgtatatgctatgtcttgttaccaccacgtgagcggactaaattgactgctcaatctatagagtatgtatttcttggatacagtcctgaacacaaaggctatcattgttatgatccatctactcgtcatattcggatttctagatatgtgagtttcaatgaaaattgccccttctttcacaaccagtctactcactccacctattatcccacagaatctacttctttcatgtgtcttccttccattcctgcatctcaaccatcatcttctacatccacatctgatgttctcattcccataacaccaccttccacctccacgtcatccacctcttactcttccaaaccacctatcatcc

SEQ ID NO: 193365 - DNA, 452 bp, Zea Mays
cgaaaacatctattcaagtcataaacacaagcatacactcatttgtgaagcacaatttaaggaacgcctaacgtgtaaagactcgacttataattatagaggaagtgatgactacttacggcatgtcatcacctctctacataagccaaaacaatttctactatcgaccaagtgttctaagtattaaacacactgtcactttccacgcgcaaatcaacctcaacttaacattagtgacaccgatggatttttactaaacgcatcaggcacacaaccttgtctcgcatacaaccatgttgtggcgtgtactcgagacacttcaaccaatgtggcgcgaccactaatatatgaactccgatactcatgttttaataattcatcctctacgcaactagcattttctaactactcgtcacatcaataaatatactccctatataatcatgaattcc

SEQ ID NO: 193366 - DNA, 1021 bp, Zea Mays
tatttgaagtagaagcgactgcagtggaatcgatatttcagaggctatactcattcatttttgacatggagcctggttatcctgcaaatgacatggataggcctgttcctgttgcgatatttattgttaattttgataaggtgaaaccctgtaccattcgtccattcctcttgattgtattgtccgtttcctgtttgtactttgtagtctgatgcatgcatgtaaattttagattatagagagtgcagtccttcatggctatataggagtcaagatgcaatatcttgttccatcgtactgtacttttataggaaacagtacttgagaagttgagaaaattattgaaatatgcataataacaactgtttttagatatttgtaataaaaaatccaccagaggggaaatgtatccttaataagaggtgaagctctcaccttttacagattaaagtctatagtaatttcctctattgaaactaatttgttctcaaaggacatttagatagtcctttcagctgccttactttttctaacatctgggaaatatctagagctgaatcttaaaagattttgattcgagctccacaatcctgactttactaaggacaaaactagtgctcttcatcttcgtcttcctttcttgttcttttgagatttgtaactaacatggtacatattttccttggcaggttagaatggatcctcgaaacaaagaagttaatctcgatagtttaatgtatggtacaattggtggactaacagaacaagaactaaaaaaacaagaagcagaatacatttaccgttaccgttacaatggtggtggggcaactcaagtttggctaagttctggaaggtgatacttgttctactctgctactgttttgttacaagttagtgaagctcatgtgcttctaagccacattttacttcttcaccactagaagtaaattaactctgttgtggctgcatggtcattacaggagtgattcaaagagtaatctcgggaaaacaaacaagcatt

SEQ ID NO: 193367 - DNA, 412 bp, Zea Mays
ctgaaactcagcttttcagtgtaacagggtcgactttgagtgtgaattagacctggatccagtgactttttgtgacaacaccatgtagcaaagttgtagctggtatgtagcactacaattttgatgcagagacttggacctgttgtcacatgaaattgggagaaaatgaagctccaatgggctttgtcaggcatctgaactgaacttcgccatggtacagtagcctgataggattagaacgccagcgcggcttgctcaccgccggcgacctctctgcgtgaagattcgcgctgccgccgtcctgattcgagcaccgggcttgaagatagcgactgggtggaaaaatatcatctccccgtgcgctggacgccactccggctcgtcgccgtgcctcccccttgcttaccgcccg

SEQ ID NO: 193368 - DNA, 640 bp, Zea Mays
tgcagattgtgttggttctagtctgcactcgcggagctggtgcggattctggtgaaagcaaaggatcgtttctgcaagactctgaagctggagaaaaggatgtctaccttagccactcctgcatccacgacgagatactacatcaacggcgacgagctgggaggaaggagtactctgtcatgccacaagtgtaccatgagtctcgggaggatgcggagcgtgtaagaggacgacacttgttgggcatgtcatcttggcgtgctccgcacgagaatgccaggaagccaatacgaatatacctcaattatgatgccgtcgggcattcgcccgaccgtgattgtaaaaatgttggcgacatcgtgaaggtcagtttgtcacattagcttttctcattgcaccaccagctattttatctgtgtagtagaattgaaactgttgtttctatttggtagcttggcgaacctcctgtatcatcagcaccaggaacacctatatgcgatcctcatggtgatccaccactggtgggagactgctggtacaattgcacccttgaggacatagctgggaaagacaagaggcaacgtctccgtaaggtgcagttctcatgcttttgttgtctctctgaaggttcagttcaaat

SEQ ID NO: 193369 - DNA, 468 bp, Zea Mays
gaaagaattctgcaggaaaatcgactgcatttgttgttcttgggtacacaatgaaagatgggaaggcatattttcccccacatgacagtatctatacatattgcagttgaaatggaaataattgaaatacaaggtatgtgcaggtgcagtctattatattggagttaagagagcgctagcttgcagtcacactcgatgaagtcctatagggctagattttaaaagtaagatccagtacaaggttacttcaattgcaattagcgattagccaaaactttcatcttcggtctcactaggcctcactaggcctttcatcttcaaaagaatttataaagatattatttttcagtctatctctacatccctctctccatcttgttatgcaattatgagttcattagatgtcattgatctaaattaatttctatccattatgaacttatttttaatgaaccatgctccttcttc

SEQ ID NO: 193370 - DNA, 1116 bp, Zea Mays
gatggtcaaaagagtgtaagctctgatatagatgatgaatcacaacttggtgacagtaaggttagtgtgttcaagtagatccttcttacttctttttataacaggatgaaacaaatatcccagcctctacactacaaattgagatgtatatgaacgatatatacttttgactgtagcagtttctgtatgcttcattgaagctgatcttttttcgtgttagcaggacttgacatgtaaggcagatcccgctcctaagaacgatgataaagctgttgaaatgcaagacggttttaatgcacaattatctgatgtttctgaggatcttgaaggcaaagactcgggtggcgaagatgaggataccttggataatcagatgggtgatactggtgatgcaagtgaagtggttggcaagaaatcatgggataaggatgaagatgatgatcctaagacatctattgagaaatatgagtcaggctcatcagccaagggaacacaacaggatgatagggaaatgagagctaaggatgatggttctattgaggaggaagatccgatggaaatggattctgaggaaggaaagaataataatcttgaacatgatcctagtacccatgatgaaaccgaactgaatactgatgaagtcatggacaaagctgatgcatatgatgaccggactggacctgaactccctgaaccagagaatgattccattgatgttgacatggtggaacaagaacaaacggatgaaataaatgctgacaatgaagatataggtacagaagaagctgaacaagcagatcagaggttagatgcttcagatgatatggaggaaggagatatggcacaacatagcgatggtgtggtagataatgaaggggagcatgttgaagatgcaaatacagacgcaggtgagatggattcacaccaattggacaaggcggattcacttatgcctctgtcacaaggcctacagcctgacaatatgcaaataaattctaatggagaatctgaagcgaacttggccaacagcagtgatatgcatggcgctgttgctccttcagtaaatttttcaggaaatgaagtgcccaatatggaaatatctatgcccaatactgg

SEQ ID NO: 193371 - DNA, 333 bp, Zea Mays
agattaccgccaatgcatgaagactgggcgattatcaatattcaccctttgcctgagcacgaggtcttgttccctgcggtcagtgatgtggtcagagagtaccttgtggagcatcgtagggtcggtgttagagccatccagcgctctcacttggggcaggtgatagtgcagtttcgtagtgttttggagcgtgacaatttggttctgcttggcccccagcaatatttagatgctactttcaccgcggttcgtcataatgacgcctggaatcatcgggccctttttttcaaccacgagtgttggcttatgcttctggggtttccgctggattac

SEQ ID NO: 193372 - DNA, 552 bp, Zea Mays
gctcatagcactgagtacagtatggtagatgataggaaattagaaccagacttcacatcctttaaaaatagcacagtacataaacaatatgatgatgaagcggccagtactaaaacttattgtttgggctgttgctgatatttaaaaatctctggtctcactaactttttaattatgttgacaaacacatcttaattccattgcaggtaaagcgatgtgcagaaatgtcacgcaaactaaaatttttcagtgatcagatcaacagggcaggtttaagatcttctgttcgacctgcacttgaaccggatattgatctggaggagctagaggtgcattactcatatttcttgtaacagaaagttttttatggcttctatttcaaaggttgcttttttaagtgaaaacaaatatcctgcttgagtgagaatgaaaactttcttttgtttattctctaggcaagattgggtgaacatgagcatgaactgcttgagatgaatacaaatagtgacaagctaaaacagacatacaatgagcttcttgaattcaagctgg

SEQ ID NO: 193373 - DNA, 339 bp, Zea Mays
acttgacctataaatatagagaaagcgatgactactctggcatgtcaccacctctctatttaagccaagacaatttctaccatcgactaagagtcataagcattaaataccttactactttacatgcacaaataaacttcaacttaacacaactgacaccgatggaatttttactaaactcatcatacgcataaccctatctcgcatacaaccatattatggcgtgcactcgagacacttcaatcaatgtggcgcgaccactaatataaatgaactccgacactcatgtcttaacgatacatcctccccgcaaacaagcatttgctaaactactcatca

SEQ ID NO: 193374 - DNA, 453 bp, Zea Mays
aaaacatgattatggatgtccaatcaaattcaaatattgaaatacatgtattttcttgaaactccagatatgggattggcattctggtaactgcaagtctacattgtctgggcattcagatttggtgttatgtctggattacttcagtcagggtgatcagctatacttgatcactggttcacgagacaaaactgccaaggtatgccattttcactgaagaatagactaacctatattattgtctaaacatacacagaatatttgttgaatcgtgaatttagttttcctcctttaatttgtcgactagatatgggattgcaagacgaggagttgtgttcggacattggaagggcatacagatgttgttaatgttgcatgttgccatccagatcttctaatactaattacaggttcattgaacgggtcagttcgtctgtgggatttgaatcgctc

SEQ ID NO: 193375 - DNA, 546 bp, Zea Mays
aatttctttaaatcgcttatttcatgcagaaaaattgatagcaaaggttgtccaaaatctttgtcgcgagctggatgctttcagtaaaagaaaatgggatcttatctttgtgaatcagtttcttcgtgatgttagagaagctaaaaaacgtgggagaaaagaaaagagacataaggaagcccaagctgtactagctgcagctgcagctgctattgcatcctcctcacggaactcaactgtgagaaaagatgcaaaggagaatgcaccagaggtttgtttgtgttttgattggccagttgtgaaattagtacatgtagatgttaggaatcttaccttttcttgtgtgtagagttctccaaaacttgttgctggatcttcaagggttggtcaacggactttttcattgccacggattaatgattcatcaaagtcatccaacaacaaagtatcatcagataacaaatttggaagttttcatatgccaatttcttcaaaagaaaatgggctatactgtgatgtatgcatgcgaactgaaactctgttgaa

SEQ ID NO: 193376 - DNA, 405 bp, Zea Mays
aaccacatcacaaccactgtcagccaccctcacttccataaattatcatttccaattttggcaacatggcttaattactgtgaacattttttcgtcgccatcatatcctagagtcggacaaagtgtggctcatctcattccacctcattgggggcgcacaacattggttctacttgctggaacgcgatgaacccggtatttcctggccacgtttcaagatcctctgccaacagcatttcaggccactcgctcgacacaacccactaggagagttggcgtgattgccattgcgctctttagtgtccgactaccaagattggttcctgacacttctctgccttactgattagctagcaccacacctgcaagtgcagctctttgtagcaggattaccaaaacaaccat

SEQ ID NO: 193377 - DNA, 983 bp, Zea Mays
caactgattagttccaaaggtaggaagttaatctccagctaggtaacgactcgttgatagctatgaaagctaggttttacggcttacagaaccttgttaagcaaggaatcagcaccacagctgggaatgtttgtgccattttcacttccagctcctgctctaatcaagtcaattccaacttggactatcacacagatagtgctaggcgagtaatcactaatcaggtaagttgacttgccataggggcacacacttgcctgttcagccatccctttttgttcgtggttttgcctaggatggtcacttggatgacaacaagcacagttcctgttggaactgcgacttctgaggtggtatgtgtggtgaggggaaggttgaggctcaggaccacggagcttgggcaccgtggctgctagctggaagagtcgaagggacgaggaactgttcacgcagcgtggcgaacagtagttgtaggtgaatagtgacgcgaatgaacagtaccttggatgaaccgtatgcggcgagcagtatatgggtttggggaagcacgggcaagatacttgcctgcttactctttcattgatcgaagggtacattagcaaccgtccttatctaatattttatctaaccaatttcttatccttctaaacaaactctgtttgttctcatacatccaaacaaactctatccccagactacgactggcgcttatccatctaaacaactagctgattttattagggctgttgtgctgccggtcataacagttccactcacattaggatgagtaaattgggcagcaagagaagggaggacctggtttctatgattgagcacaggtgatgctaagccctttttgtatggtttatgctgcgatgctttatgactatgtttttttgtttcatactgcacttgggtggctatgatggttcaactttccattaacgagcttctgcactctactaccatcttatgagctggac

SEQ ID NO: 193378 - DNA, 345 bp, Zea Mays
ggaggggcggtggaggcaaagggaggaggggaggcggagagaggtcgcgtcggcggtggaggcagggggcgagcaacgcggcagagaggaacgtgcggggggaggttagggattgggtggtcgcgcggtggagaaggatggagtgtgggagacgcagacacacgatgcgatatggacggtccggatccatggacggcagaacggcagaaccagggagacagactactcttgctctcttaatatgttgtacagatttgaatatacgcacaagtcatcgtggcagtaatataaatttttactccattgacgagaaacgcgacagcgcactaacacgcagcatttcag

SEQ ID NO: 193379 - DNA, 425 bp, Zea Mays
gctccagcgtttttgaggccaaatggcatggaggtatagcagaaggctccgaacggggtgatgaatgttgttttttcctcgtcttcttttgccaggctgatatgatgatacccggagtagcaatccaagaaagacaacatagaacatccggcgatcgagtctaccacctggtctattctaggaagtccgaaggcatccttcggacagtgcttgttgagatccgtatagtcgacgcacatacgccaatccactttattcttttttagtacaagaacaggatttgctaaccactcagggtgtaacacttctctaatgaatccggccgcgaccaagcgagtcaactctgcacggatggcttctctcttgtcgggcgtgaagcgacgtaatttttgtcggattggcctcgcctgggggtagaccttcaa

SEQ ID NO: 193380 - DNA, 395 bp, Zea Mays
cgtaatgggcaatggccatgaaccggtacagggctggcctaccaatgatggcattaaccgggaggttaacctccgcaacgtcgaactggacgttctcagtgcgaaagttttcctcggtcccgaatgtaacctggagtgcgatgctcccaaggggatacaccggctgagggcctactctggagaatgggtgtgagggccctagtcgggaccctgggatctggagctgcttgaacgcagcgtggctaatgacattgagcccagcctcaccatctatcagcacatgatgcagcttcatgttggcgatgacaggggcggtgatgagtggtagtataccagcccctgccatgttttcggggcagtcggatgccccgaaggagatagtggtgttccgccac

SEQ ID NO: 193381 - DNA, 590 bp, Zea Mays
cagtggcggctgtggacctgtctcccacgcaaacgtgcccaggccggccggtcagggacaggatgtccgaatcgaacctttcgccacctgctaccccggtgtttggttagtttgtgacgtatcaaatgtttagagttaattccctctatgccactaaaaattatactgatactttacgtgtcattagaaattatagcattccttctataccatcaattttagattttgttcccctctgtgccattgcggtcaacaagccggccaacgccgtttgttggtgtagctggacccacatggcatgcactaaccccctcccatcatctctgtttgctatgaccggtaaggcccaaggcgaagcagcatgggccgcgcccagcgcccccgtcgacctagagcgtgcgtggtggtcttgtcgacctcaactcgacgtcggggaccaggccaaagcgagccaaggttgttcgacggcgacggggaccaagccgaggcagaccggtacttccacgttcgttcgcaagcccgctcgtcaaacaccttgcttgcatgaaatggtgaaccatcacatcatcgacgccatccatccatctgtg

SEQ ID NO: 193382 - DNA, 381 bp, Zea Mays
ggaaaatggcaaaaaggggaaacgccttacctgggccatggagctctgatcggctcacccaaccggcttgggccagaaaccacatggccgcgcatacacgtgacgagctgccggaattgtttaatgtattcatgggtggtgaggtcatgccgatgtcaggggtgacctcatctccatgggcacctgtaccactgacggttgggccccggtaatgctctgtatgcctaaccgtatggacctaggagcagctgcgtgctgctcaaccgccaccgtaaccaccggccgggcatgtaggatctacacaaagactgccttgggttcctggatatatagaggggaaaaccctctctcatactcctctaacccaaccgcgcaaaacac

SEQ ID NO: 193383 - DNA, 329 bp, Zea Mays
gccattacacacattgatagcagtccaacacccctgcaggcgaaactctagcatatgttgagacgaccgaaactctgagaacatcggggatggaagtcccttggcagcgattgacgactaaatagtggacaatgttgttctggggtgcaagggcgtagatgggggtgacactaaccaccgaggccttcgagcggccagggagaggagggagtggcggctgtgaccagggagagggctggcgaccagttagaggaggctttctgatacaattgtcactaacctgtggatgacaagatgattagataaccagtctccaaaacttagtggaa

SEQ ID NO: 193384 - DNA, 321 bp, Zea Mays
ccggcgatccgctacttcccgtggacagcaccgcccgcactttggatctcggtgagagttctttccctgagttcaattcctcctccgctgtgagtcgaagctatctgcgtcgcgattcgtacaccaggggctggggccatgtctcgctggcgcgcgccacctcgggagcttggctctgtcacggttgtggtgtcgcagggaagaatacatgctcgcgaccgttgatttccgatgggtggtctgtattggaacctagataacacttggttgtatcaaatcatatccgtcgatttcagatcgggcgtataagattagaacgtg

SEQ ID NO: 193385 - DNA, 420 bp, Zea Mays
catgaactcgcgatgcttatccctgggtggtggtggtggtggtggatgttactggttttggcagagctaagcttgcatctctgccatggtgttggacatctgttgcagcagctgcatttaggcggcgacaacagcattggatctagcaggcggaggattcggaggattcatcttcggttctggattagacactgccctccttcgatgaatgtgtgtaggcaaatcgacatctcctctcttcttggtattgaccatatgggttagagacataggataagatagatttgcagataagacaaatgagtaagcacaaaacacccgacttttaggtcacgatcttttgggtcacaatagctcagtagattagagtgtcaccgacctaacattactacactacacctatgatggcacatgctagga

SEQ ID NO: 193386 - DNA, 387 bp, Zea Mays
agatcgccaaaacgattgcagttcttccactcaaagacgaaagcagaagtggcgaacgagcagtttgcaaagaaattaaaacaggaggagcaaaatccttcaacaagtgtccatctctaagaaaggggggaaaaggtccgacagtgacaactgacagcaagaatttgccactagaatcaactccatgccctatgaagctacgacgatccaaagttccaaaactgaaacatacaacatctacacaagacagctttctacgcaagagacggttaaaaaacgacagaaggaagaacgtgcaaaaccatgagggtgtgttcagcatgcatggagagctcagtagacatacgattacgatcatcaaggcatgaacttgagatgccatactcg

SEQ ID NO: 193387 - DNA, 993 bp, Zea Mays
cgaaaccaaactgcttgcaatcaaacagatctcatggatcactgaataatctatcaaattcggtcctggagctgaagaatgctgactcatactccacatccaactattccgccaaggatgccatgtttacgcagtgctcaccgaggcatgatctcagatgcttcaatgccttctcggccaaattcatcaagaaaagttccctgtccgatctagtctccagaggaagcatgagcaggaaattcaagacttccacagccagtgatgattggagtgatgtcagctcgcgctgggcgaaggacagccaggtagattttcttgagaggttcgagaaggcagtatcaaaactgctgatttcagatggactagaaagctgcctagatgctggctctgaggtcacaactatatggcaattactgaacaacacttgtgaggcgagacacatgtcgtcagtaaggcaagatatccttgatcggctgcttgacagcatttccacatcaaaaaaggacaaagtggtcagggcatcagtctatgtactactgctcatgatatctgaagatagaaatgtcatgagaggcatcaagaggaaggacttccatttatccaacttagccgttgcattgaagagagatgtacatgaagcagccattctgatatatctgttagatcctacacctttagagatcaaaaacttggatctgttgccctcgcttctacatgttgcttgtagctcaggcacccaaaaatggccttcaatgcttccactgacaccgacatcagcatcaatagctctcatcgagatcttagtgacagcattcgactatgtaacaaacaatgtccacttggcttccctcagctcccctcctattttgtccaagcttgtggatgttgcaaagaaccacaacttggaggaaggtgtggccctggcagctattctcatcagatgtgtacgtctcaatggtaactgcaagaagttcttgtcacaggctactccag

SEQ ID NO: 193388 - DNA, 423 bp, Zea Mays
agcgctgtaaaccgtcagcttcccagggtgtgccacttggtgggatggggtgtgtgctaatgccattgcttatctgaacttcatatatcgatgcattctggagaactttgccttcatatcagcagtatcggtttttacaggagcggaagcatttcgagaggtttcaggggagagttcaagaattggcacatcatacctggtctttgtgaaagttcgccggtcatggagaaccagttctctgtaatgtttctatcttatcatgctgtttctattagactttggtttgctgtatgatgtatgtgtgcaatgctttatgtactcttgaagcttgatgtgtatgatgatatgtccttttgagcactatagatgtttgaagtatcacttaaacaaacacattttaagttccatgtgcaaatgagttat

SEQ ID NO: 193389 - DNA, 428 bp, Zea Mays
cctccccggacggccacgaaaccttcaccagacaccccgcaaagctcccggacacgactcatgtgcctggtcctttggcgaagatggtaatggcgctggcgcacgattcctggtcgcagttcaagcctaagcctcctgttcttgtcgcgattgctagattaaagggggcaatgggtgcagaggtttgtggggtcatgtcttataggctaacggctcgaaccggcgagaaacctaggcgtggggcgagttcaccggagattacggaggtcgcgtagcgaattctgttggcgtgggagcgattgatctgacggcttggtcccatcggtcacggaaggagcgatgaatgcgggtgcaagagggaatagcgggcaacggctgacagttgggccccgcgcgtaagtgagtccgggcgggcgtggtgacgttgg

SEQ ID NO: 193390 - DNA, 446 bp, Zea Mays
atttaatcctagctgtctgggaggagatcaacggctagcactactcgatccccaacttctaatcacagccgttgatcgcgaaatgtgcggtttagggaccttcttcctcaaaacacggaccatagcaatggcctggccattacggcggcgccctgttcccccaccgcagagctcgccatccgagcccccgataaacggcgcagaaccttcttcgccccaactccctgtctaggtcgtctcctagccatcttctaccgactgcacgagactgcgcgccttccagcggtaagcccggcggcgccgcccgagtcttacagcgcagaccatggccggacccgcccactccgcacatcgagccccaataccgaaaaccgaatagcactacccgaagcaggcatccatgcgaacaacagggtggactccataccgtgaatcgcgcagcccag

SEQ ID NO: 193391 - DNA, 343 bp, Zea Mays
acgcgggattgatgatgtcattagggcaaaaagaactttagtttgaacataatttgtggatgtcttttcatgaccgacatagtaggagacacatttgattgatttaagttatccatttgactttgacagttccatgcatgcagcatgcataaacagggcggtcaaggtctcttatgttgccatctatcactgttaactgtctccatatctgccgttaggtgaaccacaactagtgtattttgaccaacatatccagggctagatgattcatctggcagccaactgcacctaacaagtccaaatcaacatttttttgttgcgtccagcacttcttttaaggaag

SEQ ID NO: 193392 - DNA, 310 bp, Zea Mays
gtaaggtgttatcctcaacgtcgagctctaggagatcgtgcacgagcgggggtccaccgctcactaggcttgggttgcactcaaagcccggttcctcaacaaccgggaggcccatgccctccacctcgacgcctcctttcggctcttctcccagagtgacttctaccgagtattgtcgtcggatgatgggcatggcactctctttgggttctcggcgagctcgtcttcatcgcacgcttgtcctcaaccttctgtgtggtctcaaccgacgctacgaccacatgaagaccctcatctagcgctatgtgcc

SEQ ID NO: 193393 - DNA, 1011 bp, Zea Mays
attaatgcagggtgatatcctagagaaagccaagatattgcaatatgtaagagtgaatgatgtaaggacaactcgatatgtatacaatgatatgtttttcttcaaaagatctcaaacttgacttactggtatttataatcgtgacagtggtttgaaaatgaaaagcagaggcttgggcatcttcgtgaccgtgcaagtgaaactgggcgcagaaaggaatatcctattgactatactatggtgtggtgatgcctttattatcacttatattgtttctcatcgactactatgccgctgaattgctatttcttgattttatatcattatttgctcgttcccaaaaattggatcattatttaacttaggcaattgccattttcttgccatagctcaggaattgcggatgttcatgataatcaagtacacctttatttttcttatagaactatatgctactacttgtagtgcatgattcattattttgtgatccttgactgtatcatacacttagagaatatgtagaaaagctgcagcttctcaacgattctgaggaaagaactcgcaggattattgaaattctggaattgcatgttgactcacatatggatcctaattatgagtctgctgaagaaacagatgagaaaggaactggtatatatcttcctgtaatgttaatgcttcatgttgcatgttgattagtaaatatcggaatgtaactgtttctcttgcattgaataaatcttaagctgtagcataatttcatgtggtttgttgcaatatattctaaatatacatctactagaagtttctgcactgtaattttcttgcaaagttgcaatgcagtacatttgaatcaatgtgacgataatcatcaactctattaaaataaatcacatatctgagtaagcgttaattaagtgtagtgtttgagcatttgcttgtttattatatgcagttggaaagtcggtaaatcagacaagaccagatacaaccatatcacgaaggatatcg

SEQ ID NO: 193394 - DNA, 302 bp, Zea Mays
ctctcttctgtttcaggcgagcatgccccctccatattgggacgaggcgttgcacactgcgactctcctcctcaacatcttaccaaccaagacgctcgatttctcgactccgcattctgcccttcttggtagtgcgccgtcctacgatcatctccgcgtttttggttgtaagtgttaccccaatctctcggccactgctccccacaaacttgcacctcgttctgcgctttgcatcttcatcggctactctgctcatcataagggataccgatgtcttgaccctaccaccaatagaatcatca

SEQ ID NO: 193395 - DNA, 361 bp, Zea Mays
acagaggcattgaggcatagagcagatgcaaacttagctagcagagatggatggagactggggagaagagatggaggtatggtacttgcagggcgtcgttgtgcttgggatggaggagtggagaggcgctgaatcccttcgccgatggcgcgcctccgttgccctcgtgttgacgtatgatgtgtgtgctgtgtatgcagggtgcccgcgactgcgtgtgctgtgggaaagagacgatgtcgacagggtttagaaagtttactcagtgatgtagccatcgtgggctgaccgggcctaaatggctaaacgaagtgggccaaaatcccaaaatagttcatttgatcgtccatgacctaatcac

SEQ ID NO: 193396 - DNA, 307 bp, Zea Mays
atccttcggcttaagaatgatgccgaattcacttggggggcagagcagcaagaagcatttgatctcattaaaaaatacttgtctttggctcctgtattaaaagcaccacgcgcaggagtaccattccgattgtacattgcagctgaagaaaaggtcattggggctgttctgacacaagaaactgagggaaaggaacatgtggtgacatatttaagcaggaggttggtggatgctgaaacaaggaagcagtgttacctgtggaaataaatttgaatgctgtcaggtttgccagacaaaatgatctaac

SEQ ID NO: 193397 - DNA, 508 bp, Zea Mays
taagatcattcgaagaaaagcttgtccgacaccagttgagatggtttagatgtgtccaacggagacctcccggagcactggtgtgtagtggatcttaagacgcgattgcacgatagtaataggaaaagaggcaggggaaggctgaagttgatggctttagggtgggatggaatgaatgggagggaagggcttgcaatggggtggtgttgagttggggttgtgaacttgtgatagaacggtagcatgtggggtgaatctttggtactcttgaaatcactgaaacccagttactcagggagggtacccacaagctggtgatcctctgattgagcatagtgtccatcatctcaagtggagtactaaaaaaccaagctactactcggttttcaatatttgatacatgcatatttcttcaacgagttccatactcaaaccttttctgctaacatcttagcttttgaatgcattgactaatttatgcatactgaccattgcatgtctgagtcgg

SEQ ID NO: 193398 - DNA, 361 bp, Zea Mays
tgggcaaccaccaatgcggcaatgcctgattcacccgccgcaagatccactgcagaattcagggatgacattgaacaaggaccatcgacgcctgatgatgcaccctcgaatccaccgtcgcctaatgccctcccgaatgctgctggctccaccactggcaatcaacacggatcagctgaggaggcaccgacgcctgatgcaccctcgaattccctggtgcagatgatctgcgactgattggtctatgggtttacagcactccgttctttttatttggctgcgcgtcatcttcgggactggtcatatgaaccgattggcatcaaaggtacgcactgtctggtcgacatgaccgtaatttccc

SEQ ID NO: 193399 - DNA, 520 bp, Zea Mays
cggcagccaccgccgacaaagctcgaggaggagggcgccacccctccgccgcctgcaaccgaagcagaggagttggtagtgagaccggtggttttgctgtttggataaccaaggaatttaattttttgaaattctttttccctagcttccagattggacatacatgattggaagccatactgttccttgttattagccttacatagatcatgatctccttgtagtgagctgtatttaactttaaattcatggagtaaagtatggccacaccatgtttgcatagatcatgatctccttgtcaataatgatttatatacgtagacaattctgcattttatttatttctataatattgtatatagccttcaaagttaattaccgattgaaggataaacatggagtaaacttggtagtatacaatgcagaatatcttaaattgtttgtgctgattataaacagtcctaccttgtttagctcagtaactatcacaccatgtttgccgaaacatatcatagtaatg

SEQ ID NO: 193400 - DNA, 271 bp, Zea Mays
ttggatgattggagagctcccgtagtaaaatatttatgtgatccaagttgtaaagttaaaaagattctttgacaaagtgcattcaagattgtgttttacaatgatgggttatataggaccgacaaagacttgttattaaaacatttgtgattcgatcaagcaaatgagctatgggagaagttcattaagatatttgtggcatgcatcaattagctctgaagatgaagtggttgttgtgtagagatgatttttattagcttactatgatggc

SEQ ID NO: 193401 - DNA, 315 bp, Zea Mays
gaagattccaccccaggcatgtcagaacaatccacaatcccagcacaaatgatgacagggcaaaccacactcaaggcagccaacaaagctcacaatcttcaggaatacaacaaacctcttgcaggccaccagctccaagaggcagaggaggaagaagcttcggaggaaggttcagcactcaacccaggagattgttctccttattctgtggggaggataagggacacacaacaaggacgtgctaagtcacgatccaaaagcagaaggagatagctgaagccgaagcacgacagaatcagccgaagctggtcttgc

SEQ ID NO: 193402 - DNA, 298 bp, Zea Mays
gagaaagataaattgcgagcacgaaagcgagaggacaatgacaatgatgcattgatggaagaactaaaaaaattagagagtcaagattggagatagaaaatgatcgtaatgcacgagaagacaagttattagagccggagagtagtaaacttgatcttgagcgtgaacaacgtgacgacaaggtgatgagaaccgacacaagtacaatggatgatgagtcgaaacaatattttaagttagtgaaagaggaaattttggcgcgatgttttgggagaaagcaagattgaggggtcatgtt

SEQ ID NO: 193403 - DNA, 352 bp, Zea Mays
gtgagttgttacggcactcccgccataccgcaccacaaccatcgtggaggtcttctctgctcgtcccttcagacgctgacacttggttggggctttttacctagtatgtgcggtactggcaacaccgacacgtgcattcgtctacgacgcgtttctaggcgtggcaaaactggagcacgtcttgtccacgatggtttgacaacatcgtcctcgacatcggctacttcctcgactgtgtcgccgtcttcgtctatggcgccctccttctgcgccatcgtcaccttggcgcctcctagcgcgtcgcaggccttcccgcgtgttgcgcctatgcccgcgaattgtgaggcttgtc

SEQ ID NO: 193404 - DNA, 335 bp, Zea Mays
ccggaatttcgtccttcgtaggcagtaaagactctgggacctcacagttactagacattctgccttcctgtttggggaggaaaggagggacacggaggcgggccttgaggcgccgccattgccttcaccgtcgccggcagatggggaggccgccggtggtggcgaccgggtacacctagggtttgggctcgatttcttttgaatcaccttttctccaagttaccttattgatggaaccagtatatcagactaacagtatatcctcggtcgacccccttattgatggaaccagctgtgcactaggtacctactaggatggatgtgttctgcatcgg

SEQ ID NO: 193405 - DNA, 313 bp, Zea Mays
ggcggaggaggagttgcatccgtggcctcccgtgttgctcctcctcgcgcccgcgtccctattacttctccgcgtccgtgctggggcgcggcgcgcccaccgatcctgttctacctcgcgtctgcgctgcgacgttacctgctgctgtcgcccgtcggtggtggaattcgtcgcgcggatcgagccgcgggctcgattcgggcttggcgcctctgtatatatgtcggaattcgccgtagcgtgtgattaggttttgttgttcttctgtgtcggcctggtcttcgcgtgttgtgttttgttgtctggcggaggc

SEQ ID NO: 193406 - DNA, 330 bp, Zea Mays
gtacacgaagcctaaattaggtggtctatatcctcttctatctctaaccgttccttcacgttgcacttgtgtgcctccaccacacaattccgtcaccaactttctttgatttgaagcccgacgttgatcaataacatcccacatgccactggcttgtcctgtttgtcaccagcggtcgtcgactcttctgtgcccgacctactcatgctcgtcatgaccctcccacccgaacgtgcaggtcgcctctcacagcgccgcccacgtcagtcgcctctgcttgcttgtgttcctcgcccgattgtatgtgagctcacctcgtctcgtttgcaa

SEQ ID NO: 193407 - DNA, 494 bp, Zea Mays
aaccttctaaagtattgcaatctggctgctactgaaggagatgtttatccctctcgtaatatcattcatatggagggggttctcccgtggtttgatacaccaattgagtcttcaatgaattcatttacattttcaaaaagtgctatagaggcattaacatgcaaaagggatgctatgtacaagttgatgatggagaagctccaacattttttctctaatgttgaggtctagtcacattaactgaattacactctgcattttatctccaacttcgacttgtctgattttttctctaacagaagcaagaatacttgctttcccaaaagtcttgctgattctatgtttggggttgtatccgttcaccttctattcctcataacctttgtttctgtttgcaaatatgttatgtttcaggtgattgcttttgatactgcatcaaatttcctacataaaaggaccgaccttgtagatgcatctgtttcagatgctgagtt

SEQ ID NO: 193408 - DNA, 529 bp, Zea Mays
cataggccgatttgctacaataagtaccatgggcagagaggcgccagatgtgttggtctgcgatgtcaggttgcagaactaccccatcaaccaagttccatagctgcagatactccactaggaccgttacagacaatcctccccgaatatctgacacccattgacgatttgtgagcccctcggctactgttcttcgctttaaagcccttctagaaatcatttggatcagggttggacagtgttcaaccacagttttaccaaggagccaactatcagaccagaacttcacagattcaccactgcctaccactgaggtaatagccacatcaacgagggcctttgcattacggtgcactcggatagggagaccagcccatggccttgacgtgtcagtcttctgtaaccaaagccacctggcacgtaaggcccatccaaacatctccaagttgagaatacccagaccaccatacttgagaggccgctggacagcttcccaggacacaaggcagttacctccatttgcgtcacc

SEQ ID NO: 193409 - DNA, 964 bp, Zea Mays
acgacgctcatccggcaacggccactcacaacatggttgccaggccttcttgtgtattggatttttcctccgacatggcacgagaagaggcggcgcttcgccgcgctttgtttgtcacgatcattggtacaaggccagaggtgttaggctctgaagtcattgaagaagtggcacgaagttttgagatcgaggcagattccatgtccattcatcagaccttcccggaggatttcatcctgattctctcggatgaggatgctgcaacaaaggtgctcaatggaggaagagttctcagagggcctcagtttcatattcagttcaagcgctggacaaggctggctcatgcaacggcagctgcattgccgtcgctggtcgacatcgagatacaagggattccgttgcacgcttgggggcggtccacagctgaacagctacttggtaattcctgttggatcatagatgtgcacccggatacttccctgaaaagtgatttttcagccttcaggcttcgggcttggtgttgcgagttagagaagcttcaacgtgccatgaatctggtcattgctgagccaacgccagcggatcatgtgaaacggtgtttatcctacagtattgaagtgactgtcaccccagtcgagaagccactgtcagatgggactccacctcctcctcctggcaacgacaacaggcatgaagatggcgatcgtcgccgtcctgaggctccatcccctcgacgccggcgagaagaccttcagaggggacccatccaccaacgtctgggccctcatgctcctgtgaatgactgtggtaggggctctgctaatcacaatacaagcgttgcacccgaggcgccaagatctgttgagacagcgacggttcaggtcccaagggcaacaagatctggagaggcagcgacggtccaggttcctactttggacgatgaagtcttttcagcgccccttcc

SEQ ID NO: 193410 - DNA, 287 bp, Zea Mays
gtgtcatatggaagggctgatctctaaagcacaaagcgccttcatcaaaggtcgcttcatacaagacaattttatgcttgtccagcagacggcaagatttctccatgctaaaaatcagcccagaattcttttgaagctggacatttccaaggccttcgactcggtctcttggcctttccttcttgaggttctgtaaaaattaggctttggcccagtatggagggatgtgataagtggttttcttatgacctcttccacccagatcctgctcaatggggtgcctggaa

SEQ ID NO: 193411 - DNA, 437 bp, Zea Mays
ttcgataccgcaacggcttgccgtcgtagcacgcgtcaacgcgctcctcgtcgtgggagagcgaggtcacgagctccactaggtcatgttcgacacgagctggcatcggagaggatgttcccggggagggtaccgtcggtgctggagtacgtggtgacggagagctcgctggagccggagtcgtggctggattgcgtggtggcgaagagctcgttgtagccggagctggagagcgtggtgttggagtcggtggagacttgggggctggggtaggcctactcgaagaagggtcgcctactcccccggctccctcaaagtggacgtactcggtggtgaagtcgtcatacgtcggagtcgtgtcgtcgtccaccgccttgtcccaggcccatcctcgcccttcgttcgaacactacatcgcgcgtcgtgcgcacacacag

SEQ ID NO: 193412 - DNA, 379 bp, Zea Mays
gcaaagcatctgccgagtttaacagtgcaacatccagcttcatacagacaaatgtcagcaacaaatcagatctcacccccaggtatgacatgagaaaaaaagaaattatgactgtaaggttatctagtgatattgatcatgaaatgtttgacagatccttaatggacaatgtgggagtttggaggcctgttgttacacctaaagggcctaaatctcttgagtctttgtctgctaacacattaactggtgcaagcccaagtctgtctatacaaagacaacctgttgtagatcttctctgtgccatgactctgcttgttcaacaatctacttcgtttgttgatatgtcacttgatatggatgacggggacggttctttttt

SEQ ID NO: 193413 - DNA, 307 bp, Zea Mays
ggaagaggagggctagggtgcggcgctgaagacagtcttaggaagggaacactaaagtctaggcttgttttatacaacgaggatcatgaattagtgatcgataattccacatatgttcaggttggtgcaatgttaacatctgcattgcctccatggaaaaccggcaataacagcacccaaccacgcaaacaatggagcaactgctgaccaagctaaagaacagaggaacaaaggcagccggtttgggtgatcgattcattcaacgattaccagctgattccaaagatcatccagttttggcacgaac

SEQ ID NO: 193414 - DNA, 525 bp, Zea Mays
aatggcgccgcgatggctctgggtggaattgggaggtgggattggggctacacggccgtaaggaactatagcttcaccatgcacaaccaattttgagagagatggcagaggcagtgcgaattttggacttcaatcaaactcactggtgaagttgtgagtgtctcactggtgttcatggcactatttataggcacggcggtccggctagctatccacggctatggataacattgttagcgcatgtttaccacgtagggaagagacacagtgagggaggagcaaggcatgggtgacaccacggcggaaagcactgagtcacggcgaccgtcgatgaatatcttcggcgacgcccgactgagctcgcgggatgatgccacgtccaaagttatcctcccccggatcgattccccccactggataactcgagctcatctgattcaatagtgtcgtagatcttttccccgtgttcttcagatatttgcaaagtttgatctttagcttcttcctgaaccgaccaccttccag

SEQ ID NO: 193415 - DNA, 461 bp, Zea Mays
agtcgaagccgacgtggccgtgggcatcatgaaagagggcaacagaagaggaacatcgacgcaatcgacatcgaggagggaattgaggtcggcggtggtgagtcaagaagggggaaaacctcctcatcaaaagcaacatgacgagagatgatgcggtgggtgtggaggtcaaggcattggtaccccttgtggtcatggcaatagccgaggaaaatacgagtggagtgggggagagcttgtgaggagcagtggcggagatgttgggatagcaaacataacaaaaaacttgaaggtgggcataggagggggttgtgccatacagggcaaagtgggggggggggtggggtgactcactgccttggagggaatgcgattgagatgggtagcaatgttttcagtctctgcccaatagctgacaggaagagacccttgaaagaggaggcaacatatcatgttagtgg

SEQ ID NO: 193416 - DNA, 309 bp, Zea Mays
tgcatctgacttggaacgcatcaaggtgagccacatatacctgctcatgtcatcgaccaatagcaggaaataggcgttcccggccggcgtcggtggagtgatcggcccgcagagatctccatggaccagctcgagctgatcctttgcccggaacttggcagcctgcgggaatggtgcccttttttgcttggcgagaacgcagtcctcgcaaacttgctcgatgtggtcgatctccggcagccccttcaccatctcgcctcggctgagtttgcgcagtgaacggaagttcaagtgcccgaacctctcgtg

SEQ ID NO: 193417 - DNA, 465 bp, Zea Mays
ggtcaactttggtggttcacaggtgtgtatgggccttatcaggacaatctcaaacaagcttttctccatgagctgagagaggtcaggaacaaatgtgggggcccatggatcattgcgggtgattttaatatgatttacagatcggaagacaagaacaattccaatgtaaaccagaccttgttgggtagtttcagaaactcagtcaactccttggatttgaaggaaattctgttggctggaaggagattcacttggtcaaatcagagggaggatcctactcttgttaagctagatcatgtattctgtactagcagctgggaagagtttttcccggatcgtatgctctatagtaatgccaccgaaacctctgaccattgtcctttgattctcaagctcaaaatggacctcaagggaaagcgcaggttacacttagaaagtttgtggcctaaattccctgggttcttg

SEQ ID NO: 193418 - DNA, 507 bp, Zea Mays
gaaaggctaaggattctgttgtcaaggcaagcagcaaggatgaggctgatagcaccgacaactcaaaggatgctgctgccagtgaagacaaggattcaaaagatgaagtgaaatccagtgaagctatcgatggatccaagacaaatggcctttcaaccaaaaggaagccagatgagaatgaaggtgagtcatcagaggaggagaaggcgtctactaaaactactaccagaaagaagcgcagaagaaagagccgcaactagttgcccagaagctatgcagctcatcatctaagtggcgttccgcccttgcagtctcaagtctcaaagatgttggcatgaggcatgccatgtactgtacgctttatattcactggaccggttaccagcttagcgctttggtagttggccattatgagtcagctcgtagttatagcagtcttaaactctcaataggagctgtaatgtttggtcttactttttttttgtttctccttgccaacggctgtgc

SEQ ID NO: 193419 - DNA, 446 bp, Zea Mays
gtttggtcggaataggtagtgaatcatttgctttggattattatgagaagtgtgaatcgagaattggatcttatgatggtgtcccgtgtatgtgtcctactgtctactgtaatttaacaggctgttgttccctagcagtactctcggcggctcagcgtgtttggtcagaggaatgtctccatccagaattatctgatctagaaactgaacctccttgtgctgtttggtttgtcatctgtcaccgtgtagtactcctgtggtagttattccgcaggatgagttcattctgcaaaaaaacgccagacccaccattctggttaaagtcatgccgcatgagctaaatctgcaaaccaaacactgttagttagaccttacccggtactggagtactctagttctgtgggtaagaaaaacaaggcagactggctttttgggcttggtgtgtt

SEQ ID NO: 193420 - DNA, 352 bp, Zea Mays
gaataatgattgtcgaaaaccaacctagcaagtaagatatgtttatatctgtttacgcaaaaatgtttcattttacgttgtaatttctttgtcttgaatcttgattgtaatctctttatgtcttgattcaggaggaaagtttgtaagaggaagaggaatgggtaaagaaacggaggtcaatgaatatgaactacaaagggctgccaacataaaagaaaatttgaagaggatgagatctcttaatctccatgtacctagtactatggttaatgaagaagcaaatggatcacatcgagccaataagaaacataaggttaatgtatttccctatttaataagttcatgtttttac

SEQ ID NO: 193421 - DNA, 282 bp, Zea Mays
gctaactcgcatgtgattcagccttatcttgtgttgttaaactgttagcaagattgtatgcattgcaaaattcatctcttatgatctatttcatcaaggttttgcaaatctctttgtaggcattgatatccttgtgcaccaatgagtcagtagctgcaaaaggtgcacttgaattgtgtatgactcagatgaaggttgtgctaagctcccaacagttgcctcttgatgcctctatggacaacatagcccgggcttatcatgcaacggaaacttatgtacagg

SEQ ID NO: 193422 - DNA, 309 bp, Zea Mays
ccgagctcgcggtcgccggagatcaccgttctccggcggccccgcgtacgccggtatcagtaaaggttggttatccacatcgaaaccccagctcgcgcctcccacccgagtcagtcacgccgctaaatttggctcatccgccattcagaccagcgccgctagggttttggacctatggatccgctccggagctacctgggccggatcctcctcgaagagatcacaccggtggtgatggtgctgtccacaccgctcgccgaggccgcctgccgtaagaacggcctcagcttcgtcgacatgctctccccg

SEQ ID NO: 193423 - DNA, 918 bp, Zea Mays
ccagatctcctgcctgggctcgatgacaaaggggagttagaaccatctggcagaagttcctggcagtactttgaaaatgtatatcccatgtcaataataccagaagctaactgcttgctagactccattgcatatctagcaactaaacttccactgctgggagaagtagatgggctcactcctggcgaaggtgtgaggttctgtggacttaggcggcctgtgtttgacaataaaggagtatttgtggcataggctaaccatctggggccaacagccatcgggccatacccaatatttaccccaggtgcaccttgcaaaggatatgacaagacgctgagcttgttctcaagagtaacagcgtcaaagcagtagatctgaaatgtagtaaaatgagtatttagaattcctatgcaagaacatcatttttgtcaactccagtttgcactacaaaatataaatgaatgtgcagagagaaacttacttgtgctgcaagtgctacagcaacaatcctaggactgcagcgaactaaatatacagcagaccggaatcgaagaacatgtacataggtgtgagacttcaaagagtagaaacggacaactgttggggttgaaatgcaatttacagcttgatgctcactgtttgtgtctctgataagagcacttaagcgaccaccttgaatcgcacccaggccgtttgtctcatcaccagcaacaactagaagcatgggatgtgatgctctgaatccttcaatgccttcagagccgactggagtgggttgcatttgtaaaaacgtaactgggccatcatgttttgagaccaattcacaaacatttgcagcatcctcaacatcaagcacttgaaacccatttgaataaccaacaagcaggacatgcttgaatgatgatggatgaagctcta

SEQ ID NO: 193424 - DNA, 701 bp, Zea Mays
tgaaacatttcgatgtgacatcttcatttagatggcacaaccatcttaatcctgggatcaataaggacgcatggacacaagacgaggaaatcaggctcatccatgctcatcaaacttatggaaacaaatgggctgaattgacaaagtttttaccaggaaggtacatattctttctttccccagcgtcttttaaactaacaagagtaatagataatgtcaaatggaaaaacatagtcttctatgcattagtgatattccattgcagtatgacatatatatcgcattgtaacatcctgatatatttttcggttactaattaaaatgtgcatcactaaatcagcctgttagaaaatattgagctatattagaatacagagaaattgatgagtaagtatgtatattatcctatcaggacagacaatgcaattaaaaatcattggcacagctcggtgaagaagaaagttgattcatacagatcatctggtttactggctcaatcccagggcttcacacctgttgaatacactgctggtggtttaaatgttgattcttcatctgcaataaccaatcaaattagcgaaggcagtggttttaatgtttttcgggaggctgaagattcgatggagttaagtcagtcttcgtttgccaagggttcttgctctcaggaggagcaaaatgatgtgactttgggatctcatttg

SEQ ID NO: 193425 - DNA, 369 bp, Zea Mays
ttggagcagggttcccttaggagctaaaggagaagctggcggagaagggagtgagacccacctccccacacctccggagctgccattagatttagcccaagttctagccaaccaaacccgactcattgaagtcctcactagaagtctggagaattagcgcccgaatggtggaagaccacaggacatgatgggagattttctaaggctcaagcctcccacgttcgctgggtccagcaatcccctcgatgccgacgactggctgcgcacgataaaaaggaaattagaagccatcggacgcctagaaaatcaacgtgttcaattggctgctcatcaactttctgggatggccctagcatggtgggatacctt

SEQ ID NO: 193426 - DNA, 339 bp, Zea Mays
ttccttgcgaactctcgtctttcccctgcaaataccttggtctgcctttgtctctaaaaatgttgtccaaaaatcagatgcagcccattattgacaaagtggctgatcaactttctgggtggaaagcggatctcatgacaagggcaggcagaagagtgcaggttcagtatgtgatggccggcatgcttatatatctagtcatggcagttgacatacccacaggcttgctcaaagctattgacaagatcagaaaaggatttctctggcgtggaaggaaagaggtcagaggaggacattgtttagtggcttggggaagagtctgtagacctcttgaaattg

SEQ ID NO: 193427 - DNA, 373 bp, Zea Mays
agctcgtcgacgaccgggatcggaaatgcatccttgaccgtgagcgcgttcaacgcgcgttagtcgacgtagaagcgccacgactcgtccggcttcttgacgaggatgactggagatgagaatgccgagtcgctgtggcggacgatgccctgcacaatcatggaggtacactgtcgctcaagttcgtccttgtgagctgcagggtacctgtacggtcgtaccaccaccgggaatgagccaggcttgaggacgatgttgtggtcgcagctccgcgtcggaggtaggccgatcagctcggcgaaaatgtcggtgaaggtgttcaacaccccgtcgacgagggtgtcatccgctgttgcggcgaggagaatcggcg

SEQ ID NO: 193428 - DNA, 419 bp, Zea Mays
ctctgtaatacctagccgccaaacagtgcactacgtctcctactctcctctcttgctagctcgactgttccagcccttattcacacttggtcgccggtggctgccccttcagacctacagctcaccgacggctacatcatcagcggctacaccaccctgccccttcccatgctcgcctgctacagtctccacatgcggagactgtcttaaggttcaccagctgcagtctccaccctgccccttcccaagctccagcagacctgcaccattgaggagatgagctcgtcatctcaaggttcctcatgctctgccccatctcccccttctctgcagttctgccaaattagtggatggttgctggctgccctaatcctaagcctgtgctaagtagtgactttctaatttatataatgtagttg

SEQ ID NO: 193429 - DNA, 410 bp, Zea Mays
gccagtaccacacgtactaggtagaaggccccaaccaattgttagcgtttgaagagaccagcagagaagaccttcacgacggttgttgtgcggtatggcgagagtgccatcgcagctcacggttgtcagagcgcagtagatgaagtagttgaggatgagatggcgacactggcaacaaggttgtgctggaagaaggcgtagatgtaggcgtggcgacacatcaaggatcctgaagtttacatggcgggagagccacgacgcgtaggaaggtcctcgacagcgccactgtagcgcgatgacgatgcttgaagttggcaaagaactcgaagacgaacgtggtgcagaccaacgatgggtgtgccgacggagctcgtaggtatcgaacaactcatagaccgtgcgcaggagac

SEQ ID NO: 193430 - DNA, 378 bp, Zea Mays
tatctagcttcggtgccttcttgggagcttgagtccctgtgatgtctttcactgaactgctagagactttattatggtccgcttttttattataattcgtcaacttggtatcaccatttgatgaaactttggaactgccaatggcctcttcacagacaacagtttttgtatcagccattgtagttgcagcgaacgacgtgtcagcaacacgatcttctgagataacaactttggtatcacaagttgatgcatccatgacatggtccgcagactgggttgtcccgcaaattttaacagaagaaaccaattcttccagatcaagcaattgtttcaagtctgttgtgtcacggacagcaatttcatatccttgcttccaag

SEQ ID NO: 193431 - DNA, 748 bp, Zea Mays
cgaccgaccactcctccgactccgactttgccaccacgaacagcaacgaggacactgccatcctcggcatgacgggcgacggggcattcgcaatctccttcgccgatcgcttcaccgccagcgccagcgcagcattgttcgtagaggtaactcgcctatctacccatctccctccctcccactcccactcattttccatctccccacgcgacttcacttgttggatcgccatcaccccaaaatctgacttgcttcctttcatttcctgctcctttcccttgccgccgagaccgtagagagaggggatgggaggatcatgaagcccatgacatcgcatcccatcccatcctatcccatttaatttggtgcattttctcgcatatttcagaagaggatggttcatggtagcaaaagtatggcggtaccagaacaagggattccccctaatgttgttgaggatggggaacccttcaggcacaccagtgtgggcacttacagaggagcagatgttctttagaggcatgttgtgttgtactcttccacccactctctgccaggtgtaaacattgatccttctcacacagtttcagttccacatggttctgtgcctgaggcaccacagtcggattcacatgtttattcagtggactccaacgccaatggcaatcttgtgagctcattgcatttaaattttttagtctctacacaggttgtggtggaaaacactcgtgtgggatctagctggctc

SEQ ID NO: 193432 - DNA, 469 bp, Zea Mays
atttctcagcagagtcgacgttttgacgtgatgcgtaattattgctgcaattctgtgtttgttatgacgaattgggcatgttagtgaaaatgggtcaatcatcgtccgatatttgggattgatttctttgaaggggttagaacgctgacaacggcgcagctttgacgatcaaattgcactgttgcattgcacaacatatttgaatagaaggggttgattttatttgaattgagctcatggatggacctggtacagagggtgaagcttttgcttgagcaaattttcagcctggttgtagttgttacaatggtttactgttcatttttatttttgctgaggacactactttgcccattttgaattgatggttgcattttttgttgaatcaccttctggaacaacaacaatccatttttgttgaatcagtctgctgggacttttataatgaatattggaccctcttaaaaac

SEQ ID NO: 193433 - DNA, 516 bp, Zea Mays
ccaggttgtgctagcagccactgttgctgttcttgctgtttgccagcgccacttgctttgcatggtgagaacttgtaagagcttgatttcttgctagtgaggtagtgtttatccatccacatcacagcaactactaggctgcattacttgtttttgtatctcttttgcactaaccatggcagaggatgcaaatgcgcgacctccacattctccacgaacagtgggcatcattcaacatttcgaacgtcaagtaaggttgcacacagatgccctcaatgaagatgttgaagtcaccaatgagcgcattggtcaattagaaacagcacaaattgttaccaacaacacattgaccactttggaacgaacagttgctactactaacacctctcttgcagcaattattgagcgcttagataggatggaccaagttgggcgtgaaggtaggcaacaaggtgatgatgatggccatggttccattgctggtaccgcaagagatgatgctacggagtattcagc

SEQ ID NO: 193434 - DNA, 300 bp, Zea Mays
aactcttttatagtttaaggagaggctcttacataggggacttgttgtctaaagcagggtgcgacctgttgtctaaggttgtcctactgacatagttctcttggcgtcgtcttctagtacgtgtgtagtcgtatgtctggcatggctggtcactctgtctatccggtatacgagtcactgtagaaaccatggtgctaaggccccgtgtagcggtgcctagcgggacccacgaggcagagttgggggatactgaggccgtacacggcaacgtctcatcccattgtcaaagatactccatca

SEQ ID NO: 193435 - DNA, 521 bp, Zea Mays
ctaaatcttgttttacggtttcctgtcaggagagggagggggcacaaaacatggcataaataccataatgaaatgcctacttcagaactgtgtcaatttttttgttgctgaaaaattcctatgtagccactggccaaggcttacatacatgatcaggataaactaactccacctaactcaaaacaaggaggggtgctcagtaaacattgaacaaatcaaattatggcgcacattttttgtaagcacttgatgctcgatttacgcataacgcatcgatcacattaccatgactatggggatggtgcgtagctaggaaccaaaacgtgagaaatcgaaacgaaagaaagcagcaaaaggagcggaggtgcactaccctctcgactgctgtggagcagcgtcaggtctggcaggatggacattggacagggtgcgacaatcttggtcagcgctggatggttgtattctccgttctccagttcgtcaccgtcagggaggaggcagttacggcggtgttgttggtc

SEQ ID NO: 193436 - DNA, 911 bp, Zea Mays
cgaatggggcagttgagggcagcagcattgcgggggaagtgccagatgtggctcctgtggtatctgaagcacggatggacgaggacgggggttgctccacaggcaatgagtactctgaaatgaagatggaggtggatggcggctgcgtagcagaacgagagggcgatggtcaggaacaggaacaagagtgcactgcagctgctgtggaaagcgaggttaagacgggggaaggtgacggcggagtggtgaatcaagggactacggcacatgctgggggtcttcaggttaaagaggaggtgggggaaggcttggtgggccgctacattggacgtagcgctccagggcgcacgaggattcttattgggaaggttgtgtcctatgatagcacagctggggtctacagcctggtgtttgaggacggacacgctgaggagctggggcttcctcagctccaggagcttctcatgtcggatgataatggtgcattaggcatgaaggtgagctgccggaagaggaagctagacttgctggtttcatcagggagcgccttggaggtcaaagagccaccaagtactaggcagagggttgatggatgcgagatgtctgccaggcctgatgagctgcagcatagtgcgtctggctcggatatgtctgaggatgttgagtcttcgagcaattcatcagatttcactagagaagaaacatctgagccatgccctcctgtacaggctgtggagttgcctccgtcgtcaggcgacattcctgtgccagaagagtccataagttctctcctctctgtttataacttcttgcggtcgttcagtgtgcagctgttcctgagtccatttggactggacgattttgttgcggccattaattgcagcgtgcagaataacttgttggatgctgtg

SEQ ID NO: 193437 - DNA, 327 bp, Zea Mays
gcagccagatggtgtgccaggtagtctgctctcagcttatgaaatggtaaaaaagaacggtcaggttactccagaggtggcggtttgtgctgctgttccggcagtgtatacgggttcatccgtgtcatatcgtagcaagaggagggctgcaacttcagcgggagacagtttggagagggcttccaagttgaaggcgtctcgcaacctcgactccgacttcatggaaggtaatgagtcgcttgttttatgcagtatgtcggttcagcaagttgttgataaattacgtcctttgggtttttttggtaataaatctgaggagtctgtgca

SEQ ID NO: 193438 - DNA, 435 bp, Zea Mays
ttagcaactgtatggtggaaaaaagttgtcttacaaccttaacctatgtttggacagttcactcacgcaatttggctaaattttccatagtctttattttattttgagaaacgatgtggtatattgatgtgtcgtgttttacttgagtggacataaacacaatctaaggatgccatgaatagacgggattatagttaacatattatcacaaaaggtcattagctagcccaataacgtcttcatccactagttatactctaataccctctagtgtgaatacaatgcccacaatatcatagaaacgtcatttgaggtttaaaaggtgatctattgttttggattctttatattccaactttttagcaactgtatggtggaaaaaagttgtcttacaaccttaacctatgtttggacagttcactcacgcaatttggc

SEQ ID NO: 193439 - DNA, 959 bp, Zea Mays
attaaccctgtcatagtcatcaagtagctgctgtaattcaaaaagagtatcatctccaagaacatcaatatcaagctccatttcctcttcatcagcatcgcaatcatcaacgcgactccttatgaactcaactacatggtctggaatgaatgcaccaaatgattgtaatcttgcactaatatcatatttttgctcactcgtcatcattctctttccggttggaacaacatcctctaccaaagaagcatcttgtatcaaaggagatgttttccttttctttggttgcaaaactggattgtccgctgaatatccttcctgaaatatgtcttgcttaggtacactcttctttgagggttttttcttggtgatgtcttctttctcaacggcaactcccttagttgaattcttttctgtaggctccctcacaggaggcttctcaactggttgaggcttatcgtctggtttagggagcttcttctcaataagcttccatcgagtttcaaagttcttgctcaaagttttggccattaaatgaacatcattattgactgggttataattcatggcattgctgaaagtgagcctcacatcagctgcaaattcccgaggtgtagagtacatccctgccttcaactttttctggatcgtacccaaatccatgggctgcttgactatttggaaatagtcaggtatgttcaacttcacaatatcaaccggaacaagaaacgggcctgcccatacatggctcataatggacttgagaaggttggcacattgtttaaacgatgatgtgtagttaacagagctagcaacaggtgcggcgacgaccgtggccgctggtggcggcgctcccctgtccgtttgcaccgaatcgctccgcttgagcttctcaacctttttcttgggttgcacatcgcctgcggggaccgacgcgaccgctgcaccattcatgctgaccg

SEQ ID NO: 193440 - DNA, 342 bp, Zea Mays
catcaccaggagcaaagtcttcaagtgtaggaaggcttacaagaaagtaggtattatcgttaatgataagcatccttttccttgaatttctcacctctcatttatcccttttttgttgtttttatgaaaaagggataagggtatgcataaggtcgttttcatgagtggcattttaccagagggcactgatgttggttactatgttggtggaaaggtcattttcttattttctcaaattgctattttcagccagtacaaatgtttttttattgacacttaagtaaatctctagaggttactggatggatatataaaggaacttgggatctactgtcattgctg

SEQ ID NO: 193441 - DNA, 586 bp, Zea Mays
gtgtgatttactgctggtgaccaccttgtctgcctgcctgtttctgattgggtgccaccagttttggttcatcagttggtagggtgctgatcctccgtgtcgctcatgcagccaaactgcatgtccacgtgcttgaagttggtggtggtgctcgcatgtgtatctctaggttgagctttaggttgatccggcgtggtcagtcgtctttcttccttggtcaccatggttctcggtcgagttaagtagtcatgttcgcattcccttcctccaaatcactagtacatcagaatcgctgtcaccctgcgtcttggaaaaacttcagtcccgttacttgctcctgcccgggttcacctcgagctgtgctgccgtctctacttgccaccacgcctcccaaccccaccttgccgtggcttgaacacctcgatgtgtggcatgcccgtgggaagcttgttctgtgatctccataggtcagtgaaactttccctgctggtattttgaactttgcggttgtcggttgcctagaacacgcttgcgccgtcgtggtcttgcaccgtggacaacctctgcaccgacctgttaatctgtg

SEQ ID NO: 193442 - DNA, 491 bp, Zea Mays
ggatcgacatcgagggaatcaaaatcgaaaggtggggaggagccactaaggggaaacattctcattgaaaacaacatgacgagagatgatgatgcagtggatgagaaagtcaaggcatcggtatcccttgtgatccgaggagtaatcgaggaagagacatcgagtggaacaaggcacaagtttgtgggaggcagtggcagatgtgttgggatagcaagcacacccgatgacgcgaaggtgctcgtaggagggtgccaaagagggtgaagaacccactgatcgcctgggagggaagacggttgaggaggtaggcggcaatgttcaacacctcagcccaatagtgggcaggaagagaagtttggaagaggaggcaacgaggcatgttggtgcatgcgatcggctcgaccgttctgaggggaggtgtgaggacacgacatcatagctccacaccatgggagagaaagaaggtacgagatgtggagttatcaaac

SEQ ID NO: 193443 - DNA, 363 bp, Zea Mays
aggagatggcttgagctgattaaagattatgatttagaaatccactatcacccaggaaaagccaatgtggtggcagatgcactaagtcgcaaggcttcctgccattgtcttacaataaggacctctgacaccacactatgttaagaaatggaaaagttaaatctggggatgatacaacatggaactttgacccaattaaagcttgagtctattcttctgcaaagaattattgatgcccaaaaaagtgataagggtatgaaacatattcatgagaagatagaagtcggcagagctaattgtttcagaaaggatgatcaaggcatagtatggtttaataaacgcataattgtgcctaagaatgcg

SEQ ID NO: 193444 - DNA, 691 bp, Zea Mays
ctgaattctctcgggtttccagtgacagtgaaagctgggtttgttggcaccataacattaaaggtacatttcttattgcaccatatatgattgtttctgttttcagttttgtggttgcattcttacatcacaatatctaacattgtgtaaacagttgcttactaaagctgttatcatgtagcttgtttctgagtgagttgtattttgaaagggtagtttacttctttcagcatggcaatatattatcatgaggaatactactatcatattattcgttacatgtatgcacaagatccatctggataagaatcacttaaatatgcattcctctaatacgcataccgccgccagcagtcaccatttatcttattttatcccattgtgagcagttcagcacttcttgttgcctgttggcctttgttgtctagttttgtttgtggatttgaaatgctaatatttgatgctctgataggtcccatggaagtgccttggtaaagaaccagttattgtcctcattgatcgtctatttgttcttgctcatcctgctcctgatggacagactctcaaggtatttatttattaatagtattttagatcgaagtgggaacaatgtttctatgaatgacactatttcttctggtttctgattatatttttgtatctcaccgttcttttcaatttcaggaagaag

SEQ ID NO: 193445 - DNA, 514 bp, Zea Mays
gaaaacccataacgttctggagctgcaatagtgccacggtcacgaagatgatacccctgattaaaaacaacatgagagtcatcattgttagtacaagtatcagcaacaggatcatcatcaggattggccatgggagtagagcgaggacgacgaatgtaagtatgagtgacaggtggtttggaagagtaagactgagatggtgtggaagtggaaggtggtgtgatgggaataagaacatctggggtagaaacagtaggtggtgatctgatgaagtttcagaaatgggaggaaggctcatgaaggaggtagactatatggaataaaaagaataatgagtggaagagttgtaaaagaagggtcggttttcattaaagctcacatctcaagaaatacgcatgcgacgagaagatgaatcataacaccgatagcctttatgttcagggttgtatccaagaaaaacacactcaacagattgagcagtcaatttagtacgttcacgaggtgataatagtac

SEQ ID NO: 193446 - DNA, 361 bp, Zea Mays
catttcattatgggatgcttcttgcatttcttcttgtgtttccctgctacttcttgtcgtgggagcgagttcctttagcttttcattgcctttgtgtgcacacatgtttgggttggcggtttcttctacggaaaggctcaagtctggaatgcttttcttcatgtgttccttcctgatgccatgtctcgtctggctccccttcttgctttggggcatttttgtgactggctgtggtaagtcctctcgccctctttttcaaggacgtctccaagtacttggggtttgagaagccagagttcctgtccttttgttatgaggcctcttaacaggatcatgtataccttcaactttctttggtatt

SEQ ID NO: 193447 - DNA, 389 bp, Zea Mays
ttgaaggacgtgcttttgcgtgttttacctatcctaggaagtgtgcgagatggccaacggcctgtttttgcgaatggtattgctaatgcatttcccgaatcatcagtgattctcctctaatgtttctgaaaaattttcaatatttagaaaaattgcttattacttttgctctcttctgttttgcagcattcaagtgttggtgccaggctgcatggcagtacctgggagatgccccctctgagcttcctcttgataacgatgttatgtaagctttcagtttgtcaaaacttgtttttggaggtaatggaagttggcatgccatttatctaatatcttaatgacaggtccttcatgaattcagtatttgagttacttataaaagtatggac

SEQ ID NO: 193448 - DNA, 446 bp, Zea Mays
cgcagaagagtgatgttggtggcggttctgttgatcatggtgcttttcaagagttgtgtgcagatgctccagtgacacagcacgggacaaaagtggtgaatttgtgtgctgaaagtggggttgaaagtcggaataatcctactgagggtgaggaaaaagaggaggtggtagaagcagccacttacaggaaacagaagtggaagatccaggagaattctgaggatatttgtgccagagcgtcgtctggaatttctcataggaggacgaggaagtcaagctcgtccccagctgctgttctgttgtcccctgctgctgagaagatggaagtagcagatgataaggatgaacctggtgttaaggagttagctgaagttaaagtgttcgccaccacagcagtaccaattattgctgagagtacaagtaagaggaaggaagtagaccacgtc

SEQ ID NO: 193449 - DNA, 466 bp, Zea Mays
tcgcttcatgtcgaagttgatgctggaccccccagtgatcatctgaatgactccacgatacggctgatcagcgaagtcttcttgttttggtgcttgggggtgatttgggtggtggatgttttgctgatgcgggtgcggaggcggaagtgggggtggtacgacttgtacctcctggtggtgctggtatgcgtggttaggtggatgttaggtggggtcgtggttgtatggttgtgggaggtggtgttgatatgtatgggcaacaactcttgggttgtcggtgggttgtgccctggacatcctgtccctggtggccttcgtttccgggcagtccctcatcgggtgcgcgcagtcttcgccatgaaataggcagtaaaacctgcacggttgatgtgcccgtctttgaccctgaccacgcgtgccattgccgcggccctagggagggtaatcttgacggcgaggggcctca

SEQ ID NO: 193450 - DNA, 447 bp, Zea Mays
gttatagtgtgcgttgatgcatgtgcgacggtacttcaatcagtttgaagtgatagcatagctattaaagtgtccttaaggcgacgcctaagcgccaaggcgagcaccgagcgcaaggcgtccacatcgccttaccaggaggagcaaggcgtccacttcggcctctatggtgttgccccgccgccttggagaggcataaggcgatgagaagcggatgccttagggtgtttagggatggactaaggtggatctgacctgagccgctgatcgattgagctctagaagtggtggcggcgctggttcctggttgttggctcctggcgacggtgtccctcccttgcgccggcgaggtcctctgttggctcctggcgcgcgacctccactcctccctccctctgaggcagctacagggtgagggtggcagctgagggagggtgactgggtgag

SEQ ID NO: 193451 - DNA, 461 bp, Zea Mays
gaactgctgccattttgattgttgcttggcaatcttcaacgaaaccccaagccttgcactggagtgctataatgcaatgatcacgtcatcaattggctgcaaggttttccactccgcgctggaggtcttgtactgtatggttgtcgagggagttatgcctgacaacgtgacgctatctgcgaccatgaaggccatatctttgtcagcttcgccgagtctaatcagctgccagatgctgcattcctgggtcttcaagctgggcttcgaagcggacatggttgtgtgctcctccttgatcagcgcatacgctcgagccggtcaggtgcacagctcccgctcggtgttcgaaagcctgcggagcccaaacgtcgtctgcttcacttcgatgatatctgcgtgcgcgcgacacggagatggcgcaaaaggagtggagctgctcagggagatggtttgtagggggc

SEQ ID NO: 193452 - DNA, 275 bp, Zea Mays
gttggccaaggtgggtggtcgttgcttgaggctccgaaactccaggacctccaacgtcactgacggcacgagtcgtgcgcaacgcacggcgcgttgaagccggcgcccgaatcggataggctcgacggcgatgtgatgataagtagcagatgaccagagtctactctccccagtcgagcgagagtgaagagtcgtagcggagcggagcggaactgagtgtcgatcgccgactcgaatcgcggaggccggtacccggggatgagggttcaggacgg

SEQ ID NO: 193453 - DNA, 538 bp, Zea Mays
ccgaccgtgaccacagcgcgatgtgcgacgagtgagggcggtggcgggggttgcgaccaacgacggagagccacacaaagaagcccgtcagcgatgttttcctcaaggttcgctcgctcattccttccttccttgtgctattggcgtgtgatcctagatagcgctctcttgatttcatccttatccacgtgaatcctggatcacactgcatgcagatcggattactggaaggccagaccagctgctcgcattcactggtgcacggtgtgggagctgagagctccgttcctatggtcgggctccacctctcttgggcccttgtgcagatacgcagaggtagtgtcccctaatttgtttgtcatgtcccctaatttgtttgtcagagctacttgaggatgtcaatgaggtatggctccgctggttcatcagtattcagtaattataaggcattatgggttagcatgctctctctcctactaagctagctaaatgtggttatcaggtctcaataagtatccatttttaaaagtataaattg

SEQ ID NO: 193454 - DNA, 424 bp, Zea Mays
cttcattccagctgtacctgtagacttccagtcctctgcaacctacaaaatgtcaggtacatgttcaaactgtctcatttatctttgtgacaaaatatagcagctagaattcatccaaatgactaacttccattctctcattatttctgaagtgcgtcgtcggtcaaccagcatggaagggctgctcacgcttgatgactggaaagaacggagatcagatgtggacaactcagaggacgagcgaaggcggctatccatagggtcactgaagaaaaaggcattgaatgcatcaaacaagctcacacattcactcaagaagaggggaaaaagaaaggtggagcatcgggcatcgtccttcacaatcgaagatgttagggatgagcaagaggagcgagccgtcttcaccttccagcaaaaacttctg

SEQ ID NO: 193455 - DNA, 580 bp, Zea Mays
cataagatcaaaagaaatctaggccataaggccatgtgtacccgtccatttgactgagcttcttccaaactccaagcttcggatctctgtacactctctaattcctcatgatggaacgaccacgatacagtaattcattgtgtatgcaacaatgcattcaatgagtaaataaagttgattaaattgtatgcaatataaccaagaaaaaatgaccaagtaacacgaatacacttatttgcttgaacaaagatcaatattatgaatataaaactttgtattcagaagctatatctctaagcaagcttgcatcatgctcccttgaatcaaaatgtcatttctatgtttcacccaaaattagctacaagtgttgatcagttacaactcccaaaaatgataactattcagagagcaccttaccttgtcggcatttcctctagtagctgttgaaaccatctgcctccctccctacaccactgttaggcccatccccacccgcggcaacctcagccaccacccccatggtctcgcctcgccgtggcatgagaagatgggcgcctgctctagaggcctcgcatgatcg

SEQ ID NO: 193456 - DNA, 549 bp, Zea Mays
ctgcggcgagagcgaggaaggctgagcgcgcggacacacacaggttagaacagattatttttgtctgcgcaatgtgccgcagcttttctgggttttttcactgaataaataaacggtgcttacacaggcttgaaagccctctaccccgtcgccatcgtgccccatgatctccaccattttcggatcacgcagatcatgtgcatgcgcagcgcgagtgcgacggggtcaacaaacaccaaggcggcttgtggtgccaggcacagcactgatcacccacaaagctacgccactaagactagataacgtaaacacaaatgttccaactagattacacgtgacaaaccttattcagactaacatatcacccccttaatcttgttggacttgaaccatccctagtcttgatctcagttccacaagtctgattcggctcaaaggctttgtcaggatgtctgcaagttggtgttcagttcccacatgctccacatccactatgcctttgtcaatgcagtcacgaatatagtgatatcgtgtatcgatgtgtttgct

SEQ ID NO: 193457 - DNA, 513 bp, Zea Mays
cgattttacagttggtttggagggagatggtgagaatttgaatttgcatggggcgatccctaatcataaagggaaacaggagaaaggggaagcgagtggtactgattgaagagtacaagctgaagggcagaaggcttcacgatcatctcaggcacttcctaagatgtcctacccaaaattctctagtggagatcctgtggttcggcttgatctgtgtatagattactttaccatttataagattcctgagtcgatttgggtttcatctgctgccatgcatttggagtttagtggtgctcagtggtggaagtgctacaaattgcagcatggaatggtgggatggcaggggtttgtagcagctgtgactagcaaatttggggcaaatgcttatccaagggctttgaggaggttgatgtccttaaggcagactgatagtctggattcctacatctctgaatttgagaaggtgaggtatggggttgtagttcataacccaaagtttgatgagatttt

SEQ ID NO: 193458 - DNA, 344 bp, Zea Mays
gccatgttccagcgtacattcacgtccctccgtaagtccgcatgcacctctccccatgtcgtccggtctgtcacaccgctcgaggggcatgggcgaggtcgtccttcagtgacagcggaggacatgtttaggccccacctctgccatcctctcatccatgaccttactggtctaccaccttctcatcttcccaatcccaccagcttccctcccacagtcccacctcgccctcctgccttcccgacgacattccctctgcctccgaccaccctccctcccacctagcacaccttccctcccgacgaggtaacctctgcctttgattccgttcgactatgcccgac

SEQ ID NO: 193459 - DNA, 454 bp, Zea Mays
tatgagagcaatcgccggtactgacgccgaatagggttgtgggagatgggagggagctgagttggggaggccttggactgcgggttaattacgaataaacataagtttttttttgcaaaagtgctacaatcatgtgggaggacacatggagaaacgcgtgctttatattcgtagagatagagatgtgtgccattctttattgttatttacatagagtttgacactggaggcatcaaattttccaggaaatagagttaaacaagtttgacgcatctagattctcccccttctggaatgaaatagtgaggaatttaagggaagaggattatattaataatttgtaagtattgcttcctatgttactatggcgcagttctcctgattgccatatgtcaatatggtttgactactatcctacttgcagtgaactagaattgcttttgatgcccaagaa

SEQ ID NO: 193460 - DNA, 373 bp, Zea Mays
tggcggttttcgctgggatgtggcctgatggctgtgcccctgattcgcacgtctacagcataatggtgcacgggttatgtggggcaggacgagctggagaggcggttgcgctgctcacagacgcaatggggaagggatttgtgccgaatgttgctgtatacaatgctttgatcgatggctactgcagtactggggacttggagctcgcaattgacatcttcaaggggatgcagagtaaagggtgcttgccgaacgtccgcacatatactcagctgatatgtgggttttgcaagtcggggaaagtagagagggccatggtactatacagtcggatgattgaggcaggtttagctccaaatgtggtgacatacac

SEQ ID NO: 193461 - DNA, 431 bp, Zea Mays
tcaagaaagcaaagatatacgttataagggggcagcggattcctcgccggtccgtcagatctgcagcggcgcgaggggtttgaatgcggatagtgccccatcacgtcagcgcgtcctggtcagcggatgctcgccggagtgtaatggccatctcgccatcaatcggagcaagtctgcttcacagagggtggaagaagatggttggacggaagtcaagccaaggtactggtggcgcaaaaacctaggaaatcttggaaaatctcagcagcagatcgatgcatcaagctccaacctgttcaaatcgaagcttcagggtaaatgtttcaactgcttctcaccaaaccactacgcttttcgctgctcggctactacccggtgttggctctacttgcaaaccggtcaaagggcgaggctatgccctaggaaagact

SEQ ID NO: 193462 - DNA, 574 bp, Zea Mays
ctcggccaccctgatctctatgaatacttctaatcccatccgttccctgcttcatcaaaggtcaccagagaccccccctttcttccccaaatctcacctcaccacgcagaggcgcgctcgcatcacacggcggtgccaatggcaagtcccggcgttgcaaattcacgacccaaactttggaatcgagtggtgctacaaggtgcagaggcaacaacgtttgtgttagaggggcttaccacccgaggtagcgaagacatgaaggatcgatggtgtggcgctgctcctcccagttgagcgcaccacggcgaccaacccggccctacccactgccacggatcacacagcaaccacgcccaggtgcagagcacccacgcgacgaacgctcccaggtggccaccaacggcgcgcaggatggaggaccgtggcggcggtcgtggtcggggttaccggcgcatgagtcccggccacatcgacgagaagtcctatcatgcccaaagccgtacacaccgggaagatcctggcacatagcagacggcctaccgacacccacaccgcggcaacccgcactcgctgc

SEQ ID NO: 193463 - DNA, 338 bp, Zea Mays
cattggggtcagcagcagatggagcacccccattggggtcagcagcaggtggagcacacccattggggtcaacgtcagtaaattcaggcacaagcacttcttcagcagcaggaactgaaggaccaacgtcccgatccaaactagatactcgccgaagacgtctctttttctttttctgctcatcagcagaaggatcaagttgattggctcggcaagggcgttttgggcgaacactgacaggtctctgaatatccaaggttgtatcagtttctgggagaggcgccaccaccgatgtcccagcaggagcagcatcagaagagtccttagctagcaaatca

SEQ ID NO: 193464 - DNA, 465 bp, Zea Mays
gcgctctcttgtccaagtctcttcttgtcactgcccctcacctcctatgccacccgaagtgcagatccatctggccttggattcgttcgaccataccaaatctgtgttgtttctcaaatccgattcagcctcagctgttgctgagatttgcatgcttggtggcagagtactcaatgtgctatttgatagcttgttgctctattttggattgggagttcaattccgcccagatctacatcataaaggtgatttgggtgaggtggagctttattttgtacagttagttttgtgtgtgtgtgggtgggagggttgcgatttgggcatgaagagatccttctgatttgagctatctgagctccagaatcatctcttgatgctgcctttggcgttgagtagatctgaactgaggcacccggctttggcattgagtacatctgagctgcattgtgagtttgtgacagcttt

SEQ ID NO: 193465 - DNA, 433 bp, Zea Mays
cgtgaccctccttccatccgctcctatgagccgggggaaacacgtgtggcagatgtggctcgcacgatggaagaataggatgagttcctggctgacgttcgacatcacttggagcaggcctaggcggaagtactatgataaggcgcaccgcgacatcatctatcaggtgggtgaatgggtatttctccgactccgccaccgttccccatcgtcactggccaccaatgtcgccggcaaactgaagccccggtactacgggccataccgggtgacggagatcatcaacaccgtcgctgtccgcctggagctgccctcccgtgcccgcatccacgacgtgttccacgtgggcgttctcaagaagttccatggcactccacctacgacaacacctcccctgccggccctgcaccatggcgtggtcacctccgaacct

SEQ ID NO: 193466 - DNA, 328 bp, Zea Mays
attttatgtatgctactctcaaaggattttctgtttttgatgatcgtgaaggaaccaaagatgagttaaggcttgccattgggaaatcagcatctgttcgggacacatcatctgttgatggctatgataatcctaatgaacttgattcaggtgaacgaagaatacaaaaggatctaggccttgagccaatcccctcgatgcttattcttgatgccatcttccgaaaatcttcgtcatccgtctctgtctgtgttcagcggcccaagtttcttgtggcacttgacttcttactagcagtaatcgaattctttgtgccatctgctcagag

SEQ ID NO: 193467 - DNA, 327 bp, Zea Mays
cggggatcggactgcctgtattccattccattgcggtcgccgtccatagatgcctagctgttgatcaatagatagatagatagattcaagattctcattctcccacaggccaggctccgatcgacccgcccccaccgtaccgtggtttttcataatgtgctgctgcccgcaacaacgcgcaaagcaagtctgcaaccacaacataataaagcgtttcaataaacgcatcatgcatgatgccgactttagtgtaccgtacccggcggacacacagcgagcaatgatttgatctcagggcgccacgcgtcactgggcactctcgggcag

SEQ ID NO: 193468 - DNA, 689 bp, Zea Mays
gccgttgccggcccgacttgtgcacgggatgggcagataagggcacacggtaaaagatcttcgccgacggtgagctggcgatcactccggtgacctccgtggccctctctccctctttgcggctgaacagattaactcgccggtgaccgtcgcttcccagctgtgtgccgcgtgtccaagcctttccaccacgtcgccatgactccttatacccgtcccatcgtcgacggggaggttgccacgacggtggacacgaattcaccgcgcaagcttcttcctcacctccggccgccgcgcgtcctcctcaaaattcacggccaccgtcttactctccctataaattgagcccatgactagctctgtgaggtcgtcagctaactagccaccgctaatcagccacaatcatctaccagcgagcttgaatttccaatttcccccaacctcgttctccgccgccgtgaaacccaccctcaccgcggccagccgtccccaggtctgctcattcctttttcatccctgttctagcatgcttacgtattggtgatgctctccgacccttccaatcgaaccaaaccgcccctaatcgccaggaacacggctgtctggccgtagggttcacggttgtcgtggccagtgctccttgggtggtcttagatgaaattgggttggggaaaaggcttagggtcgat

SEQ ID NO: 193469 - DNA, 291 bp, Zea Mays
gtatacatcagtacagagaagctatattgacaacataacagtgagagcgcaatgatggaggtagcgatgtggcgagaggggctcgagccccctttccactcgtaagcccatggaatccccctaaagccctccataaagtttaaaagatgtacacaatataatgtagaaggtagggatggcaattggacaggtaagacacatgtatatatagttcacaaactcatacccatgagacaaaacacgacccatatatgtacccatatgcgttcgtaggtatagatctgtagccat

SEQ ID NO: 193470 - DNA, 272 bp, Zea Mays
aatggatgggattgaatcggccaggagagctattcggcgatggaatcctgggctttggtttgttgatctgtggctgggattactgcgggtgcacccacttggcggggttcgattctggccgtcgatcgcatgatctgcgtgtaggattagattctgggttcataaaatcctggtcgtcggctccggatcgtgtggctggcgctgcgtaccgattcacagtcgcaccgatctaatcctcatcgtcgactgttgatccaacgaccgagattcac

SEQ ID NO: 193471 - DNA, 410 bp, Zea Mays
gagcttggtacccatcagtcgcatgagctcgcgccaaaacaacgaggtgaagatcgggtcgtggtcggacatgatggactggggcacgtcgtggagtcacacgatgtcagtgaagaaagcttgtgtgacaaattcagcgcagtacggatgcgccagggggatgaagtgaccgtagttgctgaacctatctgccaccgtcaagatggactttccccggatgcgtggtagtgcttccacgaagtcgagcgcgatgtccgtccagacaccctagggtacaggcagagggagaagacccgccgggtgaaggtgctctgatttgtacctttgccacgtcctgccagagcacaccaagtccagcactagctgcagcatcttaggaaaatgaaagtcgcggcgaagacgatgtagtg

SEQ ID NO: 193472 - DNA, 403 bp, Zea Mays
gcctttcaacttcgtcacgctcccctcacttacgaagcctccattgtcatcaacctttacgcttaggcatccagtgtccagaacatccggtcgctagtcctggttgttcttgatctgacctcccccaactacgctcattggtgtgaccttgtcttcctcaccttacatcgctatgcccttgactccgatgtcctcactgacgactgcctgtctgtgccttcctgacgtcgtatggatagtgtgatcctatattggatccttggtgctctcactgtcgagctgcaggacatcgtctgtgagcgtggtggcactgctccctaggcctggattgccatcgaggatcagttcctcagcaatcgtgagacttgtgccttctaccttgccgtcaccttctagatctttg

SEQ ID NO: 193473 - DNA, 339 bp, Zea Mays
cttcgtttccgctagccttctccttccagagcaaccgcgccattcgtctcctccgtctcgttcgtagtgcaacacatacagcctcgtctggtgaagtgaaagaacgacaagatctgtggtacggcggtgccggccgacatccacccactgtgctaccccttgcggttccagccagcgcagcgatcgattcccgctggccgctgccgtcggtgcctgcccggtcctccactcctcccgctactagtactagtaccagcacactccactgtccactccactgccagtgccatcccattcccatccgaggtaaacgcgtcaacgcgaccagctcacctcgtc

SEQ ID NO: 193474 - DNA, 580 bp, Zea Mays
cgatgaacttagcagagctccggtgagctcacagaccgaccgattggggcaacgtctagggtctccaagcgactgacacgaaattggatctaccccgaccttttcccctaacataatttcactaatggccacaaggtttggtctagccacggcgaccgtggacaaggcggaccgatgagcgcgttcccgtggattcatggcgatccagtacaattaaggggttcaggaagctttagaagagcctagggacgctagaacaatcaacagagaagtatgaagtcacctggaacaggctgaccatggggagtatacaccgcatggtgttcttggtggatttgggaagaataaaaaattagtgcttactggtgagggtttggggatacaggtaggtgcagtagatgctggaatccatggcagagccgaggaggtgctcaatttatagttcccgttgtcggtggtgtccaattccacgaagttgtgctggcggccggaggaaagcaggggtactggagcaggggatgggtggcgttcaccgtggcacttcctccggtgagcaccggttgaggagctacggcggtta

SEQ ID NO: 193475 - DNA, 272 bp, Zea Mays
aaagttttggttcatgtgaggtcgcaattgagcttctttgttgtttcccttgcatcagttggaactttatacaattattcaatcacagctcctaaaatcttccctctaattcctctttcttaactagcccagccttatctatggcttgggctggacggacacttggaatggtgctgttattagtggcatttggagtgcttggcaaagaggtggtctcacacttgctgcaacatggtacggacatttaaatgttcagtccacgaagggctgaa

SEQ ID NO: 193476 - DNA, 437 bp, Zea Mays
cttgatggttcatctaatctatagctctataggtatcaagtaaattgttaatatctaaaatagaattctatgtgttggtgttagtttttgtgaattggtcgctaattagttctctttcgtatttttgatattggttccatgtatcacttaactcttagttgatcttgaaatctgtgtatgacctgtttaaatgttgtcttttggagcatatctgaatctgatgcatctgccctgactcctgagcttgtgaaatactcctttttttcatgtcacattagctttgtcataagtaaaacataactatctttcaagggcgaagcctggataatttattgccagggtcagtactaactcacaggttggaaaaaataataccatgcataatatcaataatctataaaataaaagcaacatattacgccaaaataatctttcac

SEQ ID NO: 193477 - DNA, 410 bp, Zea Mays
tccggggcaagatccccggtgagatctggcggttggaggatctcgaggtggtcaacctcgctgggaactctctccggggcgcccttcctgcctccttcccgccgcggctgagggtgctctcgctcgcttccaacctgcttcacggtgagatcccgtcttccctttccacctgcaaagacttggagaggttggatctttcaggcaaccggttcactggatcggtgccgagagcacttggcagcctgcctaatctgaagtggcttgacttgtctggaaaccttcttgtcggtggcatcccctctggtctggggaattgcaggctgctccgctcgctgcggttgttctccaattcattacacggttcaattccagcagggattggaaagctgaggaaactacaggtgttggac

SEQ ID NO: 193478 - DNA, 1138 bp, Zea Mays
cgcttattgaagtatgtttgccagtcatgttattgtgctcaaaggatgacgaaaaatctgagtgcccatctgtatgactatgaattggatcaggtattctggctgctgattgatttgcccctgagctattgaggtttgcagaaccaggacgaataccaacaagcttttccacaaagctgctggtaatggatgtgtttccatttgggacatctacagctgctgattcagttggctttgaacagtgcacttctgtgaattcagttgaatggactggttgagcttctttaaaaccaggtggagtatcctcccttggaccattaccaaatactggaggtttggatggttcaagtccaaagagcccagcatttgtccagagtttaacagatggtacaacagtagacgtggtagaggcatttgctggaacaccttgagttgcacatctgtcatcgattagttcggtaacaggctcactccacgaactagacacttcactggcaccagcagacatagtagaggtatttgtaggaacatcttgagttgcacatatattatctgatggtttgttaagaggctcactacataacttagacacttcagtcacaccacaatcaccaactccctcatagctctttacagcataatcctgaggcctactttcaggaatgacacatgagtcatcagaggggtcaccaggtgaacttctattagcaggtgccatcttgaaacccacctcatcaactaccatgttggcaatcttaggtcccgatacaacattatcagcggtaccatcaataagatcatcatcactttttgcgtcaccttcaaggtttttgttggcaacagcagactctttgtttgatggaataaccatacaggtggagaaacctggttgaggaatctcttgaaaatacccaagatcatcatctggcttactctttggtatttcattgcaaacaggggaaccatcattggcaagtatggctgaatggacctgcagaggctctataatctcacaaggatctccacgagcaccctctgcaccactctcgtggatattagtgatgacagatgactctttataggggcttacagacgtataatctgaaagttctagttgtgaaacctcaagagaatctgc

SEQ ID NO: 193479 - DNA, 601 bp, Zea Mays
atactgcttttcccggagccatttctaccaacaagtgccacagtttttctcgccggtacagtgaggaagaatccacttaatattgggatctcagggcgagacaggtagctaaagtacacatttcgaaattcaatattcccctgcacctggggtaaggttgccccttcttgattggtgctggaggttgaacgactaatcatctcatatagtctataagcagcaatgcgtccttgctcgaatgaatagaagtttgtagctgcttgattcaaaccactacaaatttaaaaaaaaacatagataaggatatacatgacatgataatttatataaagcaaaacttctgtgtaattaagttgcttacaggccgctcagaattacagagaataaagctaccacaacttcaccaccatcagcttttccacgatggatcagatgtcttccaacccaaagttgcaaagcacaagagcaaatggcgagtccatatgtaaatccaagaccaattccttggacaaggctaatcaaaattccatatctaagtgtggcttgaagtgaggtggcataggagtactttgcaagagtctcatttgtaaaagcatacaga

SEQ ID NO: 193480 - DNA, 527 bp, Zea Mays
cggtgcttccaaatctcccaagcgacccaaatgatcaaggaattaagaccttttcttagactcttctccactttcttgatactttggcaccaccaatttgagaaacgagtgcatccatgctgaggcacaatggctaggaggcctaaattgtgtagtatggacgtccatatctgccgagcgaacacgcaggagacaagaatatgctggatggtttcctcggcctgatcacacagagggcaagcaactggatggggcagacctctttttgcaagtcgatcagctgtccaaaccctgtttttgattgccaaccatacaaagaatttgcatcttaagggggcctaggtctcccagacacgtcgccaagggccaaaagggatagagccaacaaagagagcatcataggccgatttgctataataagtaccatgagcagagaggcgctagatgtgttggtctgcgatgtcaggttgcagaactaccccatcaaccaagttccatagctgcagatactccactaggaccgttac

SEQ ID NO: 193481 - DNA, 290 bp, Zea Mays
ttgatgatacacctgaaacttcaagaggaataattggcctctgtagtgatccatctacaggacttttctatgcatatgatgaaagttctatattccaggtttgggacttttggattcttctttgagtcatgtcatcaacgcttcctgatttgaatagctaatgctatgagttatttaggtttccacttcagacgagggttgtgacatgtggcaagtttacttggatatgaatcattatgctgctgctttatcccattgccgtaatcctttccagcgtgatcaagtctacc

SEQ ID NO: 193482 - DNA, 312 bp, Zea Mays
tgccagccttacgagacacaatatctagactaccaaagatactctaacaagtggttggctgaggcggaagtggacgagagctcaatggtgggagaagacacagaggcggacgagagtttgacgtgagaggacaagtggtcaagcatgacatggtggttggctgaggcggaattggacgggagctcaacggttggagaagagtagaagacacaaaggtggacgagactacgagagtttgacgtgggaggacaagcggtcaaccgtggcatggtggttggctatggtggaagtggacgggagcttaacggttgg

SEQ ID NO: 193483 - DNA, 313 bp, Zea Mays
cgcgtgtcgtggagccttgccgaagttcagggacgtctggggatggcgtaattgcttgtcgtggtttatgcatcgccgcgaggttgctgggattggtggtcttcgcactccaacgcatcaaccgcacgtattgctgtatccatatactagttcgcactcgactctagatcgcgtagcacctgagtttgtggagtctggggcatggaaacaacgttggggcgtgggccggtgtgacctcagccacgggcgatggccgtctgccgtggctggctgtcggagggtagaaggagagtccttggcggtcggtttcttg

SEQ ID NO: 193484 - DNA, 572 bp, Zea Mays
aagaagatgaatgtcgtgggtgaggaagaatgtgcgagagctcgcattatcgaactcaaatgaactcattctgcattgcagtgatgatatgctgcaggagagcaacagaagatgcagtgagcacaatatcattcacatagagcaacgtgtagcactatgacggaacacaaacagtgaaggatcaaacttggccgcaacaaagccaagtgagtgcagctatgcagcaatccagtgtaccaggcatggggggcttgcttcaagtaagagaaccttgatgagacgacatggaaacaacttgaaggaggtggaatgaagagttgatagatctagactggagaatagaccgatctgcccccattgccatctgctcatgaaaatgtgtctcctttactgattgctgaaatgatctcaactcgactgatgggtcatgacacgccatcataatatgatttcacaactattcgataatagtggacgttaaaaaattgcctacgctactgtttgtgctcatgcgattaatcaattctttgggctataggttaactacttgacatcagtaacactagatttac

SEQ ID NO: 193485 - DNA, 512 bp, Zea Mays
cgattcttttctatgtttcatgtttatgaacttaatgttgttatgaattatgtgtttgtgatgaataatgtcattaatttattattaatgtgttttgatttatggatttgagtactacttatttgtttaaagtagtaacattgttggaggaatgtatgttaagtgaaatataaaaatactgagaaaataaagaaaactaaaaaataggccctaatttaagaaaatacatcatgagatctatgactggttcacttgacgaatctaggcctctgtgtgtgccttgttgacgttgaggctgcaccgctgtgaggtctatatagtggagtcatggctagggatggcgatggattggtttcgagcttatgtccgacgactttggccgtcgaagatcctatgttttaccgttgtggagcaagctagtacatgatatttataggcactaattaacgtagcaggcattcgaagtccatccatctccattaatggaatactaatggaggcatgtattcatt

SEQ ID NO: 193486 - DNA, 431 bp, Zea Mays
gtcgtgatcatgaccttgtataaatgacaatcatgcgcttgggtcaatgatgtaattccttcgcagtccagacctcttgaagcacatgacttgagggtctcctgataagtgagttgtcaaggcttcagggttttttgtcatgcgttatgagggtccctatatatgggttttagatacatcatggggcaagtcctccacacctttagggtgtaggtattagagcattttggatatggatccttcaagcacatagatgcacatatggttattgtcgcttattcccccaggttctcagtgaggctgagtttgagtctgcttaagtgcttaggcaggactaaatctacagcatatatgatgtactgtcaaagttattttaagcatgcttggttggaggcttaggcattctgcttggcaaaaaggcttcctacgag

SEQ ID NO: 193487 - DNA, 434 bp, Zea Mays
tgagtgtacatgttggtgctccatttatagacaatactcaacttaattcaaaccatgcaaggataaaagatcgaggttcccgaggtagtcgtcatatgactggtaaatttgatgatgataagtggagaaaacagtttttttctactgtttctggacgtaacctgctttctgacaatttttatcaacctgccttttctaatcgggatgcagtacaacatgttgggaacggatctgtaagaagtttatcacaaagtcagccattaagtcaatatagtggcgaggtgctctccggagctatgaaagtagtatctcggcgcagcatgtcacgtggatctgttgatgagagatggcaacatagaactaatgttcagggtatttcatcgccttctcaggtatctatgccaattatgcacaaagctgagaaaaaatatgaa

SEQ ID NO: 193488 - DNA, 360 bp, Zea Mays
gactccaagatcgagaagggtgttggggggagtacatcaaattctatcaaagagcttatcaacaacgcgactctgaattatagtgacaatcggttggtgttgcagcatgaatcatgaacttttttgactttgtattttgattattatatattaagtgggcaacaattccataggttaaaacatcccaaagctgtactagttatggatgaagttgatggtatgtctgctggagatagaggtggtgttgctgatcttattgctagcatcaagatatccaagatccctattatctgcatttgtaatgaccgttatagtcagaaattgaagaatcttgtgaattactgccttatgctcaacttc

SEQ ID NO: 193489 - DNA, 354 bp, Zea Mays
gtaatatggaatattacatggtttttattaggacaccagtttcttcctgtgctgacctccaaaatgtttcatgatgatgtgcttcttgtttaaagcattttattcttagtaatattgttaatttggtccagtttgtaacttccctttgctcgatgaatccccaaatttgaacatcctggtttactcgaataatgtagaaatcagcaaactttttccagggttttgacttatttctattttagcctgatcttgcacagagtgaggacgaggatattaatgctgaaatctgtaaattagaaggccaacttcgtaaagaggtactcataagtgcatgaacgcgtatcttatttcttg

SEQ ID NO: 193490 - DNA, 274 bp, Zea Mays
tccggtggttattttctattaatgtacaaatgtccttttaagatgtgtttggttcaggggatggtgactagggaaggggctatcccattttgaggggtttgattgcatcctgcccaccccaccatcacacacaaaagctgggacaggctgatcctgccaaaactgggtagactacgccatcctctcactccttgatctcttgagtcttgacatcatgggtcatgccttctaatccctccacatcactcaccgacagaaaactatgatcatctca

SEQ ID NO: 193491 - DNA, 281 bp, Zea Mays
taggaaagcgggtcgatagagagggtgtacgtggcggcattctacgggactacggggtgttccggtgtttgggctttggtaaaattcaattggccggcactgagagcaataggaggctaaagacaagctagaacaagagaaaaatgggcgagtactgacccgaggagggctgcccacgaagaggtcggtggcgctaagaactgtgaggaggagattatggcctatctgagtccctaggtggaattgggtattttgcgcaagcactcgtgtgtgtgatgtgg

SEQ ID NO: 193492 - DNA, 365 bp, Zea Mays
gttgtttgaactttcagagaacaaggctctttcagaaagaattggcagtgtttctggagctattcttatacttgttggcttgtcaagcagtaaagtagaaaactcgctgattgttgacagagctgagaagacattggaaaacttagagagctgcgaaaagaatgttagacagatggctgaaaatggtagattgcaaccccttctgaggctgcttcttgaaggtatcattctttcatatgtacatgtttcctcacaacgaaatgattttgtactcctttgcagctgtaacattgtgagtgccacccaatattctcattaacactgttccatcttcatcccatgaatagtagttgcatgccaaagaa

SEQ ID NO: 193493 - DNA, 726 bp, Zea Mays
gtaactattcatctttttttagaataaattgaaagccatagttgaagcccatccagagttgaagcaaagaacaattcaagagggcgatgcatttgctgctgcttgtggagaaaaggagccaagaggacgtgttcgtgctttgggtttaggaccaactccccaagatgttggtacaccagggttgaagtgttacacacccacaagactgcagatggaaggtttggcccgtaaaaaggctgaatgtgagaaagtagctcttcaacaacgcataactgaattggaggagcaaatgcaagaggaaaggatggcaagggaattgcaagatgtggaactcatttcacataatggttcaaattcacgacagaatggggtaaagtatttcaacaacttagttacattctaatggagttcagttcaatgctagtgaaatatatttgtaccctatgcagatttattctttatgtattctctctcttgtatgtttgtagagccgaaggtatgaagagcatgatgtggaagcgcatcatgacgctcaatttgtagaagatgaagattgtgcagaaaatcacatcaatcatcactgtgatgatggtgagcaacaccatcaaaacgatcctgttggtgcagccccgacagtgcaacaccatcaaagcagtcctgttggtgcagccccaacagtgcaatgccatcaaaacaatcatgttagggcagccccaacaattcaac

SEQ ID NO: 193494 - DNA, 277 bp, Zea Mays
cctggaggtgtggtacatgtgcagctccttcataccgtagaagagggcacccctgattcagggtaccgacagtggcccccgggcccgcctcaggggaggatgcgagcttgcaggtgggaccagagtctgattagcggtggaccgctgctcctgcgcgcctgttgatgcaattactgtcggtccgcctatggtcatgccgactgctacgcctattcccacggctgactgacccatgaccatcgtacttaatgtcactattgggccatgcgcgggggtg

SEQ ID NO: 193495 - DNA, 449 bp, Zea Mays
gtccccactccctcgaatcgcagctgctgcagcggagcaccagggtcttgcctcgatttgcggcgaaagcacgccgtttttctggtggtttgtagcgccgagcggttcttgattccggcgctggttttggtgctattgaggaggaggtgggggttttctttcgattggaggggtaaaagttgccgcctttcttgcattccactctgttcttggaccggatttcttctccctgcacgaactcgagctcgagctcggctcgggcttctccaacctccaacgcgtagtcccgtctagttttcttacatacaggttattaagctttttttttgtaagccttggtaatttcacttcaagccgtccctagtttcagagaagttcaagtaaatctgagtatatatggtcatatgttctcgcaggtggcattttagtgcttgcttctttcaagaact

SEQ ID NO: 193496 - DNA, 455 bp, Zea Mays
ttccccctgatctgcttgatctttgcatcaaccctcgcagtgaaaccaatctttgtcttctgcctggccttcgaccgctccctcttccacatcgtctggtcttcaacatctttctttaggtacttgatctcttgaatcacatggtgatcaagtggattgcacgatctctggtaggatatgtgtatcaggtaggggatgttgcaggcagcagtcaccagaagcgtcgctgcccagtatatgggagctggcccaaggacttctaataggatctggtagttgtcgccagacctcaatgtcatcccataggcgaggatgaagagataccaagttgttatgctgccccatacaaagagatgttgaatccatgtgaaatggctcattgttagggcaatctgcatgttgacagcccagatgatgcaggtgaacatggtagttcccaccgcagcaatgtctgc

SEQ ID NO: 193497 - DNA, 377 bp, Zea Mays
gctgcgttgcctcctcttttaggcttctcttcccgcccgctactggtcggagccttgaacacaatcaccgatctcctcaatcgccttccctccaaggcggtttcccatcccactccgttcttcgccctcttcggtaccacctcttctatgagcaccttcgtgttttcgggtgtgcttgctatcctaacatcttcaccatcgctcctcagtcctcacaaacttgcccctcgttcttctcgctgtcttttcctcgggtactcccctgatcacaaggggtatcagtgcctcgatcttctaacacaccgcatcatcatctcgtgtcatgttgtctttgatgagaatgttttccccttgctgactcctccccacctcccgac

SEQ ID NO: 193498 - DNA, 349 bp, Zea Mays
gtggacgatgaccggagcgtgtagaggggatcgacgctgtcacatcgggcgagaggggtccgggtggccagatccttcacagaaaaaccggtagggtcaaactcaatggaacaagaattgtcggtggtgaaccgacagacaaaaaggagattgtgagtgatgtgaggggctactagaacatcgttgaggtagaacggtccagagagtaccaaggcacctatagaggtgaccggaagagtggaaccgttccgaacgacgatcgaggtagggtgtgtgggaggaggtggatgtgagcgagagagcatgcctgtggtgggggtggtgtgataggaggcatcaaagtcgatga

SEQ ID NO: 193499 - DNA, 420 bp, Zea Mays
cgtgtggtgcaggactttgtgaaggcgtgcgccacatgtcagaggtacaagactgaccacctgaggccggccgggctgctctagccactgccccattccgtccagcgtgtgggccgacatcggcatcgatttcattgaagcactgccccgggtgcagggcaagacagtaatcctctccgtcgtcgaccgcttcagcaagtactgccacttcatcccgttagcacacccctacaccgccgagtccgtcgcccaagcgttcttcagcgacatcgtccgccttcatggtgtgccgcaatccatcgtctcggaccgcgacccggtgttcacatcgacattctagaccgagctcatgcggctcactggcaccaagctcttcatgtcgtcggcttttcacccgcaaacggatggacagacggaggc

SEQ ID NO: 193500 - DNA, 308 bp, Zea Mays
caaaaaggagtggcaagcagatgaagaatcttcccataggtctccattgactgtaacaaaattttacatggaagagcagctggctaaagcctatacaataaacatgttcagaaaatttcaagatgagttgaaagcaacaatgtattgcgatggtatgccaattaaagttgatggccgacttgttacttttgaagtgaaagaatgctcatacatggaagatggaaaggacacagagagcaggacctatgaagtttacttttgtaaagaagaacccaaagttgaaattgagtgtgaatgtggtttcgttc

SEQ ID NO: 193501 - DNA, 348 bp, Zea Mays
tcagtggtagcaagccggtactagtgggtgatgccctcggtgtcattccggaatctgactgatagtctgtctggtgctgccagtaccagcctctgaaccctgtggtgtacgatgagggactccaggcagctggcgccttttggttgtgcagacttcactcttgaggcttgagtgagggtgcatatgctggtcaaattactccgtggtagcaaacaattatattaattgcctcctaatatcattgttttttgtgaatcatgctggctgatcgaacttggtagcatggatgcaacattttactggtgtttgctaaccttattactcttaattaaattgatggatctcgag

SEQ ID NO: 193502 - DNA, 295 bp, Zea Mays
cccgcccctatataacccagccgctcccgctcccttatccatatagccgagaacccagccaccaccaacgggaaccgtagacggaaaggggcagggggatcgccgccatggaatcctgtctgcaaagctatccaggccaaaggaactggccatggaggttcgcgggttcccttggaatctggtcagggcctcaccaagtggattggatgcctgtggtattcggaattgctcaacggaaagtatggccaccaccatgctgcgggtcctcgtggtcttgatcctcggatgctccaat

SEQ ID NO: 193503 - DNA, 297 bp, Zea Mays
gtgccctcaccgacctcgacccctccctgttttaccaaccttgtgcatgtccatcagcgacgtgcacgggcaggtgcctagctctgctcatgggcttaaccaatggtgtaccatcctactattcttcatcgggaccctcgccacatacactcaatggtgactcgaaaggctgctagggttcttcgccctgtcgactgtgttgtcctttatgtgacatcctctccactggtattcctgtgtcgtcttccgttcatagcgccctcacagatcctcattggcgttgtgctatggaggaag

SEQ ID NO: 193504 - DNA, 614 bp, Zea Mays
tacgtttacagctgctgatgtgcgctatgtataggttggtacgagagtcgtgtttttttggtcatactttgcatatgctgtttcatgcatgggttccgatgtccttggtcttatgtttttccttcctgttttaccttgtagatgggagacgtgttgatcccggagctccagcgtgggaacacttctgtgaccatatgcgctcgtgtttctcgtttatgggatttctgtgatcctcaggatgaagcaaagttgctccattgtgatatggtgctgcttgacgaagaggtacaacatctgcacgattatctatttcgtaaagggaagctggcattggtatgagattaattgttattatgttgctgtttcctccatcgctgctttgtgcagggaaacggtatccatgctgcaatattcccaccagtcatacaaaagttcaagcctctgataaaggaaggagtcgtctacaacatcacatacttccgggtcagagcctcgaacaatttgtacaagcctgttttcaatgagaacatgattatctttacaaactggacaaaattggaggaggttgttgaggttcctccagcatttcctgtgcttacctactcactcacacc

SEQ ID NO: 193505 - DNA, 324 bp, Zea Mays
ctttttcgagtttgtgtctaatcctcctgcccgtgatggtggtctgggtcttagagtgcgaccctcccctgaggacattgaagctttaattgccccactccggagtctcccagagggtgagagacagactcatttcgagatgtcagctagcacggatgacgaggagatagatgttgttctcaacttgttggctggggaatcatctgactcgtcacatgctgagccaatggctatcatggacgggcaagaacttgttggaatggagaggatacgaaaacccgaagaggtccgtccaaagcatccacagcgagcgagccgggctac

SEQ ID NO: 193506 - DNA, 671 bp, Zea Mays
gtttgaggctcgactccaacgcaaccaggcggagatgcagatgcatctcaattcctcggccaactacgctcgtcgcggcggcaacaacttgcgtggtcgcggtggccctcgtggtcgcggcggtcgcggaaactactcgcatggtggttcttcgtcgcgtcctacagatccgcctggtgctcgacgtcctgccaccaccaacaacaacagccggcccctttgccagatctgtggcaaaataggccacactgcggtacgctgctggtaccgtcatgatgactcctacaacgaagatccaccgatggccaatgtcgcctctacgttgccttcatacaagcttgacaactggtacggggacacaggcgccacagaccacatcaccaacgaacttgatcgccttgcggtccgagaacgctacaacggcaatgaacaagtccaagtgggcaatggtgcaggtttgaaaatttcacatatcggtcactctactattaatactgctgcacgtcctttatttcttcgtaatattcttcacgttctggggattaccaaaaatctattatccattcatcgtttcactcgtgataatgactgttattttgaatatcacccttggaattttttcataaaggaccggcaaacgaggagatgccttctggaagggcaatgtgaag

SEQ ID NO: 193507 - DNA, 280 bp, Zea Mays
cagattgaagcggagaaggagaggaggaatgtggaaatgaacctttctgttgacaatccacatgcatggggagcccttatgaataaagataggaatacagagcaagatttgactgatatgattcataaaaaacttgtccttcaatcacagcagtcccggggttttcctgatgtttctgttccggcatcatttcgacgtaaagatcactttgtgcaacctgttgtggagagccctctgagatcagtggacatgtcgtttgaggagtctctttctgaaaggt

SEQ ID NO: 193508 - DNA, 363 bp, Zea Mays
acacaacatacagcagatgttgtttcacttttatctgagatacgtatttgtagtggaaagaatgattggaacggtattaggacggccaatgttcctgcagttatggactcagcagcagcagcatcgggagccaaaaaagaagcacctgacttcactttggaagtactctctactgcagtagtgagtgcaactgtgaagtgcaatcatgctggtgagattgctggtatgagaaggctgtttagtactatgggaggcataaacatgggcatgtctcctcctgggacacaatctttgcacccccatcagtcatttgatgaagtttttgtctccaagtttgtcagtcttcttcagaactttgttgtt

SEQ ID NO: 193509 - DNA, 377 bp, Zea Mays
tggatgcaaagaacatggatattgagaatctaagaggtgcgatagagtcaagagaatctgccatgacagatctcagagagcatgttgaacatctattgtcgtcgcaggttgcacgtttggaaaagttgcaagtagatattgttacccttaatgatgaaaaggtgaaattagaaagcatgttggaagaagccagagcttcctgggacactcttgctgattcaatatcaagccttactcttcctattgatcagccttttgaggggcctatggaaaagtttagccagattgcccaatacatccaggaatctcaagttgctaagagttctcttgaaaatgagctacagaaagcaaatgagcaaattaccttacatgctagc

SEQ ID NO: 193510 - DNA, 505 bp, Zea Mays
gtgaggctcaccgcgaagacgtgtcgtgcgtgagcagtttccatacatttgtctccagctagccgcaagccgtttaattgaaaggttccatcgacgacgtcgaaaaagatccttcagcgacgattaagcgcattgtttaatatacgacctcctcgaacacagtacatgatatagtagactgataataccaatccaaggacaaatgctagcgggtgttagtaaaactctattttagtttatgtatcgacaactgctggatacggtcttatagcggatatgttttaggagtcaaaattaccacataatttatgttacacttgtctaaggttaaacattcaaatctgcaaaccaaacatatgcctaaccattcaaatctgtctactcttaggcaacaagtaagacagcaaaccatacagaccagcatcccgacaaatctcgtagcaagacgtgacgaatggtaagatagagagcaaacaaaataagagagatagtagatatattcttt

SEQ ID NO: 193511 - DNA, 406 bp, Zea Mays
ctagtttcggccttgcaggtgcaccgtaatcgcgtgtgcattgcatattggtcaggtctggtctttggccacttggacagaggacgcagcagcgcaagatttccaagaagatcaagcgtaatttctcctatggcagtcaggtcattccctacgcaagagcgtaatgcatgcggccagaccggaatcttcagcagaccgggggtgcatttgcatttccatccacctcaagtcccacaccatttccatgaaacaaacgggccccttttcatgagaagcttccgcgtgtcttgtcatccggtgacgagggacgaggagcttgactgcaacagcagtgcctcgtctgtctctgggaataatacaagagagcaatgtgtcgtgtaggcatcagttaaaccctacagaaaaa

SEQ ID NO: 193512 - DNA, 942 bp, Zea Mays
gttgttgatgaggaggaagtacatgctcaaggcgcttatatgcttttatatagcaggtaattgcagttctaattattttgatgctgcctatcattgtcagtgttatgttcttgtggggttgggtgcattgctcacttatattaaagccttacatttgtacctcacgagtccaaatctatttgtcaatttctgcttgctctgataatatggtcatttttgctgttcttctgcattggtactgctgctcccaggattgtgtgctttgttttatcattggcaactaaatataattgtactgtactgaccgggaaaagattcatattgcctgttttgggaagtggaagatatagatcatatgcagccaatgggagatatatcaaacggacctaaatccttttgtatgaactatcaactgtgataatgcgcaatgtgacaagcacatagctcaacctgctttccctatgtttattattgattgttatggtttctgccaaacaactaaattgctatcataattgtctaatcatcactcttttgggacactattgttttcattctaaaatttacatattttctccattgtgtcaattttttttattatatattgaacaagttcttgtcaggttgctgtaaagtgtgctatctggactaaagaactgacaaacttccattaccatttgactctgcaggagaacagctcgtcctaggtcacttcttacagttgatgagtccgtgaaacagcaacaacagtgcaaatcgctcctttccaatgggcaaagccacatgatactagcagatacaacattgaactgtgaatcatctttgaagattccagaagatatgttacaacaggattgtgaatccaataatgaatccttgcatgaaatgggtattaaggaccaggagtcagacatggatctacgtacaagcattgaagatgac

SEQ ID NO: 193513 - DNA, 813 bp, Zea Mays
tatcccctaggaactgctcgttttgtattagctggattacatctgtattgctccaggaaaggcctaccagtaatccttgcaggagcaccatccactttcaaaccggtgaaaccgaactctatccctcagaataataacacggcaaagtacctttgagattatcttcatccattcatgacagtcactgcaaacctgcaaattctttgaaaccattatttctgtccctggaccagtcttcaggacactataagccactgctagcttctcactatggaaggtaaggttttcttctctttcctcttcggagacatcttttgttactagttcagtcaatggagcataaccttcaaccttagctcttctgcataatccatgcagcactacgtatatatcctcggtgtcaggatgagatctatcaccagctttaaattcatgggtgcttccccctaactcaacccaactcaagcctttggtcttcctaactttcttttgtttcctctgtttccatacttcctctgaatcattccatctatttgctgatgaatagatgtttgaaagaagggtataatccccactgccatggcatgccatatgctcaatagtggcctcacctagttttgtgtggcgatatctgcgacaggcgctaagtaatgccctccatatcacaacatcaggctttacattcatcgacattaccaactcgtatgcttcatccagcaacccagctcgcgacaacgtatccaccaaggcaccgtagtgctcaacctctggcgtgatagaatactctgtagtcattgatctgaagtaatgccg

SEQ ID NO: 193514 - DNA, 334 bp, Zea Mays
gcttgtggtgctctggcctgtgcaagatccgtctttaatgagatgctagttaaggatgttgtgtcctggaattccttgattggtggatacagccagcacaatagacttaaagaggtattgacattattcaagctaatgcaggctgaagaagtgcaagctgataaggttacaatggtcaaggtgatttcagcttgcactcatctaggagactggagcatggcagattgtatggttaggtacatcgagcataatcatattgaagtggatgtgtacttggggaatactttgattgactattactgtagaattgggcagctgcaatcagctgaaaagg

SEQ ID NO: 193515 - DNA, 541 bp, Zea Mays
gtctgccaggggaatggattgggcatcaacgcgagctgaggcagggtgatccactatcgcctatgttgtttattcttgtaatggatgtcttgaatctgcttgtgcagcgagcttctgaggaagggcttcttcaacctctctcttcaaggaatatgcaacaccgtatctcgctgtacgcggatgacgcagtgatatttctatgtccgactgccccagacatcagtatggttatggatattcttcatttatttggttcagcttcgggtctaaggactaatatccagaagagtagtgtgttcccaatctgctgtggggaagaagatttgaattgtttacaagacttgctgccatgtaatatttcagattttccatgtaagtaccttggtctgcctttgtctcccaagaaactcacaagggaccaggttcaggccatcgttgatagagtagatagccttctaccaggatggaaagctgaacttatgaccagggctggtagagctattcatgtgcagtttgtcatgacggcaaagatgatttatgc

SEQ ID NO: 193516 - DNA, 458 bp, Zea Mays
ccctcaatatcatagaaacactatttttagtttcaaaggcatacctaaattgtgtttatgtccactcaagtaaaacaccacacatcaatatgacacatcatttctcaaaataaaataaagactatggaaaatttagccaaattgagagagagaactatccaaacatatgttaaggttgtaaggcacctttttccactaggctagctaatgaccttttgtgatacctgggctagctaatgaccttttgtgatacctggtttccaataatcccctctattcaagggatacctagattgtgtttatgtccactcaagtaaaacaccacacatcaatatgacacatcatttctcaaaataaaataaagactatggaaaatttagccaaattgcgtgagtgaactgtccaaacataggttaaggttgtaaggcacctttttccaccatacagttgataaaaag

SEQ ID NO: 193517 - DNA, 336 bp, Zea Mays
gtgaaggtcttctcccaatccactcatcatagggagttttcttcttattcttcctgggaactctatttaggacatgacatgcagtcaatactacctcccccaccatgccttggataattcagcaatgtcaaataacatgatgttaaccaagtaagccaacgtgccattcttcctttacgtgactccgtttgattaagtgaatagagaggcgccagtgaatagagaggcgccctctcatgtataataccttgttatgcacaaaataagtcaaaatcactagagaaatattcatctcctcgatcaggcctaattatttttaacctttttctcaagttg

SEQ ID NO: 193518 - DNA, 386 bp, Zea Mays
ggcactcgctggtgctggtgcggttccacttgatgcgttgacgggtgtgcaggcacaggggtgtaggcgacgacgcaggggcctccagtctccactacgtggcaaggaagttggcacgcagactgggcgccctccactgtgtccgttgtgctcccccgtggcaaggaagttggcgcccctccactgcgtgtatggagcatcgtggaggcccaaggcggacctccatgcggcaatggttggggtcgacggtgcggcggctgcgtgcgagagaaggtgtagcgtgtgaggcgaggagatccaaagtgcgaggaccggggaagggcaagggcgttgctggagagggagcggttgctgtgtgacgctcgcgcggaggagagggtgaggag

SEQ ID NO: 193519 - DNA, 301 bp, Zea Mays
tttattataaaagatgggtaggttagggcaagaggagcatgtgttaagaaagtttatggtgataaagaactccttgttgggtggtaatgcatgtgaagatcgagtttgaattctctccttccttgacgaggttgatcttgtccttttccagtcttgctctttggtgtctccatccgggtttgggacaagaggctaagatagatctgttatgtaagtcaagttgttgggtatggccgagttgatcttggtcaccagtttaagcttaagtggatttggagtatggcttaatcctttgtaccag

SEQ ID NO: 193520 - DNA, 418 bp, Zea Mays
cctaccttatttttgtttgcacttgtccctatgtaccaaagcttggagttgatattgtccacctccttcgttttctgacccttctatttagtcttttggacacataagataaactcttagtcgctgcttcaactaacttctttaacttaccagtaagcggccctacattccaactacctaaatggtcgactaacttctttaccttttgcacccgtcaatgatgtgaaggcccttgctcatttttcactacattagggcgatgatgtagcgcgccattaagaaagcagcgatccgattcttgctcatttgacaccgtgcccaaatcacgacacaatttgtcaccaagagggtgctgatctggcccttgcccatttagtaccataccctgggttccaatatggtgcatcgctaaaagggt

SEQ ID NO: 193521 - DNA, 286 bp, Zea Mays
aaaatgtgtaagccgtgacgacgacataggtcgcgtgggttgtgtttctttggtgcggcccaagtagctgccaggaggccgcacgcttcttatcctgacccagcttggctttagggtcagtctcccttgctttctctgcccagcgagccctcgccctctagctcttcctgctagcgtcgtcttcgtcccgtgctctcctgttcatcgtcgatctcagccatctcaggagcacccgctcactcccagacgcccgcgcaaaggaatcccccacgatctccctccaaac

SEQ ID NO: 193522 - DNA, 533 bp, Zea Mays
attttcaactgataacattttttcaattaacaacgtgaaagttgcattcgtcatcttcacactatttctagcacaagtcattggccactccataaattattccttttgtgtagccaaagcttttaatgtgcacttcagacttttagccattttgtattgactaatgtgttacatgtcgtattgcaatgcattagcatatgcctttactttgcgctggtattctttgtgtcatcttgctctaccttgtaacattactgcatcttttattatcttatatctactttgtaatgcatggtgtattcatcctttcattgactcatttcaccatcaagaggcacccaaagtttgtttgcatgatttatttttaacattggtctaaatatgtattttgttaggtgatatttcattttacatgctgatgtttccgttatttcctatagtctttgcacactgtgctatccttattccttgtaccaaattttttgaagcaatgattagttgcagaatgcagatagttatttgttcggttcctg

SEQ ID NO: 193523 - DNA, 331 bp, Zea Mays
caggaatagctttgatcttagtataatgaacttgacccagtttaagaacaaccttattcttcctcgctttttgctggttacctcgagggagattcacgagcgacaaccgctcattcactagcttaggaaagtgacaatcttgtgtagagtgccctgacttaccacaattctcacatgaattaacattgtctgaaatatctttagaacgaatgtctggggcatccggctcatgtggaatgaaaggaatgacaacttgtttttcacatgactgaggagagctagacagctggggtggagaagaacgaggataataaacagattgataaacaac

SEQ ID NO: 193524 - DNA, 558 bp, Zea Mays
cccgcttcgtcacaaatctgaggtgcaccaccacatgattgaattcattgcatacgctcagaaccagttcggcaccacgcctaaatccttccaagccgataatgggacagaggttgtcaaccacaccaccacttcctccggactaccaacaacaccatccgcaccatgctcctccatgtgtccatgccacctccatactgggttgacgccctcacaacagcaacatacctcctcaataggcgcccctctatacaaaaccacatacctcaccaaatacttcacgacacactcctagattatgcctccctccgcatcttcggatgcctctgctatccgaacctcactgccacctcctccaacaaactcgcccctcgatgcactccttgtgttttcctcggatacccatcctcccacaagggctatcgctgtcttgacatgtccactcgctgcatcattatctcgtgccatgtcattttcgatgagtcagtgttcccattctcgactgcaccatcggcgggctccatgccgttgtcacttgattttctgatgcgggacctc

SEQ ID NO: 193525 - DNA, 415 bp, Zea Mays
gcgatggaaacagcgttctgcctggctagctgccggggccatgaagtaagttttgcttgctgtggcatatatatacataatgtttcattgataacttaatcacacttaatctgttccatttttcaaatcaagggtgatattaccgatcttgcagtgagttccaataattctgtggtagcatcttcatctaatgatttcattattagagtggtaagttcagtagtattcattcttcataagtaaactgccataacatcatgatgttatttcttccctttaccttgaatatctccttttaccaatgaagtggcgtatgcctgatggaatgccagtctcagtgctcaaggggcatacaggggcagttactgctattgcatttagtccaaggccaggtgctgctttccagctgttgtcg

SEQ ID NO: 193526 - DNA, 625 bp, Zea Mays
cgacggtgaggctcgtttcacggtggcggagaacgaagttgggggaaattggaaattcgtgcgtgctggcgggtgatcgagggtggaaatgggtgctacagcttcacgacgacatggcgcagctacgggcgaggtcaatttatagtgctagcgggcggtggccgcgaattttgaggaggacgcgcggcggccggaggtggaagagagtactggtgcacgcgagttcgtggccaacggcgtggcaacctccccggcgatgatgggatggcccaagggagtcacggcgacgcggtagaaaagctaggccacgcggcggaggaccgagacacgatgattcaccggcgagcttatctgctccagccgtagggtagagggggaggcacgggaggccgtcggagtggcgtccagctcaccggcggtgaggattcccttaccccgcgatgttatccgtctagctgagcacgaatctgaacgccggtgacgcgaatctcggcgggggatcgtcggcggtgagagttccgcgctggcagcctgatccaatccagggtactgtaccatcgcgagtttcagtcacatgaacctgacagccaatgttgaactcgaatttcctccaaatttactgtgg

SEQ ID NO: 193527 - DNA, 432 bp, Zea Mays
cggttgtcggcgatggcttgtttggacatctatactctcaaatctcttctctttctcctcatctcctctcatccccttccctactctcgcatcccgaaccctaatccccatcctagcaccctcttagcccaatgaacgtgctcctcctcctcacgctggtgctcatagccactcaggtgactcaggtgctctggctatgcaggtgagttcaagtcttccagatcttactctttgtaccgtgctcctcctcctcgtattgttgttcttctccagatcttgttttttgtaggtatcattcttgtgacgatgcttcttagctgtcgagggatcggagtcgccgacgaggagctggacagatagtggggcttcattggtctaactttctacggcatggacgatgatattgatctgtccgctgtggaggaggagcac

SEQ ID NO: 193528 - DNA, 281 bp, Zea Mays
gttaggcgtatccggtgatcgctggagggaccgccacagtgaaagccactaagcgcttgcgccagtgccccttttcttctccggccgccgcgcgtcgtcgtccaattcagcggccaccgctcacggtctctataaattgagcgcactgcgagcttcataggataattatgtatccatagcacccacgcttgcctcgaatcatcccctagaactctccaatttcccattctccccaattcggtttctgccgccgtgaaagcatcctcgtcgtggccagcttg

SEQ ID NO: 193529 - DNA, 401 bp, Zea Mays
ctgcgctggctcccatgggcggaatatatcttcaacaccgcttttcagtcatccctgcgcgacacgccgttccgcgtcgtctatggccgcgaccctccctcactacgctcctacgagcagggggcaacgcgggtgcctgcggtggccaggactttggaggagcgcgcggagttcctggcagatatccgtcaccggctggagcaggcccaggctgtccagaaacatcattatgatcgtctgcaccgtgacatcgacgtgcaggtaggcgagtgggtgctgcttcgtctacgccagcgcccgactgcctccatgcccgactcgtcggctggcaagttgaagccgcggttctacggcccttaccgcgtcgtcgagcgcatcaacgacgtggctgtctgcctggc

SEQ ID NO: 193530 - DNA, 504 bp, Zea Mays
aattaattcactgcgatctctggacatcacccatcaccagtgtatctggccacaaatactaccttgttattttggatgactgctcccaatatttatggatatttcctttacgcctcaaatctgacaccctctccaccctaaccaatttctttgcctacgttcgtacgcagttcggtgtcactatccagagcatccagtgcgacaatggtcgcgaatttgacaaccttcaagcccgcaccttcttctcctcccatggagtccatctgcgtatgtcttgcccctatacttcacctcaaaatggtaaggctggacatgttatccactccatcaacaatatcattcgcaccctcctcattcaatctagtgttcccccaatttttgggatgcggctcttggcactgcaacctatctcctcaacatattacccaccaaaacacttgcactctctacaccacactttgctctcttcggccacaacccatcctatgagcaccttcgtgtttt

SEQ ID NO: 193531 - DNA, 485 bp, Zea Mays
ttggggatacgaatgttttttatcgagtccttgtttatccggtaggagagggattcggagatttcaagaatctggctcttaattttttcttgtaatctctctctttatccctaccgtttggaagacatcgtgattttttaatcgcgattttcagaatccacagggattcaaagttcaaacggggtccaaaccttcccgacttccagtacagtcttcctcagacgaggccgcaagacaggaggagacaacgccgaggcagccagctagggcgcggtcaaccgcaggtacacgcgcttcttccgattggtcgagcctcagaattcccgcctgatcgttctggcctgctaagtttcttggttagaacattttctgtaataagccaataagcaagaaccttttctgcagtaagccaataagcaatgcagtagtgggcgcagctccggaggagtggaatgacggcgccaccgaatgctagcatgggaccg

SEQ ID NO: 193532 - DNA, 470 bp, Zea Mays
ggatttgatttggaaacaagtactcaagcctaggtgcaaacctcaaaactagttaaccactgttgtcccagtgtcgcctaggagtccaggctgctggcaacggacgccatggtctgtcgcctcacctgaagccagctaggcgggcgtctggctgacttagatgatgccacggtgattaggtgggctcccaggcgacgccgtgccaccgcctagctgctgaagtatgctccattgtgtcatatgtgtatgccttgtgccctatgcgtccaagtacatgtttcctcttctttctttccctgctgccgccacaagctctattagccgctgatgcaacttcgaccaaccttctccagctccttgctccccaggttgcccacccgcccgtgcctggagagtggagaccatgatcttttttggtctcatgttgatgaagctattagtacaacatcactacattgccacaattttcc

SEQ ID NO: 193533 - DNA, 405 bp, Zea Mays
aaagtagcgaaaactgagcttctggttggcacgagagaccagggatgtttggacgtatggttgaagcttgacaaacaccaaatcccccacttggaatgtgcgatcggaacgacgcttgtccgcttgatgcttcatacgctgtttggcacggtgtagatgttgctgcaataacagatggatacgctgtttgtcttggatgaatgcagccaaatcagacgaagaattctccaatgccggaataccgaaatgccgtgggacatagccatagagagcttcaaatggcgatctgtcaatagaggaatggtggctagtattataccaaaactctgctgaagctatccaattagcccacttggaaggacaagagtgtacaaagcatcgtatgtacgtctcgaggcattgatt

SEQ ID NO: 193534 - DNA, 485 bp, Zea Mays
gcctaccagcttaccgcatctcgcacgccgttcacgacctccgcctgctccgcaatgaatccccctcacctcgctctgcccgcccctcctccctataaagcctagctattctgctcacctcgctgcgccccgacggcgccacaactccaccacctcctccagttacccgacatcggtgccacgctcctcctcgccatgtgtgactcctactccccgtggccaccagggcgatgtggtggcgtccgctgatgcgatcgctcctccgcctgtgtctggcgccctggccaacgcgtcggtggtgccagtcgcggtgcggatccacaaggcagggcgaagtcaccgtcaagctctcggtcgcgcctggccgggctagccgcctagctctttcccgcctcccgtggcctgggcgcctggctagggccagctattcaggcgaccaaccgcaccaccgtccccctaccttccacgttatcgtcgactccgac

SEQ ID NO: 193535 - DNA, 1324 bp, Zea Mays
ccgccgcctgcgtccgctgcaactgagtattcatattcaggtggggcccattaccttagtgctttcccggagtcggttgggttcactgcagtctcgttgtcatctccggcgatgggcatcccggctcaaaatcccatctttgttgtgacagagccatcaacgttaccgcctcatcaggttgctcctgcttatgcaacaccgcatcagccgcctcaagtaaccacttatgtgcagcagcagcctcaagtcacccattatgtacaacaccagcatcctcagtctgctgcttatgtgcagcaggtgccgcagtcgtacatagagccacagcaggtacaatacatcaacacccaacaatttggtgggcatggggtgccgcaatctgtcaattacgtgcctgtgcatatgaaccaattcatgcccagcattcctgtgacgggttctttggccaccactgctgctcaaggcagtacgttcaggcctgcttccgcaggtgcagaaccagttctggagaccacacagttcacaaggccagtgcaagctcaggttgatcatagttaccgggtggtgcaaactccgctatcacagcttcctcctttgtcttctgtgcatcagcaggcaaatgatgcgcagaggcagaggtttggtgttcaacaagcgatgataagtgcagtaagcatgccagtggtgaccagttcaggcacaattcctgtggtggttagctcggccactgttccatcattgagatatgatgattgcacaatgtgccaaaaagcattgccacatgctcattcagataatattatccgggagcagggaaattctcgtgcaacaggcaaccttgaggcagctccaatgttttatagcccccatcaagacagtggatccaacaaatctagtctaggtgcaagttcaggaactcctacaaactatgtggcggaaccaagagctgggaacacagcagtgatgacacaatttaattcgactcttcctgccagaaaacctgcagttcaggcaactgcatctccggatacaggtgtgccggttcaacccaccgtgattcctttaccagtgtccagtgcacctgctccagatggagtatttgtcggtcattctcctcaggctggggctgaagatcctgtcaggtaccagcagcaactattctcttatagcatgcagccagcacaagttctagtgaatggcccacaaggcattgatgccagtgcatacaaggattcaaatcatccagcagcggaaccgctgagagaatatgcacacaatcttcttcatgactatgccagagctatcgatgttcatacgcaagcag

SEQ ID NO: 193536 - DNA, 580 bp, Zea Mays
gtgagacagggtgggataagtgtccgacttctgacgtaaaggaaaagtccacaaatagtgcgagaagtcatcgagaatgagtaaatagtacttatagccagaaatgctgattacaggggatgtccatacatcacagtgtatcagataaaaaatgcctgctgccctagaagaggaggtggggaatgggagcctaacatggcgacctaactgacaaagtgacaagcatgacagaggtgctcaaaagacccctacaaccagaaacagaggtactactggagagcttggacatcacatcacacccggggtgaccgagatgacgatgccaagtcacagaggaggcggccgctacaagaataggcgggggcagaggtcgatgtaggggaagcaggcaggcgaagcgtgtagaggggaccagggctgtcacaccgagcgagaagggtcctggtggcaagatccttcacagacagaccaaacgggtcaaactctatagaacaagagttgtcagtagtgaactgacggacggaaagaagattttgaatgatgttgggggcgacaaggacgttggtaacggaaagggcgg

SEQ ID NO: 193537 - DNA, 384 bp, Zea Mays
cgatgttgtgtatcaaactgatggggcggtagtcacccactgtcaaagcatctgacttcttggggataagcacgatgttggcagagttgagtaaacgaaaatccgccccattcatgctatgaagttggtgaaaagcctcaagaacgtcctccttgatgatatcccagcatactttgaagaataaacctgtaaagccatccgggcctggtgctttgtcgctcggcattgagaagattgtttcctttatttcttcgaggaagaacggcgcttctagcgatgagaggtcatgctgcgctaaagctagagtcggccagttgagggtgatccctctctccggggttgtccctaggtgagatttgaagtgttcctgaatgatcctttctt

SEQ ID NO: 193538 - DNA, 567 bp, Zea Mays
cctggtgaaggtgagatactaaagagcaccggcaagactgtggtagacaatggggttgttgatagggcaccatcactggagaccttggcttgtataccaaccggtgtcacacagggcttgtagtccagcataccagcgcgctccaagatatccagggtgtactatcgttgctaaagaaacagtccattcgggtgacgctcaacaacaatctccagaaagtggtgaaattgcgaactcatgctaaagggttgtaatgaacaagtgcaggaggcttgaagagaggtagtgagcacaatgtcatcaacatataggaggaggtacatagtttcattgccacgcctgtagatgaacagagatctgtccaacttagcctcagcaaaacctagggagagcagatatgtgccaaacctattgtaccaagcacggagggcctacttaagaccatagagggacttgttgaacttgtagaccaagtcagggtgggtaggattaacaaagcctacaagttgactgcaatagactgtctctataagagtcccatggaggaaggtattcttgacgtccaac

SEQ ID NO: 193539 - DNA, 1097 bp, Zea Mays
cctcttcaaccgtcgttgaactatactgcaccagaattggttcgaagtggagattctaaagttggctctgcttgtgacatgtttagctttggatgtctagcttaccatctggttgctcgtagaccacttctggactgccataacaatgttaaaatggtatgttttaaacatctgattgatggcatttacccaatatagatttgtccttttagcatcaatcaatggcctcaactgtaattttactttctcgcttcagttttgcatgtagatcatcttgtttgggttgtatccacatcctacagcacctgttctgatgttttcccctatttttgcagtacatgaatgccttgacatatttaacaagtgaagccttttctaatattccttctgatttggtatcggatttgcaaaggatgatatcgatggatgcagtatcgcgtcctagtgctgtggcctttacaggtgtgtaacaccttcctttccctcatttaagggaaaatcaaaggagattttttcactcactgggggtaaatcatgaccaccactgattatttcatgaaatgatttttaaaatgctaaatttttgtgcaggttcttctttcttccgggatgatacgaggttgcgcgctcttcgtttccttgaccatttgcttgtatgtttttgttattcccctttagtttattttcgttaataagtttaaaggttgctatctggtgtgcttctttgctgtctgaaaatcacctttgactagattgtttgagttatacctgtcaacacagcaggaaagagtcttgcctgcttgactagagaatgaaatggcacaatttggtacctaaaatggtcctgatttttaagataacattcctttcaggagagagataatatgcagaagacagagtttttgaaggcattatcagatatgtggaaggattttgattcccgagttcttcgatataaagtatgttcagtactgcaatccatccttgtcttcttccgaccaatgctacccccatgtgtccactctctgtgagcatcattttgttatgtaccacttcattgaagctcctgaaacctggatatgttaaattatacatct

SEQ ID NO: 193540 - DNA, 629 bp, Zea Mays
cgtctatcgagctcacgtcctggcgatcacgccggtggccaggggcatgacaagtggtatcaaagcttccgatcctcggcgtctcggggagcgggtcgtgtcttcctcatcagcgtctttgctgcggtgactagggtcttcgacgcgggttcccaactccatcgacgcgggttcccaactccatcgacgactctcggcatcggcatcgcgtcatcgacgctcgtcgatctccggcagacagtcgacttggtggtgttggcggcggagaccgaagaagtcgtcggcgctgactcagtctatgttctctgccatggcgacattcaagcatacgagtgacgagcagtgggagaagatgatggagatgttggatcggttgggagatagactggaggtgatgggggcgggtcagcttcgactccaggagcaggcagactgcttggctgcggtggttgcagggaaggccacagaggagagggtccagagaacgcaaaaaatggaaacaacacatgaggtggtgaggtgcatggctagggatatggaacctgaggaactgagttgggagggtcctcgatctagcgaacaagggcgtcggtgtggtcttaatgctcaggggaatggaggtactgcct

SEQ ID NO: 193541 - DNA, 568 bp, Zea Mays
ctgagctgcttccaagggaaccagcttggcttctgccctgccgtgtagccatggagccagaaagaggcctgatcgcatatgaagggccgcctccagactcgacggacctgctgtcgagcgcgtggtgcagctcggctatccaagttcttgacacaggaggacacaaggagtgctcgatggccctggtggagcatccggtcatggcgcttggcaacgacaggaacgacgtgttggcagtaagtgcagattcagtactgcagcagttggtagtagcatgttcgtatttcgcttggagatgaaatttgagacgcgtacaaatctatctctatcctgatgcttttccagaagagcgaccgtagcttggtggttgacaacagcagcttcagcacggcccagtggaaatatgacgatctgaaggtacacagtttgtgcaataggttgttcttgcgcaaattcgttgtaggccttgacgaaagcttttccttcactagcgctcttcctttttcagtcgtggatatggctgcagaaggcaattcatcccgaactggactatgatctctgcctcaag

SEQ ID NO: 193542 - DNA, 285 bp, Zea Mays
ggcgtactcggcctggaacttgcctcctcccaaagccttcacccttttcgtgtcgaatccaccagtttctgatggcagtttgggccttagagtgcgaccctctgctgaagaagttagtgctttggttgcttcgcttggggagattcctgataacgaacggcaggtccattttgaggtgcccctgaaccctagtgatgcagatataaacactatgctcgatttgctagctgaggattcttctgatgctgctcctgccggggcgttggcagtggtgcccctcacaga

SEQ ID NO: 193543 - DNA, 317 bp, Zea Mays
ctcgagtgcacgccgccacatgggtgtatgcgagacgggaaaatataaggtgtgctcgatggggatgttcgatcgttgtaggtgaaaaattgtctttgcttaaatagagaggtggtgacatgccgaagtagtcatcgcttcctctatgtttatatgttgagtcaagatgcggggtactagtggtacgctgggcaggcggtgtccaaataaattaaccggtcgatgtggtagttgtcgtgcgtgatttatttttagtgagtagtttgaattaagagctatatgaggattatgttagaaactagtaggcggcgtgtaac

SEQ ID NO: 193544 - DNA, 910 bp, Zea Mays
gtgaaaagttgggaaataattgagcttgaagttggactgtcagactgcttgatgtctgaaattcagattaacagtgggatgacatgaacttagggcttgattttaagcaagatccagtgactttttgtgggagcacattgtagcaaagttatagatggattgtagttctacaactttgctgcagatcattgggtatgttgccatgaaaatttgtgagcaaatcgagcctaaactatggctgtcaggttgactgaatgctgcagcccatggtacagtgcccaaccggatcagatcagccgccgcagaagaatcccaccgctgacgaccttcgccgtgattcacgccaccgctgttggattcgtgctctgggcgagtggataacatcgtgcggtagaagcccctcgccgacggtgagctggaggtcactccggtgacatcaccgtggctctctctccctctttgcggctgagcggattaacacgccggcgaccgccgtcttccggccatgcgcagcgtggctctcgctttccaccgcaccaccgcgccttaccctcgctctccgtggctcaccggagttactgccacgccataggacacgtattcaccgcgccaggcttcttcctcatctccggccgccaccgcgccatcgtcaattcaagcgccaccgctcgctccgcctataaattgagccaccggccagctgctctaggtcgtaccaaagccatagccaccactcccgtctccgattaacccccatagccagagaatcgctcacttcccccaattcagtttccgccaccgtgaaacgagcctcaccgtcgccagccatactccggtcagttcccgtcttctgctcccttgtttaagcgttctcatgcatctgcgatgctccccgacccctttaatcgaa

SEQ ID NO: 193545 - DNA, 773 bp, Zea Mays
agaatttcaggcaccgctgatgttaatactgagttgtccataagaggttccttacagtcagaccttggagttgggctagaacattcacattcaatatcttgtttatcggaaggtacagcggaaatgtgaggctgattaagtgaagcgtttgatgcatctgcttcaactgctttttgctgattcacaaactcctccgttttgcatgtatcagagacagaagttgtcgctagcatttcaggccctactgatgttaatactgagttgtccacaagaggttccttactgtcagattttggagttgggctaggatattcatgctgaatgtcttgattatcaaatgatacaggaagaacgtgagaatgaggatgatgattaagtggagcattcaatgcatctgcttcaagcgttttttgctgattcactgagtcctccattttgcatgtatcagaggccgcagaggttgttgttagaatttcagacgctgctaatgttaacactgagttgttcagaagaggttccttagtgtcagatcttggagttggacctggacattcatgctcaatatcttgactgtcagaaggtactggaaaaatgtgagaatgagattgattaagtggagcatttgatgcatctgcttcaactgttttttgctgattcacaaactcctccattttgattgtatcagaggctgatgcagaagttgtcgctgagttgtttacaagaggttctttactgtcagatcttggagttggacctggacattcacgttcaat

SEQ ID NO: 193546 - DNA, 383 bp, Zea Mays
gtgggatatcaaggtggattgagtagaagaacgcagggaataaggtactctgtgtggcggctgggagctgagatcaccagatggcgtagggtttgccagggtgatcaagcagccccacccacaggtacaacttctttgataatctcctagtacaatctaaggccacctttatagcttaggtgcctaaccatattacagattttctaggggataagataactctcccgggaggataagcctccttaattattgcctaacttttagtacttcttaacaaactaaatctggcgcctagcataatgccttcccacaaaagaatctacaacacttcccccctccccaacaaacagctcgtccgcgagcgccacatgtggatattagcg

SEQ ID NO: 193547 - DNA, 913 bp, Zea Mays
ctcctcccaccgtcgctttctaaggtaaagataagaacaaatgttctcacttctcttacctttttcctttttcgtttctcactgtgcgttccgtcttcgacgacggagctgtttccgccggcctggtcgtcgctttctacagtgaatatatcagtcccacacttccctttgatagcagcagcgacgctacagcttcgccctccacatcctctcgcgaccgccgatgacaacgacaccgcagcttcctccgcatcctctcgcgaccgccacttttccaggtgagaagggttttctatacttcttttagctttccgccgtacgtttcttactgtagcttcctcattcttttacgttgcttcctcatccgtttcgaattagtcccacactttccttcgttttcccttttcgttactcactgcaccttcaccatctgtgcgcgattcattcatctttttctaatttttactttgcaaaaaaaatggaattagtacatctaaaaatatctggttcataatggagtcttcatctacaacaataaacatgcatgtcttttctctctttttccaaaatttcttcgaaattgtatgcgctttcccctaaaacctaataaactctaaaccctaaaccctatacacttccctttgatagcagcagcgacgctacagcttcgccctccacatcctctcgcgaccgccgacgacaacgacaccgcagcttcctccgcatcctctcgcgaccgccacttttccaggtgagaagggttttctatacttcttttagctttccgccgtacgtttcttactgtagcttcctcattcttttacgttgcttcctcatccgtttcgaattagtcccacactttccttcgttttcccttttcgttactcactgcaccttcaccatctgtgcgcga

SEQ ID NO: 193548 - DNA, 371 bp, Zea Mays
attaacactaccccgaccattttccccaacctaattgcacaaatagtgagctatcaagctctgtccgcgtgaaccgaatgggtggcggacagttgatcgtgttcccggtgattggtgagctcgcagttcaaattggtggttcagcaagcatcgtaggcatgcgagaaagcttaaacgaggaagcaggggacgggagctgaccggagttgggctggcgacggtgagcttggtttcacggtggcggaagcttgaattgggggaaactccaaattcgagcagatgagtggatgattgtggccgattagcggtggttagctagcggactacctcacggagttggacacgggctcaatttatagggaggatgggcg

SEQ ID NO: 193549 - DNA, 378 bp, Zea Mays
gtgatggcgaagccgaggtcgatgtagttgtggtttaggttgctgatatcaagatggtggcccatatgaagccgcatgcgcacaagagctgtcgtgatgatgacaaagatacgttggggcagtcattgtggaagggggcaatgccgagacccgagatcaatgcagtcaaggccttcaggacatagaagaaaggcaacactgcaactgaggcagacatggtgggaatagaagggtcacgaagttgaagtcaagctgcctgaatcaagacatatgctcggtgccaaagccagcaacacgttggggatgtaagaataatgcgccagtgtcactaacaccggatgtacaagggagagggccccaactaggagtggttgtgct

SEQ ID NO: 193550 - DNA, 412 bp, Zea Mays
catggaggtagctgaggagcccttagccttagatgtggctactgtagaagtcttagcccccgagggtggtgccagcagttacccagcccctgagggtgttgctggtagtgatccagctcttgtgggtagtgcaagccacaacccagcccccgagggtgttcaggtgggctctctttcccatgcctccatggatgtccacgttgggtcgtccccacctcagcccgatggggcgacgacaacacgtgcttctacagctttagctggacaagtcgccttagaggttggtgagttagatatgagaggcctactttctgctggtggggttgaggtcattccagataatgctcttcaaattgttcatgctgatcttccttcctcaagccgtgccacagctcccctgccttggttctac

SEQ ID NO: 193551 - DNA, 430 bp, Zea Mays
attcaattgggtgggtcggtgagtatcaaggacacatgaggatgttagaacaagactaaagacaacaggatcggacctgaggagagcttcccacggtgagcttgggttcgcggtgttcttcaaccgttttgggggaaatcccaaattgggaaactgtgggagacgatcggagctgagagtgggtttactgactacacaattccctagcggaacatgctgaggctccaatttataggctgctcaagcggtggtgatcaatttgactgaatcgcgctggcgaccagaggggaaaagggctctagcgcatgacacaggtggcctttcaccgttgccggtgctccggtgatcaccggacatgcaccgcatgattcaccgtgacgagagccagcgctaaggcacgtggtgcgcaacggcgatagcacgacggcgg

SEQ ID NO: 193552 - DNA, 345 bp, Zea Mays
ttgtgatactgctctttgccagtggccttcgactcatacaatagttcatgcatactgcaaaaacacttcacgctcggttccagcccctgtcttcttacagcccaaacaaacaagcccattctaattatagctttgggagtaagttgatgaacaaagatctgaaatatctttagcacttgaaccaaaaatctgcttaatgggaaccgaagacccgccttcaaaaggcttttgtaaacaaccacctcattttcttcaggagcaggggtggtgctgtctcctccaaccctcacaatagacatgtcacgaaagtatcttcccttcatggcgtcaacatgactttgctta

SEQ ID NO: 193553 - DNA, 293 bp, Zea Mays
cgaggaagacacaacgagtggagcgaggggcgagcttatgaggagaagtggatgcgagattgcggtagcaagcgcacccgaagacacgaagatgttcgtaagaaggatggatgccgaagagagcgaagtaaggagtggggtgggcaaccgccttggtggggagacggttgaggaggtaggtggcagtggtgagggcctcagcccagtaatgagcgggaagggaagcctagaaaagtagagagcgcagccatcgttcgtcgtgcgaatcatacgcttagcccggtcgttctgat

SEQ ID NO: 193554 - DNA, 648 bp, Zea Mays
caggttcccaaagggcatcagcagttactcccatattgtcatgttgtattacaagctctgaaaggaaatcctcttcttcagggaaacatggttggctactcatactggaagatgaataaatttgagtgtggctcatcaagtaggcaggatccaggaacgggtttgtactactagaatcttgagcgtgcatcccccacgccaaatcttgaccagcattcactggttgtttctcaactgcattacttttcaaggttactgcaccatccttgttcaaatcgcagagagatcgatcttcagcattatgactgccctcttttagtaattcctcttgataatcagattttactagaaattgtgtatcaccatccctgtcactacatttttcacttgtagtctctacaataagaggactattgtctgtctgcaacatactcttcttagagatatcttctcttgattcatctactgccccaaaatttctgtgaatagcttccgttgtttccaaaacttccctggaaggagactgtagttgtaaatccagcctagtggcttcttcagtcaaacttgtagccagaacctctaccttttcaggatgtatgttagcatcaatgaactctttgggaggtaccacatcaactgcaaatacgc

SEQ ID NO: 193555 - DNA, 367 bp, Zea Mays
gagaaattttgatcaagagcagaaaggtccagggcaggacgatgaaattcttccagatttaaagttgactccctgggggctgctgtcccaagtaacttgttatagaaatcccagattacctctttcttttcctgctgctcagaaattactctgttatcgaccatcagttttccaatgaagtttttctttttcctgtgtctggcgtggtgatgaaaataggcagtgttggcatcgccttctttcagccagtgcagtccacttcttactcgggcaacagttctttccaaggaggctaaagccaaagagtggtgcttaagggagcgacgtagccattcctcagagggagacaaattcctttcgtcacgag

SEQ ID NO: 193556 - DNA, 289 bp, Zea Mays
gaagggagtggaggggaagggaaggtgcatgggaagaagaaggcgtacgggtgcggaataggaaaagaggaggcacgatggaaaaatgaggtggtgtttagctgatggttggcctagttggcactacaaccacaccatggctagcacatgtgctcgagcgggctgctagtacgtgcaccagctcgtgcatagggtcgcgctcgcacattccattgccctagccatgcctttgcctagtcgcgcttgcgcactgaccatggctgcgagcctagccacatgcacgcctagg

SEQ ID NO: 193557 - DNA, 889 bp, Zea Mays
cagactcacacacaagtgcacaactgaagtatgccattgtcgacaaattccatggctctaacaaacttgtgctcatgcccaagcagcagagctcatcagctgcagcttctatgcttctgcttggccctctcactgcatgtcccttatcatgccaattctctctccttcagctacagcttcttcaaccctgatgacttcaggccggaggacgacgcgcaggtcgtcgatggcaggatcgagctgctcggcgacgagttcagagggcgtgccagggggcgggtgtggcacaagcagccggtgcagctatgggacggcaccaccggcgaggctgccagcttcaccgcgaacttcagcttcagcatcgagtcagtggctggcaagggcgcggcaagcgctgggcacggcatgacgttcttcctcgcgccgtacacgccaaacttgccgcaggagtcctacgacggctgcctcggtctgttcgatgagagccaggcgcttaactactccaagttcaacgcgtccggcgactcgaggttcgtcgccgtggagttcgacatccgcaaggacatctgggacccgagcagccagcacatcggcatcgacatcaacagcatggactcccgcggcgactacacggtcttgccagacggcagcctcgtcgacgccggcgtgatgtccgcgacagtcgtctacgacaaccgcacgcgcagtcttcgcgtcaccctgatggtcggaagcgtcacttacacgtccgtagccaccgtggacttgagaagcttgctgccggagaaagtcgcagttggtttctcggcggcgacaggcgacgagtacaacgcaaaccacacggtgctttcgttctctttcgcctcgacgttggcaaccaagaacagca

SEQ ID NO: 193558 - DNA, 467 bp, Zea Mays
ctgaaacctagggaggctagctcagaatccagtttaatgttccaagctctcggagcttgttttaagccatacactgctttattcagtttgagcaccagttggcccttctctgggttctgaaatcctggaggttgtgttacatagacttcttcatgaagatccccgttcaagaaggctgacttcacatccatgtgatgtattttccagttaccctgagctgaaagagctatcagtacccttatggtttcaagtcttgcaacaggtgcaaatacttcatcaaagtctattccttccttctgtgcataccctttagcaactaatctagctttgtgtttgacaatgttaccagcagcatccttcttgactttgtacacccatttcaaaccaatgggtttatgcccaacaggtagttcagaccatatccaagtgttgttgttttcaatggactggagttcattgttcatagc

SEQ ID NO: 193559 - DNA, 1941 bp, Zea Mays
agagcaatgcagattacataaagtcatatgaggaaagcatatgcaagagcattgtgaacttgcttgttacgtgtcctcctgattctgtctccatcagaaaggcaagatacgacctggtgctttcttgaaatcatttaactatatgaccattactttgaaaatgctaatatccttatctcttacactggatttcaggagctattggttggtctgaaacaagttctcaacaccgagtacaagcgagggctgttccccttgattgacacacttcttgatgaaaggtaaaccaattttctttttccatcaattccgtgatccaacttttctagtttgttttcaaatgtgctatttctgggatctcattcagattaagtttgatatggccacatcttgatttcctgatactatgtacttgctttgtaatgtgtaactggtaaactgattaactttccaaagtgcttcattttgacctatgatcaactcatttaatctattttccccttcttttcgttggtgttttgctatttttagttacttttggtaggctgaataatcctacgataaagaatgcctgtaaaagttaataagattttctccattgacctaacgggtattgcaaagatgaacagcacatgctaatgaaccaggtctacttttctgcctgaaatatgaggagtctaattttcaccatcaaggcatcaacaataaaatagcttcaaataactgcccatacttaaaaccactcatgtgacaattcaaggggagtaaatgaacttgtttaaaaacacaacctttcctgatttgtatctattcgaaatcaatcggttttagttgtacttttcaggaacttactatggaattgtaattagcaaaagacttcatcccttcacgatgtcttgtcgttttcttatgacagttttgtattgtttccctttactattcttgtagcatttattgttctacatgtattaactcttagagtttctagtcatgcttgacaccttacttttggcgtgtcagggttctgattggcacaggtcgagtttgcatcgaaactttaagacctcttgcttacacccttcttgctgaattggtgcattatgttcgagaagatatttctcttccacaggttgaactcgcctcttgtatcatttatattgcttacagatttgggttagcattctatttgttaaaattgcatgtacagctgtcacttttgtgcccccttcccctccccataattatacccaaacacatcctttgggaattttaggatagatgcatcacttaacggaccttggcaagcgaagctgttatctgatttcttcattgcagacaccagaccatatccaaacagtattatggatgagacatgcattaggcattggatttattagtaaagctaggtggcttgccagatctctgcctggtgttgagctactatataactttcatggatatgatatgagctactatatgacttcaatacatgtggtattacacgactatttagtcacttcaatgatactgtgatccttagtagataaatctctctttaaaggcttacatagttccacttatcagtattatttatgccttggtgttgatcatgttgctgctgaactaatgtaagttcaacttattgcagttgtcacggatcatctatttgttctctcggaatatgcatgattcttctttgacccttataattcatacaacatctgcccgcttgatgctgaacctggtatatttgatattctgaaattttttattagtgaaagtaggattattacattttggtgcagtttatgattctgaacttttccttctctaatatgtatgagtataaaaatcatcaaatttatatctataaaataaggtggtagtgtagtgttacctaaatcagtactagtaagtcactaccttttgctttaggttgag

SEQ ID NO: 193560 - DNA, 450 bp, Zea Mays
cgcaaaggaacagagccaagtatcacataaaagctcaccagcagtaacatgatgcagtactagatcataggcatggcaacaaaataagctcagatctagggaccaaatcataggcatggcaacaataagctcagactaaatgctataaaatcacaggcatggcaacttaagctcagatcattcaagaaatgaagggggaaaggggaggggaaggaatggcgtctgttataccgaacaacaacaggaagaaggacgaagcgccgagaggaagcagctacaaggcgtgaggaagcagcaatccggatgccctgtcaagaaattaaaaggggattagaaaccctaggtcgcgaaatagaacaaaaaacgaagctccaaacctacaaagcacgaatccaccacagatctgaaaagagaagaagaaatagggggaggatgggaggaactcggcac

SEQ ID NO: 193561 - DNA, 464 bp, Zea Mays
atggaggtgaagcttctggaatagcagctaacttttcaaacctcagcgcaccttctattggcaacaccatttcctctgattccactgtttcagggtcgattagttgccttattttacttgcgaagtcatcctccatgtcctcctcgttttcctgaacaatttcctccatcacaacttcttgactcagattcgttacagcgtgtatctccttcgcaactatctggctttcagctgctgccaatctgtttgtggtttttgatgtatcgttcacagaccaaggttctccctgtccctgctcagtgcatgaaggattatgcttcctccctgtcgtgttattcctctcattcatcttatccatcttcttactacttccttcatgtgcatctgagtcatcttctttgttgtccatatccatgggtgcagaatgaggcgagttgtcttctatctcaactctgaactgaact

SEQ ID NO: 193562 - DNA, 1175 bp, Zea Mays
acagattttcactttccaattcctatttatctcttcttttgttctttaatttggttcgtacgtacaagacttctcggatcactcgtcttctttgattgcatcatcgagacctgcattttcccttccaaattcgtcactcactctggttggccgccttctgtcttctgatccaatccggttgaaatcctccgtctccttccagcaagatctggcacataaggagaatcggcaagaaccattctgcaaatgaggccggatacgcggcttgaatcggcggtgttccagctcaccccgacccgcaccaggtgagctgccggatctgctcgagtaactcccggcgatgtttctttgtttcctctggtaatttggccagtcaattatatatatatgtgtcatcttttgtggctctggtgtgtggcgtgttgccaaaaatggagcgagctctggaagctcgggcatggcatttccccatgaaacggcaaagctttcggctttcgccttaacctcgtatgcgttgccaagcctggcttggttaacactgcagtgctagtctgctagatctgatgtcctcatgctctaaatttgatcgagtactatggccgcagctttaccgtctgccacgcaaatgatttgtttctctcttctccccatcttttttctaggtgtgatttagttgtggtggcgaatggacggaaggagaagatagcctctggtctgctgaacccattcgtcgcccatctcaaggttgcacaagaacaaattgccaagggaggctattctatcacacttgagcctgacccagagattgatgcaccctggtttaccaggggcacgttggataggttggtttgcgtcccattgttaggggttgtcatttgcaaatttgttctttgacaatatacgtggtgatttgaatccctctctttcgcaggtttgttcgatttgtcagtacaccagaggtcctggagcgggtcacaaccatagagtctgagatattgcagatcgaggatggcattgccgtccagggcagtgacagtcttgggttgagatctgtaagcagacatctatgcctgataacttttgactaacatactaatatcagaaagatgagatgttcatatttgtgctttgttaggtggaatactataatgggaaattggtggactgcatggaag

SEQ ID NO: 193563 - DNA, 374 bp, Zea Mays
cgcgactgcatcgacatatacatctccgagtggcacgtggcgacctgtctaggcctgcgatgatgaggggacgctttcctacgcgccttttcgaccatctcgtctgcatttcaacataatcggtttgtcatcgccaccacaaattgggatgcctctgtcaacttttcctcgttaatccacctcacgcatactcagttcgtacaatcgattatgcgccgatccactcggctcccgtgacgtccatcgcggagtactacatgcatcttctttgacaaacaaggttgctgttgtattgcctcgtcgggtcacaacaccgccgctcatatgactgcttcgttgttgcctccacattgctatcccagtgcattgatggc

SEQ ID NO: 193564 - DNA, 350 bp, Zea Mays
ccttgccgcaaccgcaaatcggcgccgccatcattcaaggcccggtggtgaagtgttgtgcatcgcccgtgctggtagaggccagccgcgacatcgctcaactttgtggcgactcgtcttcgccgtaattcctcgtcggaatccggaatcggccgtggatccgcaccgcatcggaccgacctatttccatcgccatcctctggtgaggtatcccctacctagttcatcgtgttctgttctctctattacgtggggtcatgcaagggttggaacccggtggcatgggttgggcaagctcacgacgagcggattgctgtgtcgcgcgcgcaccgccgtactgcggcgccaag

SEQ ID NO: 193565 - DNA, 311 bp, Zea Mays
ccaaaatcttgatagggtactcagcataggtcaggtcatcttgcacactgaggtcctctagtggtagctgctcctcaggtaccctgaggcacttctttagctgagacacatgaaatacatcatgtacatctgacagatgatcgggtaacttcagttgatatgcaacttctcccactcgctttaagatcaagaaaggtccaatgaagcgaggggacaactttcctttaactttaaatctcctcataccccggagtggtgacaccttcaaatagacatgatcaccctccttaaactccagtagtctccttcta

SEQ ID NO: 193566 - DNA, 573 bp, Zea Mays
cagaaatcggataggaacaacatgcttggctttaatgattctcaagttccagaaagtcctgctggggcgttttcttcggagtcaccagaatacatggccacaacttcagaagccattggtgttgagcagagcaatggtccttcaaaagtgcttagatcgattcctacatggtcttcaaaaactcaccgtcttcagagcagtgtcatgccaaaaacacctagatcagctgctgctcttgcaaagagaaaaattaaggagattgggaggagagaagctaccaaattagataattacaatatagtgaggaatcccacttcagtgaaaagatctgaaactaggactctttccttcactgcagggccaagcaatggatcaaacaggttagcatctacctcaaagaagatccggaagcatcgatctctgttgaggaccggcaagcgtgcattttcaccttttagtactagagtagttcatggttttggtgaagagcgtgaacttgataccagacatgtaaataagaaattccggattactagtaatgaggttcccaagaagtttttgaagcatactgaa

SEQ ID NO: 193567 - DNA, 481 bp, Zea Mays
ctcagggtacatgctattactttagatttgcaatgtagcagatgacacagtgagctttggcctttcgaagattacgtgctagtccttattcttttgaaactgtatctttttaggacaatgggcagtctgttgcatttgattgccctgagatggataaagttgttgatgaggttaaaaacgttgaagagtggctcaatcagtgccactgtactctacttctagatggaaataatagttctttgctctccatacttgtaaaggttggtttctatttcaaggtttcctcagttcttttgcttgaaaaatacttttgaccaatttatttatactttcagataagaggattattggatgatgtttgcacgttatatgctgaggattgtatgaagttaagattatgtgctgtatgctcatgtgacatcggagataggctggcatctagatgtgtgacttgtcaagactggtaatgtcctgctgcttg

SEQ ID NO: 193568 - DNA, 440 bp, Zea Mays
gagggagtacctgaagctgaaatgctccttcatcgtccagagactagacgacctgcagctttctttcggactcaacggaacggagccttccccaccttctcggtaggcaatcatgctgcaagccgagatgcagacaaagcagccttaactaaagacgaaaaggattagctgagcagttgtagtagtatgtcagttctaataaagagttttatgatgatttgctcaactattagcagctccacgatgggaaaaggcagctatttagttggttgggagacagcacgagccccaccaccccgccggctccggtccgatgccaccgccggcctgcccccgcacatgtgcccctcgacgctccactcacgcgagggtgtacggcggtatttttccttcggggctgtgctttcccgacgaagaatggcaagaggcgagggccgagg

SEQ ID NO: 193569 - DNA, 314 bp, Zea Mays
ggcgagcctattccggccagatgacgccacgactggagctctcaagcgacaggaacacaattagatccaccccgaccatttcccctccatcaatttcactaatggtgcactataatgtcctggccacggtggcagagcggatggacaagagggtggacatgttccgatcagacaatggcagagatggccaaattgaggctaggtaaaggcttacgggttcactagggtccatggacatgcttcggtttgggcagaacaagacccgaagaacgggtcgacggtggggggtgtcacagcggtgtttgacagcgcac

SEQ ID NO: 193570 - DNA, 1067 bp, Zea Mays
atgctacatcgggtgctgagaaatctcgcacttcatttgaaattcatgctcacgagttagcagaagcaaaagcggcggcagttgatgaagctaacaagcttgcaatatgggtcgaaaaacatgcactggttcttgaggctatacgggagaactctgttgcgtgcattgagtcatgcatgcaattgaattgtaaggacaagacattgagccttatttcagccgtcctagaatcaggggtcccacttacagttgtaccagaaccaacaagagcgcaatgctcggaattggatagggagatttctcaattattatctgagttacagggtggactttcctctgctttagactcacttggtgaatattctttagtcttgaagcaagttcttccggttaactacatcacaaccagtccggttactagttgggcgcaagtcttgcagcgatctgtaaggagtacatcgcaagatatgctttccctggctaaaatacaggctgcagaagtcattgctaaggttcaaggtgaaggcattaatctggtgcaacaaagatatcaggatctcgtaaatcaaatggaaagttatgtttcatgtgtggagaaacttgcgagggagtgttctgaactgatgaattctattgggttgaataacgaagtgcaatcaaaagagcggatactttctgtattcatgaactctgttcagttgccttcacaaaagaaggatggtgatagtactcatttatcgcattcaggaagtcctcagcagggtgagatcaaaactccagccaagggcgatgtacaggagacaacaggtaaggtcctctctattcttgggattgctgtgagtcagctatatggtgatattagagccaaagtgtctgaactctcaattaaagctattggaaaagctaaatttaggacagatgattctggtcttcaagctgatgctggaatgagcttgcaagtatttgaacaacatatagaaaaatgtgcattaatttctggagttgttgatgaagtgcatgaagttattgggagaaccttagcagaaacaagtgctgcttatgcaaag

SEQ ID NO: 193571 - DNA, 458 bp, Zea Mays
tcatccactagttgtactctaataccctctcgtgctaatataatgcccttgacatcaggaaacgtcatttgtagtttaaaaggttatctattgtattgaattctttatattccaactttttgcatggtttaaaaaatatgccttacaatgttaacctatgtttggacaggtctcccatgcaatttggctaaaattttcatggtctttattttattttgagaaacgatgttgcaaattgaagtgtggtgttttacttgagtggacttaaacaccatttgagtatgccttgaatagaggggattataggaaacatattatcacaaaaggtcatagctagcccactaatgtcttcattcagtgtgttgtactctaatactctctcattcgaatacaatgccctcattaccatagaaacactatttttagtttcaaagttggtctattcgttttaattcttt

SEQ ID NO: 193572 - DNA, 361 bp, Zea Mays
tataggatctatgccaaggacatcagagttatctgattttatagtgtcactaacaaggatacataatgtttattatggtttcgctgacccacccaatagactacacaacaagtgataccccctacaacccatgtaacctctctatctcactagttgtttgttgagcaatcatatagagctgtagtgaacattccacctgtagtgaggatccttcatgcacttatgaagaggatactactactaaaagttgtgtacgatgagtctctcaacaacataaaatagtggcttctagatgcactcatctctcacatagagtatgatgttggtgactccatattatgtgagattgaggatctagtgc

SEQ ID NO: 193573 - DNA, 378 bp, Zea Mays
catccctccattaaggatggacttagttttgaaagggaaccaaggacacaaaaagccaaaaggccctcaacttcacaaaggagaagggaaaggcgcctatggctagtggctcgcattcttttcatgaaaagaagaatcatgcttatttgtattctcatgttaagaatgtttcccataatgctcgtaatgctcatcatgatgattgtattgatcatcctgtttcatatacgcatcatgatgttgttttactcctcacactatgattgcttcatctagtatttcttatgctcatagaaggagtagacctaggcaccatgcatcttatgttgtttatcacacgcctaaggacaggaatgcatctcatggtccttctattct

SEQ ID NO: 193574 - DNA, 1941 bp, Zea Mays
gatgaacctcagccagttgttttgaagtatgaagatgcttaccaggttaaaactttctaaagttctgtattctgttacttgagtttacttttttgttggtgctttacttcctactctcaaatatcaaagcccatatttttaccttgcatctaagacctaactagcatatcctgcccccctttttttgccagtaccaaaatgtttttgcgccactgataaaacttgaggctgattatgacaaggtactgtgttctgattaagagatcatgttttttatcttttccatcacaaaactgagttgtgttactgttttatatgttgttgtagatgacgaaagagtcacagagcaaggataatgtaactgtccggtgggatattgggttgaacaagaagcgtgtagcttactttgtctttccaaaggtctgttcaagaagtgaaatatatgggattagtgaattaataccataattgtatagttatctgttgttgatgatgttcggtattgcttcgtgatactctattgtctaacacgggaaacaattatgtattttaggaagacaatgagttgaggcttgtgcctggagatgagctacgcttgagatatcctggtgatagctcacatcccacatggcaatctgtgggacatgtggtaattagaaacctgctgataatcttaattgggccagttttatctttgtggctatgctaaggacatttgttctttcagattaagctcactgcacaagaggaggtggcacttgagcttcgtgcaagtcaggtataaccgtataaggcagtatgatttttctcatgttcctttttagcatccactcagcctattttaacaatttccttgaatttcagggggtgcctactgagctaaacgttggattcagtgttgatttcgtttggaagagtaccagttttgataggatgcaaggagcaatgaaaacttttgctgtggacgagacaagtgtcagtgggtgagtataatatgtgatactgtgcatagggttacgacatatcgttgtcattataatcgaacaaggctctttgatagaaaacaactccatcaaatcctaaaccacttcatatattattagtcggcgagatatttgattgtttctgttacacacactgtttcattggttaactatgtgcatactgaagaatattcttataataagatccattctatctcattctttataattttgttcttctgaagtgtttgtcatagttgtatcactattaacaaagttttactgtctgttctttcacacagatacatataccaccaccttttgggacatgaagttgagcatcaaataatacgtaacaccctaccaagacgctttggtgcacctggacttccagaactaaatgcttcccaggtacattatctctctctctctctctgtctctctctacactcacacatgtgtgtgtattctttgttctatatttcctcttttttttgcttttcatgtcttctaacatggtgcattcatgcctttgattaacatggttgtcttctgttctgggacaatctgtgtatattatatattttaaattttgggtgcagctttgcaaatttgctgctgttatggcctgtgtatgttgttattgattgtttgatctgatgttgtcttctgtattatttattgtgtattcaggttttagcagttaaaagtgtcctgcagaagccagttagtttgattcaaggtccacctggcactggaaaaactgtcacatctggtgcaattgtgtatcacatggccaaacaaggtcaaggacaggtatgggattattagaagtatgttgttcacttgtttgacatggtttagggagaattgtctgacctctaattttgtcaaatttgtaggttcttgtatgtgccccaagtaatgttgctgttgatcagctggcagagaagataag

SEQ ID NO: 193575 - DNA, 294 bp, Zea Mays
ctcttgatgagagttagagtccctctacttacaaaaagatgatgcaccgtttcatcctcttgatcacaaagggggcattgaacaggatggtccaaacccctcttcgccaaacgatctgcagtccagcacctatctcgagtcgcgagccaaagaaagaacttgtttttggacaggaaacttcaatccgttccggggttagaggggtctgttttttaaaccaaagccatctaagctgcaaggcccaatccatataacaaagattcgggacacctaagcctccaaggcttatgtcac

SEQ ID NO: 193576 - DNA, 438 bp, Zea Mays
tattagggtcccccaagtttgtgctaccacagagggcaacaacgacccaacctcccgggcaaagactatccccacgtgacacagatctaccactcatgacctagctgagtgtaggacagtcaaggatctagtcgagcatttccaactctatgaccaaaaatgccccaatcaaaggcgcctgaagcaacgacgcccccaaactgcagcaacaaaagcaggcttgggacccaaaagaaaaggaaaggccagaagcccaagattgcttggaccacatcctctgaggagaatgacattgacatggaatttcaagacccaaagcggatggtggatgtcatccaaggagccatcgagaagttgatttcccagcgagacctgcagctcatgcaacaagacatgcacattgttgtcccacagcaccactccatcaggccgctcaag

SEQ ID NO: 193577 - DNA, 1224 bp, Zea Mays
gtttgctgggctcctatgcttgcagcattcagtgttccacttgaccagagtgatgatgaaattgttgtatcccagtgccttgaaggatttcgctctgcaatccatgttactgcagccatgtcaatgaagactcaaagagatgcatttatcacttcacttgccaagtttacatcacttcactctgctgctgatattaagcagaaaaatgttgaagccattaaggtttgctctgtttattaagacataactgttaagccatctgctcttcacttggttggaccattctcaatcttcttaatgcttgttgaaaagatcataacaaatattaaatcgaaccatgatgcttagaagtttgcttccttttcaagtttaaaattcaacccatttatacgacatgtgggtccaggctaaatttggagaagtacttttgataccttgattgatgtagtgagtagtgatactcatataagactggagttggttccgagttagagctgcttggtttaataatgggatgaactgaacatttagtaatattgcattatcacattgagcaaaatattctaatcaaggagcaaatttcccaattccctgtttgcggattctatccttcatccattcttgtcatttgaatgccttattgtagattgagtgatatgcatgccttatgtcgtgctgctagttgcagtcttccatattttagtttgagaatcatgataaaatcttttatcattcttatgttctcttcttatggtggtggattgcctcacaggcaattctattaattgcagatgaagatggaaattacttgcaagaagcatgggagcatatattgacatgtgtttctcgttttgaaaatctacatcttgttggagagggagcacctccagatgccactttctttgcgctgcagcagccggaccttgataaatcaaaacaggctaagtcatcgattcttcctgttctgaaaaagaaggctcctaatgctacttcagcttctaaaagaggctcttatgatagcgctggtgtcggtggcaaagcttctggtgtggatcaaatgaataatgaggtgacaagcctcttggagcaagttgggatggctgaaatgaaccgtgtatttgtaagaagtcaaaaactcaacagcgagggtataattgattttgtgaaggctctctgtaaggtttcaatggaggaattacgttcggcttctgatccacgagtttt

SEQ ID NO: 193578 - DNA, 690 bp, Zea Mays
tgtctgaatcaccggcgcaacaggagcctgaagcggaggagggggagcagactgaaccggaggaactgagacaccagaatgttgtagcataagagccatgaatgccctactctcagctcgatcctggagtagctgctgctgaagcgaatcctgtctgtcctgtatagtctgaaacatcgagagcatcctctcggataaccgggtctgctcggctgccaggtgagcctgctgctgagtgagagactggagaatcgaagcaatagcaggatcaatagccggaggagcaacaggggtagcactagaactcccagcctcatgatcatgtgagcgtggggggcataggaggcgggggcggaggaggaaccccaaaatcatcatcatcatcatcatcaactgctgcatcctgagcctcgaactgacgaagagcagcatcctcggcctgagagtcaaaaactggagcagaagctggcacaggagcctcaggcgcaggacggtaggacccaaagacaaggcgtgaggcctcaagtgtgccctgaaactggggaggctgaatcaactgcgcaaaaatgtggcacaagtagtgagcatacggcagctggcgtcgagcacgcagaccatccaagacagtgtcctcgatctcacaaataaggaaatccacgacgtcaaactcagagtgagagaccagggcac

SEQ ID NO: 193579 - DNA, 374 bp, Zea Mays
gtgccatctgttcgtcaatggcctatctctcaattggatgtccagaacgccttcctcataggtgaacggcaagaggaattttatatgcatctacatccaggctactctgttcttgatggtatgttttgttggttgcatcgttccctctatggtcttaagcaaaatgtgcttggtttgagcatttctcttttattgttgctgatactagcttcaagcctagtgaccacgatcctgctctctttgtccacacttctcgtggtagcacacttctctatgtcaaacacatgatcatcgtaggtgacgattcttagcacattgcctctgtgaaaaagcagcatcttagtaagacattctcgatgaccgatttgggtccc

SEQ ID NO: 193580 - DNA, 501 bp, Zea Mays
cctccgccgtgattcgtgtcgttgccggcccgacttgtgcacgggatgggcagataagggcgcacggtaaaagatcttcgccgacggtgagctggcgatcactccagtgacctccgtggccctctctccccctttgcggctgaacagattaactcgccggtgaccgccgcttcctggctgtgtgccgcgtgtccaagcctatccaccgcgtcgccatgactccctgtacccgtcccatcgtcgacggggaggttgccacggcggtggacacgaattcaccgcgcaagcttcttccccatccccggccgccgcgcgtcctcctcaaaattcacggccaccgttttactctccctataaattgagtccatgactagctccgtaaggtcctaagcttaccagccaccgttaatcagccacaatcatccactcgtgtgctcgaattcggagtttcccccaaatccgatttccgccaccgtgaaaccaagctcaccgtcgccagcc

SEQ ID NO: 193581 - DNA, 709 bp, Zea Mays
tgatcttcttgtccttgctaccgtaaaagcacagctgagggccttgaatcgctcaaggggctcaagggacctccctgagtttgagatgtttgagggcactgatgagattacagaaatgacacacacagatggagatgatacattgagtcgagggaaaaagtcaaagcgcatgaagagttcatcgaagaagaaaactgacatttccaagcatttagatggactcaaaactggttctgttgctgacagcagaacattggccaagaaggcagtaggtgatgctttgagtgagagaaaatctggacgcacactgagatccacgagtaagaaggaagatgctttagagggtttgaaaaggctggcaaaggatggaattcaggaattaacagggaaaagcaaagacgcccccattcttaaagaaaaaaatcaggggcatggggcaggctctgcacacaagaagggtagaatcacagaggatgggtatcatagacttggagatagcaatgccaaggatcccatttttcctggcaagagaagattgggacataacgaaaactcaataagcaaacgagtgcccatctcagagcatggtaggaagaagaagaaactttctgaactcatggcagagacaggcaagcctaattctgcatctagtggtaagagcaaaactcgagggaagcgttcgttgcatgattcagctgagaaaactgag

SEQ ID NO: 193582 - DNA, 1494 bp, Zea Mays
tagcttgtcatggaaccgctgcaaggggcagcagacttccagaggttgtgaccaagagttttccacctcttccaagaacccctctaatctgatccagaaactttcaaaatgaaatcttctttttccttggacgagatcatgtagccccaatagtaatggacaatgatcagaaatctgggatgcagagctctgcaagagacaatttggaaacatgtcctcccaatctgctgtacagaaaatccgatccaggcgaaccaaagtaggtgaggcccgttcattggaccaggtgaacttcctacctgaaaggggcagttcctttagaagcaagtcattaagcagccgcctaaaccttcccatcatagctctatcaagattgtcattgctcttgtcctcagctctatatattaggttgaagtccccaccaatcatccacgaaccgaggcactgagatcgaatcaggcgcagctcattaagaaattgaattttatgctcgtcgagttggggaccataaacacccgtaaaccaccaagccacaccatcctgctgctggaattgaacagagactgaaaaattgtctattctagtttggagcatcttgcagaccgaaatcctccaagccaaaataattcccccccgcgtaccagccgccgggagaacaacatactcttcaaaatcagagcctaacagagagagaatcatatgccgagaaatggatgctttctttgtttcttgcaaacaaacaatatcaggcttagtgttatcaatcacaacacgcactgagtctcttcttgccttattgttcagaccccttacattccaaaacagaacctttgaaggatccatcggaaaaaccaaataaaaccactaggtgctgctagaacagcaaccttactcaaggtcttctgggccttgcccggcgatacacaacacattaacaggttcaaaaacatctgggactgtccatccaaagagggctgacagtgctttgatatgagcttcagagagtgagtttttgaacaagttgccataagcttcaagggctttaggacttaacaactctccatcgcaaggcacatccaggcttcttatcaggtcagcttgaatctgtcttcgtgcatcatttgttttattatctcgctttgccaggcgactgcttctgcgtgggatgaagtcagatggaagttgcttggatcgtcttctgtgggggagtggtggagggagcagaccatccaccttcctggttactttgtcaacaaaagcttggactgcatttccaataccattctattcttgaggagaagaggcttgatttggctgaagggcttgagaatcatacttttgccacctgttatcagctgtcctcctagtataaactttgagggacgtactgccctggccagttaaatttttattctgggctgcaactaaactgagggccccagcaggctctggagggggcgaaatttggacgctcagttccagcgacccagcaag

SEQ ID NO: 193583 - DNA, 1402 bp, Zea Mays
tcctgataaccaagatattgaccgcgagtttcctagtccagttccaagatctgagaataaggacattgctgtggacagctcagaattagcaccagcgtcacctgaaaatattactacgaatttgcctgtttcagatacatgcaagatggaggaggtagtgagtcaacaacaagtaattggggctgttgtatcgaattcttcagataaccattctcctcaatctaaagtttcccctgtatcttctaataatgaagatacgaaacataaataccccagttcaaccccaaggcccgagaataagaatcctgcggtggatagtttactttcaacgtcagctgctcctgaaaatctaacgacaacttcaacccatgattctgatacatgcaaaatggaggtagtgaatcagccaaaaacatttgaagcggatgcatcaaatgctccacttcatcaacttcctcattctcacagtttcctggtaccttctgacaatcaagatattgagtgtgaatgtccaggtccaactccaagatctgacagtgaggaagctcttatgaacaactcagcgacaactgcatcagcctctgatacaagcaaaatggaggagtttgtgaatcagcaaaaaacccttgaagcagattcatcaaatgctccacttaatcaatctcctcattctcacattttctcagtaccttctgacaagcaagatattgagcgtgaatgtccaggcccaactcaaagatctgacactaaggaacctcttatgaacaactccgtgttaacatcaggaccatctgaaattcagacgacagcctctgcagcctctgatacatgcaaaatggaggagtcagtggatcagccaaaagcgcttgaagcagatgcatcaaatgctccacttaatcatcatcctcattctcacattttccgtgtatcttctgataatcaagacaatcagtgtgaacatcctagcccaaatccaaaatctgacagtaaggaacctcttgtggacaactcagtattaacatcagtggtgcctggaatgctagcgacaacttctgcctctgataaatgcaaaatggaggagtttgcgaatcagcaaaaagcacttgaagtggatgcatcgaatgcttcatttaatcagcctcacattttcgctgtatcttccgataatcaagatatggagcgtgaacgtcctagcccaactccaaggtctgaatgcaaggaatcacttacggagaactcagtattaacatccttggcgcctgaaattctagcaagatcttctgcctctgcttctgataaatgcaaaacggaggagtttgtgaatcagcaaaaaccaattgaagcggatgcatcaaatgcttcacttaatcagcctcatgtttttgctgtaccttccgataat

SEQ ID NO: 193584 - DNA, 374 bp, Zea Mays
ttgtttgtagaccaagttctagggtagtcggaggcctatccaaaacactgcctaggtccgctcgtggagtaaagagaacatctatatttagagaaccgagagacatcctatagtcctatatatccagagaacgttgtggaacagttatagaaaagaatcatgtctacatttttagttccacatcagacaagttaagaagtacctatcgaccaccacagtccgaaactcgggaccaaacagagtgtaaagggcatacgtggtggaactgaacgagtggaatcgtgccataggcccaagtgcgtgtaacgatgcaactagcctgcaactttatggcaggcaatcctgaccggaatccgtccgtcggccctcctgtg

SEQ ID NO: 193585 - DNA, 548 bp, Zea Mays
ctttttttcaagacaagttgcacagttgtaccttcagcaagacaatgcatatgctgctatgagtgctatgcaggttctaactatgactacaaatgcataccatgtccaaagccgaaagactatgaaaatgaatcatgatccgtccaaggtgagataaaaaaaatgactgtgcacttgcagcatattgagaatcaatcatcaattaatcgtgcataaatatactaaatattgttggattcatgtttcgtttgcaatatgttcttaaggaacctcgtgctggcaatactgattctggaaaggtgcaccctcagtctatagtgtcattgtttgagtcacaatggagtacccttcaaatggtggttctaagagaaatattgatatcgtcgatccgggcggcagatccactctcatcatggagcgctgcagctcgtcttcttcgatcattttacccactcatcacaccagctggtcagagtggcctagcaagctcacttgcaaacgctgctgacaagcttccaacaggcacacgctgtgccgatccatgtctt

SEQ ID NO: 193586 - DNA, 754 bp, Zea Mays
acttcattatcaggtacatcctattgttgcttttgtggaaattaatcttgctatgaatgtcactgatgcttatgttaactcttgcaggttaggcaccttgatacctctgaaaagagtgaatttcacaagttacagcaactgaaagatgaacaaggtaatccatgtttaactattgtgataccattatgccacaatcaagcattgtcgagggatgtgatgtgcaaagattattgatgagtattccgacaagcatattctactgttacaggtgaattgtccagcagtgatgagaagaagtacaaggcactaaagcgtgccactgaaagagagatactgcagagtgctgatgtcatttgttgcacctgtgtcggtgctggagatcctcgtctttcaaacttccgtttccgacaagtaattattgtcgcctcatgctgtctccggttagctatgattcctgttgtgtaatattctgatgcaacagtaaactttattgtcaggttcttattgatgagtccacacaggcaacagagcctgaatgtcttattcctttggtgcttggtgtcaagcaggtaaaatataaacttgtattttcttttcttttctttttatttatcctttattaatactcttgcaattataggttgtccttgtcggagatcattgccaattgggtcctgtcatcatgtgcaaaaaagcagcccgtgcaggattagcacaatctctctttgaacgccttgttatccttggagtgaag

SEQ ID NO: 193587 - DNA, 1127 bp, Zea Mays
attgaggtggcgatcattttatgcaacacatgatatggcatggaaagctcattacagggaagtgttcgaccatggaatccgagaagctttgtgctgcctaggacgtgcaaaatatctgtaggtggcagtccaatgattttacaccttggaactccaatattagtttagttatttgagctgataattatatttactaatttagaactgtattggaagaagatgaggtttattctgttgcaagactccttggtgatttggttgcatatcgtgcttctgggacaggacatttggagctcttagcaggttggctctttgacgctgctttcatataaaaaatctcagtgtttgcctgtttttcccttttaattcatttgacttgcaattagtcaacaaacattatgcagtttgttgtataacggtcaacagtcaacacatgtagctatgttaggacttcatgcacacagatatcaacaagtaatttctattaggtttaaagttcaggtgttcgacatacaaatcacatcacttgattcaccagtgtgtgatatgtttattgctacctcaaaaaagaatacaatgacaaaaatgctactatgattggatctgtgtgtccaccctccttttttgccttctaatttgtcaatatattttcccctactatttgcaagatccttcgattttatccatggatgattaactccaatgtgactggaattatgttgtgttcctttgtgtaaaacatatgattttgcgaatctatgtattatgtttcaattgaattgtttttggttattattggtgtatgtagaggtactgaatatctcctatattgtacatgttgtagggcttgctctattgcagaagcacgggaatttatctgaattgcagactgaccttgtggaggcatcccatgagcttatgcaagaagctgctttcctccatccatttgcggaagcatgttatacggttagatactgatgctgttggttgggacatcatttctgctcctgccagcctactgtggttgcaactgacatgattgtactgcagggaccacttcttgattttggacgaaatcctatcctgtttccctgtgcatgggtttatagacaaggtgtgttaactcc

SEQ ID NO: 193588 - DNA, 381 bp, Zea Mays
cgaaaatgcaaggcaatatagtttcctcccaagaaagtctggacgaaacgttgagcagtgagcactatgagcctacttggttgaatcaatgccttgcacttgtgagccaatggaccaccaggttgattcagccactcatcctccatgtcagcataaaacatgtcgccaatggcaaggacctcagcctctgtcgaaaactttggtgcaatatccccaacagatctcttctttggctccttcagctttgcatcctctggccaagctgcctcaatcttgctcagagaaatcccaagtcctttcagcttcttaatatgttcctcatcaaggaaacatggaggcgaggctgcatagcatatgaactgatcgatggccactttcttc

SEQ ID NO: 193589 - DNA, 326 bp, Zea Mays
atcgaatcaagtcagattcagggaggggaaggcaaaaccctaacctctctcactccgccgccaccgggggagcgcgaggaggacccttcatcgacccgccgcacgaacaaaggtatatttctctgaatctctgttctcgccccacactgccgctcctcttctgcttcgatttccactccatattagagaggatgcttagggttttcagattcgataacttgtcctgctgattccgatccgccttcctccgccgcagctcccatggccaacctcggcggtggcgccgaggcgcacgcgcgattcaagcagtacgagtatcgcgccaa

SEQ ID NO: 193590 - DNA, 587 bp, Zea Mays
caacaagtagacttactaattgttatacaagttattttacgcgctagaactatcatacaccattaaccaaggcatccatcacaatcatcaaatccggcatatatgtacatcaaaacgcgtttcatccactagttcgcgtttgagcttagacacaacatgagcactactaatttttacccacgaccataaccatgcgcatctagactacaacaagcaaatcaccgtgtttacagacttaacccaaaccatctaacaagttggttaaccagtataacacttagcaaagtgttttagatttcgcaactcaaaaacataggtgggagcaggttaattagtttttcttaaccattttctcaacttaaactggacaacgcaccagtcacttaaaacaccatattttaggagacctcacatgtcgagcatcaatttataacataagtgactcaacctctatcacgcttaacaactaccacatcacccgatttatctatttggaacatcacctgtctagcgtactactagtaccccgcattttgactcgacttgtaattatagaggaagcaacggctaccttggcatgccatcac

SEQ ID NO: 193591 - DNA, 451 bp, Zea Mays
aaacaggagcttacctcccatgcaatgtcaagtgattagatttttgttcaaattaaaaggcaaactattgagcaaggtaaaggaagttattgtctttactgctaagcaaagcgaaggagcaagaagaatgacctcgattgaaattaagtcacagtaatttcataggagtgaaatggagtgatataatttgtagaaactaattgtgaaaatgtaggagtgataaactttgcagaaaccaaatcgaacctggcaccgaaggctgctttgtctgtgtcacgctcgcggggtcgctcctaccaacagcaacaacaacctacaagaggcacatatagtgttatcgagcagctgcacagtgaagcaaaggcaagactggcggcttatcagggagcgtgctaaatgaaaaaattgttgtgtcgaaacttcagatgattggggatggtagtaccatcaa

SEQ ID NO: 193592 - DNA, 789 bp, Zea Mays
aaagatcgttatcatggcatgtcagaacgatggtggatcattgttgaggtgtgtgattacatgtattgtacttatatcagaaagatggtgcaaaatttatttcacctgtctttcactaaatttattatcttgttgccatgccttttttgaggggtcaagagactgtttcctcttttctaatcttctttatggggtcttttggtatgtaactgaacaatgcaattatatttgctttgcttctaactttgtgaggagacacatatagacctagaaagattggtagtaaatgcatagaaatgtcattattttcaggaacctcttatataaaatgcgatgtgcatgcaattcttttaatggtcatataaatttgcacctttttaaagattaccaatttaaactttttgtagttgattcctatcgcaggcatgcagtggtcagtactcagtaacattaacattttattttacaggattctgaaaatgataccatttatcattcagagctattcacattaacgaagaagatggcaagaggaacacctacaaagatatcttttaatgtaccaatatttgaacctcatccgccacagtactatatacatgccatctcagactcatggctacatgctgaaacactcttcactgtttcttttcataatttgacattgccacaggtgaatcgaacaatcgctcactgatgctcgttaatgcttattttgattattgtatactgaatgctgcacccattgcccatgcagacacaaataacacacacagaactcttggactt

SEQ ID NO: 193593 - DNA, 441 bp, Zea Mays
tgcaaatgtcaggtccaataatgccgagaggttaacattaccagtccaagggccactaaggaaattgttcgctgacatgttatgtcaccagaatatttacttacccgttacatcattgcaagaggcaaatgataacaggaaggaagtcagggttgaatccagtcaagaaactgttagtaatggtttccataggccaaagacaggagagtctgtgatttccattgaaaatggggagtccataaatgatgcccagacacaagaaattactcaagcaataatgccaactggttcttctgtaagtgataaggatgcagaatcacctgttatgggagacaatggggcacatagtactacaagtatcattatcaaagagaagcatgctgacggcgatcaagctgatgatgcacttgattctcacagcatactgattttgatgtctag

SEQ ID NO: 193594 - DNA, 480 bp, Zea Mays
gagaattgatccagcttctgaaatctcccatcaaagctcgattgatattggaattattcttgtcttttgctctataaatcatgttaaaatccccagcaatgatccatggcccttcacattcattcctgaccacaccgagctcctgaagaaaggcaagtttgaggttatcttgatgaggcccataaacacctgtgaaccaccagagttgacctgacagtaactgaaactgaactgacaccgaaaactccttgatgacagaaactccagtggaaaggtttctgtcgcgccacgctacaagaatacccactctggttccaatggcggggctaaaaataaaattactatatgtcgacccaagaattgtaataatatcaaaatcagagatggatgacagcttggtctcttgcgggcacacaatagaaggcattgtgtcaagaaccaaagatttaatagagtctctcttagcacgatcgttgagac

SEQ ID NO: 193595 - DNA, 442 bp, Zea Mays
gcgagagtcatcctctacctcgtgaccagactgccgctaccgatgccgcgattctcgcgctgcaccaggattctgttgccgctttcccctggactcgatcatcgcggactctgcctataaaacccagccgacgtccctgctcgtcaccagaaaaccttcgtggcgcatcaagcacatggtgagagataggggagcgctgagccaagccgggagccgccaccgtgcgaatcaagggtcaccgccgtcaaagctatccgtgccatcgttcggagtcctagggaaggcgcgggggtcatatgtgcatcgttaattgctcatcggagcaaaatctccgccgtgactcacttctcaccgtggtctgggcactaggctgcatacctctcggtgagtaccccccaactacttcccaccgtccgtctctagagaattccgcctctggatt

SEQ ID NO: 193596 - DNA, 451 bp, Zea Mays
ccttgaccacccttgtttcttaatgatccatgagcggtcattttattttgcacatccttggtgatctcgttgtttccttgtaacttccttgggtaatgaatttttacttcaacccttctgttggaaccatacctatcttacccttgattattctctccacttcgccacttcacgagtcttgccttaactctatccttggttatgcttttcacgattatcatctttacccttgtcacctctatatcttaccttgatgcttatgttatacatgtcctttaaaaccttttctcttccatctcaattttatagttgtattttacctatttttccttggttgtatcctcttccttgttgcttgcgagttttcaactccatcctttgttgtgctcctgttgggtactacatttacctttctcatctctcgatcctacctcggtaactaaattatgtc

SEQ ID NO: 193597 - DNA, 634 bp, Zea Mays
atccgaacctgggccagcagccgctccagggttgggcgcgtccatcgccgcggccatatcctccaagccagacgcccgaaaaatggctagcgacacaagcagcagcaggtgggcagtcctggcgatccgctggtggctggtgcacaagtgcagtactatccgcgctgcgggcggctgagttccatggatctgccccgacgacgcccgcaggaacgcgcacaaccaggcctcactggacccacctgcgtgcgtgctgagctccgggaggcctacgactggccgggggagctcgctggcgccgcgggcgaggggtcctggtcgccggggaagggaaggcgggcgtgtatggcgtggaggagacgaggcgatgcggctcgcgttgtggcgggggaggtctgagcctgggcaggtggcctcggacttgaccactcctctcctctggcctcgacagcgaacggcggtcgcggtcgcggcggcaaggaggaggcaagcaggcagcagcggagtggaggaggggggagaggggcgccgagagggacgggtgcgcgtgtgcgtggatggatggactgcgctgcgcgcggtgggtgtgtgtgtggtgtgggtgggtggggggtggctacatgggtgggaacag

SEQ ID NO: 193598 - DNA, 455 bp, Zea Mays
cttgttgtctcgatgatctgccgtccactggtccatgcattgcttggtgccctgccattgcgattaattaataagcatgagcaacaagagccataataataatgccgtatgctggtccctgctgcccctgccgttggttggtccctcacgtgaaactccagcagcaggctactacacaccaaggactggacgagacgcacgccttgcctctgatcgatgcttactatgctgctgctgtgctagctctctccgtagaacactggtcagtgtggctagccagacgccagactcttttgcaagcgtaggttggtgcgttaattaagcatgcagttcttactacgccatgaacaaccacacagctagcagcacatgatgtgcagtgcagatgaacatcgttcaagttcagctaagccggtacggtggcgtctgtttcatgcatattattatccctagtc

SEQ ID NO: 193599 - DNA, 309 bp, Zea Mays
cgatgacgatgagccttctggcaaaagggcaaagaagagcacatctgaagtctggcaatatttcaccaagtattgggtgacagtggaggtggatggcaagcaagagagacagaggtgggcaaaatgcaatttcagagggtgtcagaccaagactagcaagcatagagctgagggaaaatttggaacaactggtttttggacacatctgaataattaccaccatgtaaagaaaggacaacagcagctcacaactggtaaggatagtgagacaggaattgctatagttaaaccttacaagtatgatcaaga

SEQ ID NO: 193600 - DNA, 285 bp, Zea Mays
taatcattctgcagagggattgggctgagcttaacaaggagcttcaagagcaacgagatcatgtccgtgttttgtctcttgacaagaaaaatgtcttcgacagctgcatgaagcaggtagaggatatgagaaaagagctaaataactcgtggaaagctgtttctgatgctgaagcaagggctgccattgcggaggtttgttgaaatatttttattgtactggactgatagtattttatttgagaatggggcatatttggcttgtttctctttatgcaggccaagt

SEQ ID NO: 193601 - DNA, 413 bp, Zea Mays
ctgagttgttaacaaataacaagttatctgagctggcatgcttggcattgtatctcatgtatgagaaaaaacaaggaaaggattcattttggtacccctacattaaggaacttgaccgacatcgaggaagggggcagctagctgttgaatcaccacttttatggactgaaagtgaactggattaccttactggaagccccttgaaggttagtggttttactatgttgcatctcaattctcaatataacattattgctttttgatattgaaggattacacgatattctgtaagaacattaatatcctaacatagctgatatatttgcaggatgaagttgttgctagagatgaggcaataaggagagagtataatgagcttgacacattgtggtttatggcaggttcactatttc

SEQ ID NO: 193602 - DNA, 448 bp, Zea Mays
cgacgtcatggtgcacatggagcgaaggtcagccgaggggaatagatcgtgccattctgttgtcgctaagaatctgtcaatcttagtcatggttgggttaatttgttcatttgaccaggtgaatgctctatcggtgagctctagctcaaggaggtgtaggtgatcaatcgtgttattaaattgcctcatgagtcttctgttgattgatcctttgtttttctcccttgctctcctgatcatgttgaagtcacctagtaatacccattctggtctgaccatggcttggatgttacggagttcagaaaggaaaatcattttttcattgtccagctgaggcccgtaaacccccgtgaggtcccaaacctcctcatgtgatctagagctgatcctgactgatagagaataagctgctgaacatggcaagagggtcatgtcaaaggaatccgag

SEQ ID NO: 193603 - DNA, 526 bp, Zea Mays
ttggacgcggatcatgaagatgacgtaccccttcggttccgtctcctagacaagatcgcaggaccggcaacgtcccgagggctcgttcaccgctttctggatgaagacgaggatctactgctggctgaagaggacgagccgaggaccttcgagcaggcgcagcaacatgactgctggaggctcgccatgctggatgagatgacatccatcgaggcgaatggcacctgggagctggtggatctgccaccacatcaccgtccgatcgggctcaagtgggtgtacaaggcaaagaagaatgccatggggattgtcacgaagcataaggctcgtctcgtcgcaaaggggtatgtgcagcgtcaaggcattgactttgaagatgtgtttgccccagtggcacgacttgagtccgtaagactcttgttagcgctggcggcgagcgaaggatggactgtccaccatatggacgtgaagtcagcctttctcaacggcgtgctgaaggaagaggtgtacgtcgctcagcctccgg

SEQ ID NO: 193604 - DNA, 279 bp, Zea Mays
cgactgcttgctaggactggtgattgcggtgtgttggttgaggatgccagagatgagctgaagcttctagcattatgtacaaaaggtatttgtcgaattacctggatgggattttgctatacttcacttgatttatcatatttcctttgctcatcagttctgaacaagtgaccacgtctaactcacaactctcccatttctggttgcgcgaatttcttcaattctttcagaaatcagaattgcatgacttttatcttaacataagttagagtagctgtg

SEQ ID NO: 193605 - DNA, 931 bp, Zea Mays
gagatggcatctgctcggaagcccattgatgaagaagaactagtctcctacatccttgcgggactagatgaagaatacaaccctgtggtctctgcccttgttgcacagaaggattctgtctcagttggggaggcatactcgcaactcctcaattttgagagcaggatggctttgctgtatggaggatcccagccatcggctaatgttgctgcccgtcgtggtcgtggtagttctggcccgcgtggccggggtcgcaatggccggtttaatcctggtcgcagcagcaacagcaatgcgccaggaaggcgtggtggtccaggagggcacagatctgatggtaacacaataacctgtcaggtttgtgacagaactgggcattctgctcgcaagtgctggtaccgatatgatgaagacaactattccaactcaaattccaagagtgcagcagcagcaatgcacagctatggtgttgatacaaattggtataccgatacagctgcaacggatcatcttacgtctcagctggacaaactgaccactcatgagaagtacaaggggacagatcagattcacactgcaagtggtgcaggtatgaacatctgcaacgttggtcatgctgttattgatacccctactaaacccttgcatctcaataatatcttgcatgtcccaacagcacaaaaaaatcttgtttctgttcatcgtttctcatctgataatcatgcctcacttgaatactttccaaatcattttttgattaaggatctggacacgaggaaggttcttcttcaaggtagatgcagagatggtctttatccccttccatcagacagttcttggaggggggcttttggcgccatcaagtcatctccatctctatggcacaatcgtttgggtcatccatcattgcagatcattcgaaaattagcta

SEQ ID NO: 193606 - DNA, 551 bp, Zea Mays
atggaagaaccatgacagatttcatgcatgcaaggggacttaatatgtcctctttaggcagggtggtgggtctaaattttatgcctatatgtttttcctggtatgtttggataagcttgcataataatctgacattgtttttttttaaattgatcaggtagagctagcagagaagctcccacacatccagtctatatgcattcatgaaatggttattagatcctttaagcacatcatccgagctgttattgctgctgttgatgacatgcaaaatatgtctgcagctatagctgaaactctaaacatattactaggatctcccagacttgaaaatggtgctgacacggatgcccatattgacaataatttgcgactgaaatgggtagagagcttcctttcaaaaagattctgctggaaactgaaagatgaatttgcacatttacggaaatgtatcattctgagagggctttgcagcaaggtatgggtagtgaagtgaattatgggaacattcatagtttctattccaaacaggcatagtgatactgatatgg

SEQ ID NO: 193607 - DNA, 273 bp, Zea Mays
ctggcggttaattgggccgtcaactcacgttcgattgcttgggtccgtgaagccaaagctcgtgctcatgtgactgagcttagtgcggcccttgacaatcagcaagtatactataatactttacatgaggaagtacatgtattgtatgcccgactacacccagacgtacattctgacactaatttgggagccggaccgtcaagaacagcaatcgaaaggacttgacgaggagttggacctttttcagcctcctcgttccatgaacctggctga

SEQ ID NO: 193608 - DNA, 511 bp, Zea Mays
tatgatttgtaaacattctctctatttgttttgaaaggtgaagtaattggttctctgtctatgcctattggacgaggagcaaccatgttgaaacgagctccttctatgaggatgattcagcatgtttctgatgtcaaacgggtgctaacatgtcctcttacaaagaaggtaacaagctcttgctcgtcagtttggaagatatttggaattcatgttgcattctttgttgactgatgttcagcccatactgatcaaaaagcacattttcatcttgtagggtcagatacctaattttgaggacaggaaaaaaggtggtgttttagtactctcaagctgttatgtggaacgttctactcattcatatttccagaggttgaaagacagtataaacaatgtggagagcgacttctgtataggacttagcccagatggtccatgggaaagttttactgcagctttgccagtgaccgtccttccaaaatcgcttaataataaccgttttgcatttgag

SEQ ID NO: 193609 - DNA, 340 bp, Zea Mays
gtttggaagagtaagactgagatggtgtggaagtggaaggtggtgtgatgggaataagaacatctggggtagaaacagtaggtggtaatactaatgaagtttcagaaatgggaggaaggctcatgaaggaggtagactctgtggaattaaaagaagaatgagtggaagagttgtaaaagaagggtcgattttcattaaagctcacatctcgagaaatacacatgcgacgagaagatgaatcataacaccgatagcctttatgttcagggttgtatccaagaaaaacacactcaacagattgagcagtcaatttagtacgttcacgaggtgataatagtac

SEQ ID NO: 193610 - DNA, 279 bp, Zea Mays
gcctagttcctaggttgctactgtgtagcctgttatatggatgttagtgcaggcgagcgaggtgaggaagagggggcatggaggacaaggtggtggtgctggcagttcacatttgtaatggttggagaagtggtctaaaatgagggggaggtgagaatgacagcgatggtcatagttctctgcagctaaggtcaacttgacatcatccaggtgtctgtcttgccacccgaatggctgcctaggtgttcggcagcataggctgtaaaagcgaaggtcagc

SEQ ID NO: 193611 - DNA, 467 bp, Zea Mays
tgcacctagtactttcatgagattaatgaatgaggttttacgtgctttcattggaagatttgtggtcgtctacttcgatgacatcttgatctatagcaaatgtctagtagatcatcttgatcatctacgtgctgttttcaatgctttacgtgaagcacgcttatttggtaaccttgacaagtgcacattttgcacagatcgtgtatcttttcttggctatgttgtgacaccgcagggaattgaagttgatcaggctaaggtggaggccatacatagttggccagtccctaccacggtcacgcaagtccgaagctttctcgggcttgcggggttctatcgtcgatttgtgaaagatttcagcaccatcgcagctccattgaacgagcttactaagaagggtgctccattttcttggggcaaggcgcaagaggttgcatttgaaacattgaaggataggttaactcata

SEQ ID NO: 193612 - DNA, 384 bp, Zea Mays
cccagtttacagagtacattgtcgtcccaatagcttttgagatatagctaggggtaaaacttcctgagatgttctatgttccatgagttcccaatttctgtgctgtccatttgagtgagacgatatgatccaggccgagtgacttctgctactatgaatggtccttctcatagtggtgacagtttgtgccgtccctcccccgttagaattcagcggaggacgaggtctcccactgcaaaggatcgatatcgcatggccttgtcatgatagcgccttagagtttgctgatatcaggctgactgaatcactgtattcaatcgttcttcttctagtatatcgacatcctccagtctagtagcttcagcttctgctatgttttcaaag

SEQ ID NO: 193613 - DNA, 351 bp, Zea Mays
tgtgtcgcacggtatgcatccacttcgtccatggatacaccaacctttggaatatttgcatgccatccaagttcacctctagggaagaacagtggatatgatagcacatcgtagcatccatggtatgagcggatgtcgtggcttgacctatccttcccatgtagcataacactcttgttgaactggcctcgccgttcgctcccctcgatctagacagcggccacctccgaagtgagaggtgtgttatatgtcttctggttcaacgtctggtcaaggttcaatgcgatgtgatagtcagcaaggttctcaacatgacccatgctcctaaggtgctcagagtacagatttcca

SEQ ID NO: 193614 - DNA, 353 bp, Zea Mays
gtactactagattaaggaaaccctaatttttgtgattgcaggacaactaattgcccatgctaacaagtcatgatgacaacttctaacacacaatcctcagggaatgcctcacagccgaaatacaaattattctacaacaaacaatcaactgaactacctgaactaagccaccaaacctcgattaaccttacatcagccactgcacctaatcccaaccacccccagatatcgatgctccctccaatttgatcaacatgcaatttccaccgtcccaagtccactatactatttgattggaacccatatatttgattgaaacccatatacttcacaaaggcgccatttccccccac

SEQ ID NO: 193615 - DNA, 508 bp, Zea Mays
tgtatatattctggtgatggtttgtatgtgcactgattgtttggtagatggggcagactcttgcctcacttttcttcatgtcgggacactcctactgcttcgagggtttgaaggtatattttccctcgtgtcccatgatagatcgttttttgttgattgtattgtttatttttgtacatataatatcgtaatccaatttcattttttagtcagagcttcgacttgcaacacatttgaactcggagctccctgattatattaaagtagccgtgagtgcacgggcaaacgaattatcacaaatctctactactctataaggagatactgtgggcgtccacatcatcaccaatgcccttgccccggtctagcgcgcgcctccgccgcctagattctcgcgccgcgcctcgtctcccaaatcgcacgattgtagcggtgttctgccaccatcctcttcccgtgtgtaccgcctctagaaccacgccccttccaaccacggcgcctcctagca

SEQ ID NO: 193616 - DNA, 491 bp, Zea Mays
gcgacttttacgttatcctaaaggttctgatccatatgtggctggtgtagagaggtttattgaatttgcatataaagataagcccgaaggcaacaagatttattgcccatgtcagtcatgcgtgcacactactgttcagtcaaaagatgagatgtatggtcatttggtgtgcaatgggattcttgacaattatgatcaatgggattttcatggcgatccttcagtgcatattagtggtctagataaaaaaacacaaagcgatgaaaggcatgttaacattgggcaaatgattgaagatgccattgggcatatatatgatgacgcacctatggtagatggagatgcaccagtgatcggacccaattcagaagttgaacagttttacaaacgggtcgaagaatcaaaaaagcctttatgggaaggttgtgaactcacagaggtaaccttatttgtgttgttgtttaatgtgaaatcctcaaacaaatggtcag

SEQ ID NO: 193617 - DNA, 398 bp, Zea Mays
gagcccctacacactgatgtggagatggagatgccagagacacttcaacgggcaaagcatttggcccgagtgtatgagaggtgtctgctgctatctgccagctccagcacacctcatatcaggcaccagcagagccatccaaatcctcaacaattgcaacaacacgaccgacgtcatcggcctccagcaggcctcgcttccggtgtctatctcctaaggagatcgctgctaagcgagccaatggcgaatgttaccattgcaaagagaaatattctcctgatcacaagtgtactggtcacggcgtgttcctgctagaattggaggaagatgacaccaccacagaaactggttcaccagaagacttgggtatttcgctgcaggctatgaccagaatagga

SEQ ID NO: 193618 - DNA, 1317 bp, Zea Mays
gcgaagtacagctgggacgagcttgggaccagtagggaagagcgctgtaaaaggtaacaattatgtatgctgttttttcttttccaagctagtttagtttagctatcaagtatgggcctggaagctggctattgattttgtcaaagctaggagttaattttttgctgttttgagcttgggaagggatgggggaaaacatgtgagcaaacaatagttgttagttactccctcaaatgcttactaagatgctatgagttgagattgcacaattcgtcttactccgctgtagccgtttacacttgaaacacgtgcaaacgaagcaagtttctagctgtttaaagcgaaatcagcaagctaggagggttatagtttataagtcgagttagcaagtgcttgctctttttgttgcttgaacgcaaggcatttctaatgagcaggctcataaacattgtttctatatatgcatcttattgtatatatgcttcattaagggtacgtttgatttctaaaaatattagtcaaatgctacttctgcagcagagatattgtttgtgtatgcgcatagtaatttctccaattccccttctttttgtctgttatgaaaattatttttgacaactaattggtgggctctccttttggagctttgttctatttttctctctccacaaccttttgtgatacatgggctaatccatctcattcacagctaaacctagtgcacagcggaaccattctggagatttgaggacacctactcacatacctgaggctgcggtagtgatatttctatttttcttcttccctatgactttcatttaagtaaacaatggctaatccatccttacatctttttgcttgcatttttagtgtgcatatgatccgtgtgagacaccaaaggaatccgagtccccacgctttaaagccattatgcaggctactagtgcaccgaggaagagactccctgcagatataaaaagtttttcacacgagctgaactccaaaggggtgcgcccatttccttttttgaaacctcggggcatttacaacttaaaggtaatccgagtccaccgtttgtgtgagacaagggtcattcatacgtcaccttgttttttttactctacccattccagtttcttaaatatttgttaataacaatactttctcctgttatctatgcaggaggtaataaaagttatccatgtgagatttgagaaggcaaaggaagaggtaaattcagatttggcagtttttgcaggagacttggttagcgtaatggaaaagtatgcagactctcatcctgagtggaaagatgcc

SEQ ID NO: 193619 - DNA, 472 bp, Zea Mays
cccagtgttgtcatattaagagctggtgattgggttgaatgtgaacagatggcttcatatataaacaattgccctgccgagttggacaaggtcgaagagatcaaaacggaaatacttgtaaagcactcaaaaggcttttcatggccttcagttgctgaactttgtgagtggtataagaacagagcaagggacattgactgcttaagtggacagctggaaaactctctggccatgatagagcttgcatgtcagaagggcattgtagagttgcagccattctttgatgatattaaatgcctctaccaggttgtatattctaatgaattgaatgagtttacaatgaatcttttgacatgggaagatctgcctgattatgaaaagttcaaaatcattctcaaaggagtcaaagaagatacagttgttcaacggctagaagaaaatgctatccgttttatgaagaaattatatgaac

SEQ ID NO: 193620 - DNA, 325 bp, Zea Mays
ggaagaggttgctacggattttcctcatggttgtgttctcgagcggtctgaggcgcttgtcagagaggaattcagactccaacactgtgctttgttcgttgtggtcactggttcgcgacctcagtgaatgctcttgcagcggtggcagcagctgggttcggtttgctggagaactcctcattacatcgttctttccaggaggacatcgtgttgatctttgactcggagcgcatatcaaacatggttaacggtgttgtgctcaactcgccttcaggttcgttcaagttcatcaggtggtctaggcttgctcatgcagatatagtta

SEQ ID NO: 193621 - DNA, 284 bp, Zea Mays
cggcgttgaacacgtattcactgcgccggtattcttccttatctccggccgcctgcgttgctcggccaaattgcacgccaccgtcgaagctccctataaattgagctcgcggttagctgcgctacatcatcatgaaaccagagccccaatcccaccctcaatcgttcgccagagctcgtgaatttcgaattctccccaaactggtctccgccaccgcatgatcaagctcgccgtggccagctcgattcaggttagctcgagtccctctgctgcttgttctagca

SEQ ID NO: 193622 - DNA, 816 bp, Zea Mays
ggagcggaaggagagggagagggagaggcgtgttgcggaggagaccatggaggtcaccgaagaggaagaaggggcagccgtggactctgatgtggagggtttcgacattgatttagcagccatagatccagttcgaggtgaccttctgttcttttctgcatttccgggaagggtgaaaatgacaattttccacattccactgcaaagttgaattctactatttgcatagcttttttagcaatatttgactaagtatgaattgatactgcgctcaatgtaggtcacattggagtgtgtagcttccaatgaaccgggtttcagctttgccctctgtgctctgcttttgttagctgatgatagatccagaatacttgggctgtcttgtcgatttctaaacttgcgctcatgtggggtgcaagtgcaacagccaacaggaatagtgtttactcttatttgttggaaaccaataggcacacgatagcgctgaaggattccattcctatacatatacatgatttgcatgaccatcggtgcacaaaacaaaaatatttcatatggttaattgtagaactccggtaatggactactcactaccagtcaatgctcctcattagtatcttacttgagcattagtaattttctggtgcgcttatattcccttgttggctgttgctaggaataggcattactgttaaaatatgtttctggcgtcttcttgtctgcaatacgtttctgtttaattgagcggcaaatatggttttctatgcagaatttgggttcttgtcgatgggccatgaattcgacagttacccgaag

SEQ ID NO: 193623 - DNA, 512 bp, Zea Mays
caatcataaaaaatataaaacgaattcccaaggcattgtcataggtgcaatcaacactaggatttgccatcattgaatttggatgcagctatacatcaagatcaatgtcttaaaacaacactcttttttatgaagaggtaatatgcactaagaacaacccttaccaacttcaacaattcattttaattcaattgtcaaacatccacaccagatgaatgtataagaagatcaaacacctcacatcaaagcaccacaaaacaagtagttccattgaaacaaaactcctaatcttcctaaaccttgttcttgacgtcatgaaaaagataatcatgtaatctaacgttctttacaccccacaaaagggagaaagtctatagaactaatggagcaataaagccaacaagaagccaataacattctgtgcggcacagttcatcgaacaaatgccaaaaactccacaaagagcactgacagcacagcaacaacacaatacattgcttaactaatgtcac

SEQ ID NO: 193624 - DNA, 535 bp, Zea Mays
ttttgcaatggagcaaagagtccctagtgccgcttggcgtactttcgtactgctattcttcaacaagtcagcaatcatgattatcaacccatctcttctcacaacctgcctgttagatcgacttctctgacatatctcatcaacatactggagtgcttgtaggatatcactttctgtgctgtcagaagtcaatgacttacgagcgacgtcaagtttggccgcctcgttgcgattcatccattcatcaatagtgttcctcagagctatgcttggatttaactcagtgttgctgagctccatcttagttacagggcagacaagcctccttccactgctaagacattcattgaaataattcaaaatggcattgcgttcaaacgtaacaccactgtcaatagaaacaggatcccgcataacctgtttggtaagcgggcataggaacgactcatatataggttcaacacgcaagctatcagtggcctgtgacattgaatcataatgaccatcctggacttctgccatcactagtgaaaca

SEQ ID NO: 193625 - DNA, 373 bp, Zea Mays
gccccaagagcttagtgaatactttgtgctgccagggtgtgtgaaggcgttgttcattgagttgagacaaacttttatggtcagtcaggatggtgaattcgctatgttgcaagtaagcccgccattgttgaacagccaagataacagcaaggtactccttctcgtaagtggacaaaccacgagacctcgggcccaaggctttactgaggaacgcaagagggtgaccattctgcatcaaaaccgcgcccacaccatcatcgctagcgtcggtttctaccacaaacggtgtagagaaatcaggcaaggataacactggggctgaaataagtgctcgcttcagagtgttaaatgctagatcatgatcagatgtcca

SEQ ID NO: 193626 - DNA, 1945 bp, Zea Mays
gtttgctctgctcagtgttttttttgtcagtggtagtttgttgctgatctcctgcatacaatacagtgcaagtcatgttctcaatagtatggatttcgtagctgaaatacatatcactaatagtcctgcatctcatcctagactgcatggtagagtctaccgccaaagatgtctagcacgatgcatatcggtttaatttgagtgctcaaataggcagacttttgaaatgtgcttctttgaatattactgcagggggttatgttttgaaacaaaattttattgcgcacatacaaaatattccccccttgattatattttcgctgaacatcattttgccctattgcagttacgagctcgtcagtttggtttaatctgccatttgccatagctctgattgttttgttccgctacatatcgcttgattatggccttcgtagaaagagcgtaactagaacagatcatgccagtcattcactcgtcaaaacaaaaggtactgaggtaaagaaagtcattcatcagactgaaacggatggaaaaatagattggaggagcaaggttaactcgcctccagttgaagcagcattcgaacagttcacaaggcaccttatctcagaatgggtaacagatctgtggtactcgcgcgtaacacctgacaaggaaggtccagaggaactcatcgatgtagtcaatactgtccttggggagatttcagttcgggcaagaaatgttaaccttatcaatctgctgatcaggtagaaaatcttgtttttgtgcaataaataaaaacatagatgacacaatgttttcagaacattagacttctaatactaaagcattccctgtgttttccagggatttggtcgatcttatatgcaataatttggaactttatcatttctgtcaagccaagattggaagagagaagtttgtgggccttccttcagagcgtcgtgatgctgaactgaaaatgatccttttagctgaaaacaagttgcatcctgctttattttcagctggcgctgaatacaaggtaagacttagtggatggtgaaattttcgaaatcttgattgtagtaggttcatttgtcatttgtagccagatattttcaggacaaggtaggaaatttgatgaaccactattcctgctgtttgtggttatgttttactgttaccataaatacatctatcttttctcttatcttcaaccataaggcataaacttcatgcacttcttacttcaaatttgacatggaaatccatgaatgttataactgagtgctgctaggtcaacatatatcttattatctctacaatgaacttgtgtgcaaaagatgatgctagataagaccatatcaccccttcatctagaatgctagatctagatgacttgaatgcatgccatacatctagagcataacacaacacaattttgacaagcgatcaatacatagaattttgttagttaattggttgctatgtccttttgtaaatgttccccttcatcattattcattaataatacatgtattctattataatgtataagaatagatggatttccatgaccaagtgcatgttcaatacttcaatatatagatgttaagcacttctggtaatttattgcacaattggataattagatttcacattttcagtcacattttatttactcacttcaataacacattttttaattcatgtcttgattgcacttacataagcttgttggtgagttgatcattgtaggaatatatctctttctctgtttaggtcatctgatgattctagtatatgtttcctttctccaggtattgaaaagtcttgctgacgggttgatctcaatcacagtgaagcctcaggatctacaatgtactttcttccggtgtacagcgcgggaacttctcgcttgtgcagttttgagacctgttgtgaacttagcaaatcc

SEQ ID NO: 193627 - DNA, 404 bp, Zea Mays
catgcacgacccgcgcgagccccacctggcgctgctcaagcggatcctgcgctatttgaagggcactctctcctccggccttcaccttggagtcggccctgtccagtccctcaccgcgtattccgatgcggattgggctggctgccccgactcttgacgttccacttcaggctactgcgtctacctcggcgacaacctcgtctcttggtcctccaagcgacagaccacggtctctcggtccagcgcggaggctgaataccgagctgtggcccatgctgttgctgagtgctgttggctgcggcagctccttcaggaccttcaggtctctcttgcctctgcgacggtcgtcttctgcgacaacgtgagcgctgtctacatggcagctaatcccgttcatcatcgcc

SEQ ID NO: 193628 - DNA, 869 bp, Zea Mays
ccaatggcagttctgcagttccagaagaaaaaatcagaggtttggcaactactatcgatggttgggaaaagccaaaaatgaagaaaaagcgttctaccattaaggcagacatgtcactggctggtgttttgaggactgttgatgtagaccgagagtcaaaacaaggcatgcagcacaagtttactaatgacggtagggcgagaatgacaagttctagtttcaggtcagaaatttaaccaactaggctcggagttcatatttctagttctatattgattctgatattttatccctttaagcttcttttgagaggcaacttaactgttatcgcacgaagatagtggggaacattttaagaagtttatacctgaagattctgcagcgtgattaaattaataaagctttgggacatactccatcctgaaatgataagcatatttgatcagggaaagtcatacaatgtagctttggaccttaatttcttttaaaatatgttgtcatttgctaaagagttaataccattttagaagcactttgaatacaaacttattggtgcaagttgtatataatctaacaaattgttggtcaaagtttgtaaaatttacttcttgttcaaaatacgcttatcattctgggatggagggggcagttccttaaatcattaatgaaaaagtttgttacgattccattttgctttctgttctctgggtatcactatatgaaactctgtgcaggtctggaactgttgcatctggcacaaccaaagcagatttgctttctacacaaaatggtcttgttatgcgacccttaaataggagtgatcaagacaatggtttccatcctactaacaaaagggaacgtcaagctgc

SEQ ID NO: 193629 - DNA, 504 bp, Zea Mays
taggatgactcttcacatctgtcaggtacgtactgcgattgctgaggaggttagcgagaagtggcgcagatctgggggctgtgtgcgcacttagaatcaaaggtgcacctgtcaaagttcaactagcatttgtttgcactttcgcaagtccatggccatctcaattcagaacatgcagtataccatatggtctgattacttttggtgcttaggttccttttgacatggctacagattctttttacggaacaagaagatattccttgaaaatccatccctcacatatacacaaaaatgaatctatttgatggaagcaggtaactattctttatgatcccaatgtttcccaaccctcctaagatagcagattggaatgcaacattttatgactgaggtaatttaattacaacctctccttttatcctctataataacttaaatatgtatgagatgttgatagctgaagtattcattatactagaatttgggagcagtaccaacatc

SEQ ID NO: 193630 - DNA, 645 bp, Zea Mays
tctggtcaacaggactatggaacccaaagcaaaacattctagttgcgaatttgttctgacagatctaccccatttcaatacacatccacacaggaaatataacaaaccaaaagggtaaaacgcccatttgaagagcgcccaagagacagccaaaacttgtcacctgcttgtacttcttctggcgacgcccatcggcggtctcgatgacgaactcagtggagaagatgttagtgagtttggcgccgtatccgttcctcccgccggtggtcttcttctcgttgtcgttgtagttgctactggtgaggaggtggcccaatatcatctctggcacgtagacgccctcctcctggtggacctcgacggggatcccgtcgccgttgttgtatacggagatgcagcagctgtcgacgtcaatctcgacgcggagcgcgtccatcttgggatcccgctgcttgttgtcggcggcgttgacgaggatctcgtcgaagatcttgtagagtccagggacgtaggtgaccgagcggttcaccatggcaccgtcctcgtatatccaaagcgcctgggtgtgcttctccacggagccgatgtaggtgtcagggcgcagcaggatgtgctccagctgcgttttcttctggtacatctcct

SEQ ID NO: 193631 - DNA, 707 bp, Zea Mays
gtcatccttacacagctgcgaccgtggcacgggcattttttattgacatagtgcgggtgcatgggttcccaagttccatagtcagcgatagagatccagttttcaccggacatatctggagggatctgttcaagctaacaggtgtcaagttaagaatgagtactgcttttcacccccaaactgatggtcagtcggaagcagtcaacaaaactattgccatgtatttgaggtgcatcatgggagacaggccaagagcttgggtggactggcttgcatgggcggaatactgttacaatacatcataccactcagcattgaagacaacttttcgtgtagtatatggcagggatccaccacctctcattccatataagcaggggacagcagacactcaagttgtggatgatatgctacgggaaagagatatatttctaggggaagtcagagataggctgctgcaagctcaagagcatgccaaaaagttttatgatggccgacaccgggatctcgagttcgatgtggatgactgggtctggcttcgtctcctcaatcgacaagctcagtcactggtcgaacgacccaaagggaaattgggaccgcgatatgcgggaccatttcgtattcttgagcgtgtgggcacaatagcatatcgtctggagttaccagaaggggcacgaattcatgatgtctttcacgtgggactcctt

SEQ ID NO: 193632 - DNA, 495 bp, Zea Mays
ggcaacggtaacctttgtggttgttggagtatccaagaaacacacagagagaagaccggggagcaagtttatgaggcgtggtggcagagagattgggataacatcgacagccaaagacacggaggtgggtgtgtcgggaggagtaccgtgcaaggcctggtaaggggtggaaaaggagagggttttagtggggtgatggttgaaaagataggtggaggtatgaagagcctcaaccaagaagacaggggggagatgtgcatgaaaaaggagggaacgaataatggtgtttacagtccggaggacacgctcagccttgccattctgctgggacgtgtatggacaggacatgcgaaggataacactatgggagagaaagaaggcgcgtgaagatgaattgtcaaattcatgaccattgtcacattgcacactcttaatggtagtacgaaattgcgtggcaacgtaggagaaaaagtgagcaatagtggagaacgtgtc

SEQ ID NO: 193633 - DNA, 273 bp, Zea Mays
aaatgggacaaactatatggatggatccggaacctaagaattgttcttaggacagagagaaagcaagaagttctagacaccccactacaagaagtgcctgctaaagaggaacctgctgctgttgaagcgacttacaagaaagcaatggatgctaatcttgaagtgagttgccttatgcttgattgcatggagcccgagctgcgaatgcaatttgagacaaactatgaggtgcatgatatgatcgtgacgctcaagaatatgttccagactcaa

SEQ ID NO: 193634 - DNA, 321 bp, Zea Mays
cggagatgaggaagaaccctgggcgcggtgaatacgtgtccagaggcgtggcagttgttccggcgatcaacggtgagcaggggtaagtcgtggcgatgcggtggaaagggtaaacacgcggcacaaggccggagggcggcggtcaccggcgtttccacggcggctcaggcagaccgcccacgtcgcagtgactagaatcacagtgataagctctcatgggtgatcctatccactcctccccgcgagatctttacttcatcgaagttatctccccgccagcgaatacaaatcccaacgacggcgtgaatcacggcgtgtggg

SEQ ID NO: 193635 - DNA, 335 bp, Zea Mays
tataaattgaccccgcagagagcttcacaacatcatcacccacccagccaccacgtattgctagcaattgttcgcccgagctcgcgaattttgaattcgccccaaatcaattctccgccacccgaaacccaacctcaccgcggccagtcttattccggtcagttcatctccttctctccctcgtttaagctttcccttaagtctacgatgcttgccgacccacataatcgagctaggagccctttggtcaccgggaacacgtaccaattgtcctcatcgtccgcggttcacgtggacagagcttgatagcttaccaattgtgaaattgatttagg

SEQ ID NO: 193636 - DNA, 293 bp, Zea Mays
gcatcccccaacggctgacatgacgtagcagcaccagtaccctacgggtctacggctccgccgcagcggccgtgctggccggccggccggcccaccgtagcgaaaggcgcgctggaatcgaaggcgtttcgactgattttttcccccctccatgtcttttccatcgcaccagctggtgaattgaatgaggtttccgtttgggcccgggtgtcgtcttgtcagatgtacgtatcctactagtagtactgtagtaggcaaggaaaaggagacgcagatcagtagagagagtagag

SEQ ID NO: 193637 - DNA, 403 bp, Zea Mays
catgagcccagcccatcattccgcactgccttcttattatatgaggcaggcacgcggcacgcccatcgccgccgccgcttcgaccctagctacctcggcgggctccggacctccggccgtccctcctggcgccatcgccatgatttccacgcttttccgttgcgtttcgattcttctgcgttcctcgccatggctcagtgttttattttttcctcttcgttcgaatacgtgccccagatttcgtggacgaggtccaggaagccgtcgccgctgagagaaccggatggcggcttcccgcccgtgccacctcggttccgttgccggcgtagagaaaaccgttgcaggttctgggtctccgtctgctccgccgcgtcatgtcccgctgcgaagacggcagatgggc

SEQ ID NO: 193638 - DNA, 514 bp, Zea Mays
cttcatctggctggttgcacaaaatcgtctccggacagtagatagacttgctaaaagagggctgagtcatcctgagaagtgccccttttgtgatcaagaagatgaaactattgatcatctccttgttacctgttccttctccagggaattctggtacctgttgttacggaatttcggtctgcattctttggctcctcaacctgatgttggctcatatctaggctggtgggaatcggtggggaatattgctgctgggctcactagaaaagggcttgattcccttatcattctgggagcctggaccttgtggaaacatagaaacaaatgtgtttttgatggctgcaaccccagtgttgccatgagtcttagagctgctaatgaggaaaggatgcaatgggagattgctggtgccaaggggctctgccatctagttgtacctttagctgagagctaaggagagtaatggattcttttatgtatgcttcttactggcctccgtaaggaggctgttttg

SEQ ID NO: 193639 - DNA, 340 bp, Zea Mays
gttgtatgctaaactatccaaatgtgaattctggctgagagagattaaatttttgggtcacaccatttctcaggatgggttatcagttgatcctgagaaggtacaagaagtgatggattggaaacctcctaccacagtacggcagatccatagttttctgggattggcagggtattatcgacgatttattccggatttctccaggattgccaatccaatgactgaatttttgaagaaaggagtcaagtatgaatggagtcagaagtgtgaggatgcctttcatacactaaggaagcatttgacaacaacacccgtgctagctcagcttgacaacaccaaa

SEQ ID NO: 193640 - DNA, 334 bp, Zea Mays
atatctagagagctggataaacttgtcgcgatactcgctgactgacatgcttccttgcttcagcgatagaaattccttcttcttaatcttcatcaatccagctggtatatgatagttcctgaactgtgtactgaactctgcccatgtgatagtgtcagcagcatcgtgggcagcagtgtatgaatcccaccaatcagcagcaggacctgtcagacgtccagaagcatataaaaccttctcccggtccgtgcactgagcaatgttcaacatcttctctacggacttcaaccaatcatccgcgtccagtggatcaggagaactagcaaatgtcgat

SEQ ID NO: 193641 - DNA, 493 bp, Zea Mays
ctcggggtgaccactatgccctactaacggagcaatcggcttaagttggcaatgacttaaggcggtgcgacatgctcacgcttactaaactcggggtgaccactatgccctactaacggagcaatcgacttaagtcggcaatgacttaaggcggtgcgacatgctcacgcttactaaactcggggtgaccactatgccctactaacggagcaatcggcttaagtcggcaatgacttaaggtggtgcgacatgctcacgcttacttaacttggggtggccactatgccctactaaatgagcggtcggtttaagttggcactgacttaaattggcacgacacgcttggcacgtttgcaatcacccatcttagggcaacttctatgccccacaatgaaatttcaaaaccatcacactacatttacttctacaattgtagatactatggaattctaacaatgggaaaacaatagtagcattcagtattcaaaagtgt

SEQ ID NO: 193642 - DNA, 701 bp, Zea Mays
tgccaggtaggagtacatgatatgcccagacggattcatgtatggtgaaataggcaactccatcgtcttatataatggcattttcagcagacgtatataatggcattttcagctttcgcgagaattataatggcactgatatagtttcacgaatagttatggtgtgcagcgtgcttcaaaaacaacaaaactataatggcgtgtactaacccatatttcagctatactatagtttactaggcgccaacagtatgcactcgatgttggaagcgcatgcagtggttcaaaaacgagcatgctaatgtgggtctcaagttactaattgttgatttgaggcatgaatagtgtgttagatgcttgcctcactatctttaatggagtcatgtacttgtagcccatatttatctattatgtcgattattttgctgtagatgaaaacctgttcaagagtccatctcagatggttgtaattaaaagcaatccaaaaaagtaggtcgtaattagacattgtccttgaacattgcaaatagctaaggttaaaaaatccacatttcatatctatactactctattaagatagtagcgtcagcgtccacacccgtccacaccctggttgcccccgcctgaccccgcaccctcccacgcgcgcgcatgaaagcagctcgctagcccccgtcgtgcccctcccccacgaccgaggc

SEQ ID NO: 193643 - DNA, 958 bp, Zea Mays
atgacaaaaaagggattatatcaccagggaagcctaaggagatgatgcaaaacgacagtgaactagaacaattaggagagtggacatcagatgctgatttttatgaattggttagcaatgatcagaaatgcagaactaatggagctgaatgcagagacaatggtctgatgacaaattccttagccaagcttgaccggtctgagaatgaaaaattaggaggctttgcaggtgagtcaaaaaggtctaggaaattgtgggattgtaacaacagaacatgtctgcggactgaacatgtaaatcagggaaaagatggtataggttcattggaggttgaacaaaagaatactaggtctccagaagttacagaacatgtaaatcagcaaaaagatgctatagattctgtggaaactgaacaaaagactcctaggtcacctgaagtttctccttgtaatgaaagggtgacgtatgaagagccaaccaaaggaaataatgatctgatgacaaattcttccaccaagctcgaccagtctgtgaaagtaaaggaagggggttttgcaggtgagccaaaaaggtttagaaaattgtggggcagtaacagtacaacagttctgagaacagtgcatgtaaatcaggaaaaagatgctatagctttcgtggaggctgaagaaaaggcacctaggttttcggaagttcctccttgtgatgaaagggtggcatcccaagaggcaactgattcccgtttagaacaatgtctaggggtggggaattctctaggtcacgaaaatggtgcacaatttgagacttcatgcgtgaataatttaccttcagaggtccatgcagacccagaaatctccagttcattttcggaatgttgttcatcaggaagtcatgccaatggtaatgaaaatcattctgaaagcacagctcaggaaactgcatttgtagggaactctagcca

SEQ ID NO: 193644 - DNA, 304 bp, Zea Mays
atcgtttgatactattacgacaataaatgatctccaatcctttatattggaggaataataatatgtaacattggttgggtgtagagattacattatatacgtctctaaccctaataggctacatgtgctaggctaggtccatgacacacaaccatgaagaggacccagatccttcatcacgaactttggttgaagtgtgtgtgtttgtgcatatataaaatcttaggcaccataataacatgacgtatacataatggttctcttcaacttgcatctacattattgacataacataggtatcgtc

SEQ ID NO: 193645 - DNA, 308 bp, Zea Mays
gtggttgatgccctctcttgccacaatgtcgacaacaacgacaacatatcactggtcacaaacatggcacccctctccaaatcgacctctctgacgacatcacctgatatgccaccacacaccagtcttacatcgacatgttcaacaaattcaatcatggcgagctaggcgaatcatggtgcacacatggcaagctgctgctccacgacttcaaagtttttctgccagtgccctccattatgttgccctaggtcatgcagctcgcccacatgggacacgaaggcttttgagcgtaggggcgatgtttc

SEQ ID NO: 193646 - DNA, 608 bp, Zea Mays
tgaaggcacagaagagccagtggtataagtacaacaaagaatggagttacatcaaggcttacacgcggtaaagaagaggatattgccaagggtgaggtaagtaaaacaccgctcctaaattgggatgggggattggagattttaaataacagacataacgtaatcacaaggtaggatagagtgctgagaagggtaaaggaaataacaaacaaaaacacaacaaatgatagagttaaaaactcgcaggtgacaaagaagaggacacgaccaagggaaaagtaggcaaagtacaacgctcagatcaagatggaaaagaagaggttttaaagggcgggtataagataaacatcaaagtaagatatatagatgataagggtaaaggtgatgatgatgaaaagcatagtccatggacagagttaaggcaagacttacaaagtcacgaagtggagtggagaaaacaatcaaggataagataagtgaggttccaacagaagagttgaaatagagattcataaccaaaagaagttacaaggaattagcaagatcaccaagtatgtgcaaaataagatgaccgctcatggatcattaggaaacaagggtggtcatgg

SEQ ID NO: 193647 - DNA, 432 bp, Zea Mays
ttgctagtctcaaaacagagaaccaaatctatattttttgctattatgaaaacaaataactgaagcatatattttctggtattctcaaaacaaagaacttaaccacatattttctacatagggctagacagttgtgtgttgaggccaatatggcgacagccgacatccgataggcaaatgtatctaataacttgtcacaaaaatggaattcgcatcgtaaaaagaaactactcgagcattgagagtccagcaggaaaaaacagacatgtagtgttaaacatagaaaaatgggtcatcactaagaaataatttccaagtactactttcctgaagataaacagtaaatggaatgatgtggttgccagttgccagacacttcatcccaaattcccaatttcagaaggtaaggtaaaaattcttcagcaatccaat

SEQ ID NO: 193648 - DNA, 398 bp, Zea Mays
ggagcatgccgccgccgccgacctagaacggaagaccgcttccgccaaacgattgctaccgtcttccttgagctcggatgccccacccgatgcctcctatgaggcgactgtcattgccggtctccacgtccaggctcgaagccgccatcttctacgccgtcctgttctagtgtcgacaacggtgatggcagtatcaattccgggaacggctgcaacaaggggaacaatcgccgcaacagcggcaacaacgatggaacgaccacaatggcggtcgtggcggatccaccaacacccctgccatgcctcctccaggcgccagaggcactgacaacaagggatcgatcccatggccgacgtacttccacccctggcagggcacattgccaagtatctcggcc

SEQ ID NO: 193649 - DNA, 595 bp, Zea Mays
gcggatgtcgcccgctgtgctccggtgtctgctcagcctgcttatgttggttgccgccaagtttccccactgcttccgtccacagtttgttgatatcatggacctgcttcttgggtgggcgtttgtgcaggacctagctgatgcagatcgcagcatgatcattgatagttttccgcagtttcagtggcattggcttgggaatctgcagttttcacttggattactgcccaagttcttggccgatatggaggggcttgtgcatgatctcaacctgggaggcagccataatcctgggaggcttcgttcgctgtttgcttgtttctctacggtactgcagattatgtcttctggtgtggctgagcgaaataacctaagagaacttgtagctgggcctctggaaggtttagctcctcaacttttaaggtgtgcatcagtgatagcctctaaccttggctggtctgagaggatggaagacgcatccaaatgcttggtcttgcttgcagagattctgcaggaaaggtttgctgatttttatgtccattttgtggatgtgttggtccagagcttggaagttgcctcctcggcacagttggcg

SEQ ID NO: 193650 - DNA, 400 bp, Zea Mays
tcatctgtgagcacagcagcagcagctttctcctgcgcttctctcgctttgccccagagcactatgtacagcccagccacgatgaggacggcgccgagcgcgctgcagaggcgggaaaagagcaaagtgaaggcgaaggagcagcaagcgatgcaagcagagagcatgagcttcgcgcacgtacatcccgaggtgcaaggtctcgtcgaggaagactgagctgagcaccgcgacgaagacgatgatgagcgggccgaacatggccacgtagaggggcccccgctcccgcaggcaccacgacatgagcgggaaggcgaaaccggacgccacgatgccctgcagcacgcagacgcagatcagccaggaacagtcaagaaacgagcacacgctacctactgcc

SEQ ID NO: 193651 - DNA, 462 bp, Zea Mays
ccctgtcaatcgccttgatcacccatttcggtacactcatggcgataaggaggtaaataggaatggcggagagcacaaaacaaaccaaagcagttttgcccgccaagttaagaagggagccttccaggaaggtaaacgatcagctaccttctaaacccaaaccattagagtacccttcgatagcttcttgttggatatgggtagccctaagtaggtgcatggaaaggttgttgaagggcactgcagtaaggaaccactttcctgaaccgcctgatcattacaagcaatagggataaaacaactcttttgcatgttggcaaccaaccccgaggcctccccaaaacagtcaagaataaccttagtacacctcaattcaagatcctgtggcttaataaataaaaccacatcatcagcgtatactgaaatccttgacttgattctatcattgtcaagactctgcag

SEQ ID NO: 193652 - DNA, 350 bp, Zea Mays
ccccaccgaagtctgttgcctccgtcagaaatcccggtggctgttgaaacaaaccgcccctagcaaaccggagctcgcctgttgactggacccccttcctcccgtattggccggtctcccttcaacgacctctgtgcctccctgcgctatatgaacggaccctcaagcaccttctcgtccggccaagattgccatgctctcctgggtaccgaccgctccgtggaaggactcgagagaaaacccgacgccgctaggcttagatgccgtcgacgctgtagaagtcgggcatggacctctgctgaccaccccgggccacttaccagtagtagcgaggcctccttccacctgcc

SEQ ID NO: 193653 - DNA, 289 bp, Zea Mays
gtccatgcccagatgcaaccggggcccttagatgcacatctaacgatcacggttctattcaacgaaacgttatgcgccctctaatgctagccacccatcttgagatcgacggccactgacccgtcttccatccccgatacgcgaccacggcggcgccactgttgccctcaacggagactcgccggagtcacgcaatcaggcgctgctatgcgtagtttctatgcctaaaccccaaaatcgagtgcggggcaaacaatgaactcaatagatgtatgtataccgggtatta

SEQ ID NO: 193654 - DNA, 404 bp, Zea Mays
ccaatgtcgtgttacggatccggtgtaccccatgtagtgattatgctttaggttgcagcgacgtgtgtgcttcaaacttcccactgtaatgaagccaattgtgaactgcttagtaacgaaaatcatgtttatttgatgttcagatctcggggtgttagctgtttgtctctctgttgcatcacagaatctccactccaacgaaggtgatgttcacatttaattattttccccttcttgtcattaacattgtgtatgttaagcagtaattgttcatatgttcacgttttttggttactccattcaaactgtgtttgtagtgtcaaaagtacagaagttagtagtaaatgtttggtatagcctcctttgttagcagcctaggcactggaaaagtaagccaaatttgt

SEQ ID NO: 193655 - DNA, 381 bp, Zea Mays
atatccacaaatccatcccgaaagaaccatcctaattcaaacttgaaaggaggtattgtttgaacagatcttattctcgtactaagaagcaaaggggtatggtcagagatatttctagaaagggcaagcactgcggctctaggatatttttcctcccactctgtggctactaggatccgatccaatttctcataagtcgggttatccctagagttagaccaagtgaaccttcgcccagacatgtccatctctctcagatcaagaccatcaattacgtcgttgaatagaaacggccatcgatggtcaaatctatcattatttttctcagatggagatcttaaaatattaaagtctccccaatgagaataggtgatgtctccg

SEQ ID NO: 193656 - DNA, 380 bp, Zea Mays
aaagagatgaaactcaaaatgctctacaaggatgcatagaattgcaaaatcaataagaagcatagatgcaggcatacaagaggatcctaaactaactgaaagcatcatcaaagatatgaacctattaaaatattgcagtggcgccatcaaaagtattcacaagattgaaaacatgtagtttgatataagataaacaagaaagtagaagcagcaaaattagcaaggatggagtacactcaaattataaggtctgtttgggatagcttcaacccatggttgcttcatagaggccaagatgaaataagacctctaaattccttctcatttttactatatcacaaaaatacagaaaagactcactacacactagtttcttgatc

SEQ ID NO: 193657 - DNA, 355 bp, Zea Mays
aaagcgctatgtagctggaattgatttcgataaagtctttgcaccagtggctcatctggattcagttcgtttttttacttgcacttgctgcacaggaaggttggaaggcacatcatatggatgtaaaatcagcattcttgaatggaattccacatgaagaggtctatgtagtgcagccactaggttttattgtagatggccaggagcacaaagtttatagattaaggaaggctctgcatgggcttcgccaagcgccaagagcatggaataaaaagcttgatgcaacactgaagcagctggggttcagccagagtccattggaacatggactgtacactaaaggaactggtcaagc

SEQ ID NO: 193658 - DNA, 315 bp, Zea Mays
acttgatattgatctggatgcaccaaaagttaggattcctttgaatgctaatcaacctttgctgggcaatgagtactttgttcttgattttggccattttacattgcatacaagagtaagtttttggtcccaaaatatgtcataatgttgagctagctgttactaactgttctttcaactacaggatggtaagcatgatgaagaaagacagagtctgtattcaggcttttatattactgggagggatatggctgctttccttatttgtgatttagctcagaacatatactcaatacctgaaaatttagatcaaga

SEQ ID NO: 193659 - DNA, 286 bp, Zea Mays
gacataaattctatttttgatgaagatatgagaggcgatggcgaagtggcgaaccgaaaccttcattaattaggcattgttttaccacttccatgttttcatcaagcatgctgtggatttaagcatggaattgagatatcttctaaacttatgcatttatgagctagttttgttatctatctgtattagacccggtgtggccgtgtgggagtggtatttgacaaggtgttggtgtactttgatggtagccctaggtgtgaaaattaaccagctcagccattgaccc

SEQ ID NO: 193660 - DNA, 338 bp, Zea Mays
cgggggcgctgtccctgcgggtgctgctccaggtggcgaggctgaggtgcctcttccagtcagtggtctttctctgatgcagtggatgggcatgaagctggatgcttttgatggcagtggtactccggtcgaggtagcagattggctaacttacgtggaggataagatgaatgtctttgagattgtgtatggtgatcgtgttcgctttggcacacagctgctgaagggagaggctcaaatttggtggagaggcgtgcaggcagcgcactcctcctcaccaggagtcctgacttgggatgtcttcatcaggcagtttgaaaggaggttctacccggtca

SEQ ID NO: 193661 - DNA, 396 bp, Zea Mays
cgtacctcatagaattttggcttttcggccaaggtagcatcatagtgtggggactaatgttgtgtttgatggaagctggagaggattagcaaggcaccgtacgtggcatagaaataaattagcttgctgaattggtgagagcctaaaagatgcagtggtgaccaaagcctgaggatgcttagaatacatcctgtcctttgtcatacggtgaagctcaactgatcaggtcgttaccccttctgcatagcaatatgccatttatgacccgcacgtggcaagtgatgactatggttaaatatatatgatttcagaatgacaaatcatgaatcagttccctaaacaaatggtgtcccttaaaaagatggcctctctagacaagcatcaaaatctaaattc

SEQ ID NO: 193662 - DNA, 447 bp, Zea Mays
cttttccaaacaaagctctccgtgcaaaagtcggctaagggtgcagccggaacaacacaataactacgtcaagatcgaagtctttcacaacagactcatatcaacgaagacgtgcatcattatcgtacaaattacggttacatacacacagtgagggcatcatatattacattggctcaaccttcgggatgatacccatctccctatagttgaacaacattatcctcaactcctcaccctcaaaaatatttcaccggcatcagatggcggcatcggatcgaccttcgcagcctcgggcagtgcgccgtccagaccaccaaggtcctcgacgtcttcggcgtgtgccatctgcagcaacaacacactcatttagcaaaaccaaatatacccacacatacaaccacacaaaaaaatagcctttacctgatctattgcccggtcgaaccg

SEQ ID NO: 193663 - DNA, 275 bp, Zea Mays
ttttgtgctataaattataaggccgtgctgagcggaacatgcatatggccgtgcaattaatggatataaagaccgggggagagagcctaagtaggtatccacaatttgaggaacgagcatgcatgatgaccaagtgttatcctcatgtttcgcatggttttgcaaagaaacgtgcagtagaacaaacagctctgctgcgcgcgcatgcctcatgccttgctgtgtgcgctactctctactctactcattcagtcgtttcactgcctgttcaaaat

SEQ ID NO: 193664 - DNA, 600 bp, Zea Mays
aagcttctttgacctttgattcttggatcctgcgtacaaagcatctatttaaatcatcaaaggagtcatccaattgggtgtccatagtctcattctcaccattgaaaagattgtcaaaatatctctgccacctatgtttgatgtcttgtcctttcactaagagttgatccatctcatccttaatgcatttaactttgtccaatgaaaggtcttccccaactcttgttaagcttgatcacttgttttgcacggcttgctgggaacaactctacccggactgtattatacgcagcaatgccacaaggctttcagatcattgccctttaactctcagtctcaaagaagattttaagggaaagcgcagatttcactttgaaagtttctggactaagattgcagatttcttagatgtggtggctaattcttgggtgcagccagttcagacctcctgccctctaaagtgtatatccttgaagcttcgtagattggctaggtccttgcagtcctgggggcacaagaatgcaggcaatgtgaaatcccaattggctttagcaaaggaaatccttcacagactcgagatggctcaggatagcaggttgt

SEQ ID NO: 193665 - DNA, 295 bp, Zea Mays
gttccacaaatcattacgaatatgaactggccaactcaatattgggttgtgttttgctgaaacattatattccacaaccaattaaattgacttaaataactaaccggtcgttacatcagagcactaccatttcagaaattggtgtcctgccttccgtagaacctagcgggaaagtacacattcttgtttcttagaactggactgaactcttggattgctttagaatcatgtacaagcaaccataaatgtgcactaaatattatccagtgacagttggaccctcctcctgtagtat

SEQ ID NO: 193666 - DNA, 349 bp, Zea Mays
atggacagcgccacaatcttttccatacccgaggtatgatcaaagataagctatgtcgcatcattgttgataatggtagctacaacaacattgctagtcatgaattggtggacagattggaattaaaaccaaggcatcatcctagtccatataagatgcagtggcttaatgattgtggagcgttgtgtgttagccacatggtgaatgttcctttttctattggaaagtacaatgatcatgtggaatgtgatgtggtccctatgcaagcatgtcaattgctgctaggttgaccttggttatatgatcgtgatgtccagatttttggaagaaccaacaagttgtctttctt

SEQ ID NO: 193667 - DNA, 612 bp, Zea Mays
cgccgatcccggccatccagaggtccggtgtggctgatcctaccttgggtggcacgaagaaacgccgccatcgtacgcggggtcgaaggcctaagaccgcccccgttgcaccttcggaggaatccagtgaagttgcacctccaacccggttcctcttccccagagccggttagagtgcatgcccctcaaccggttgttcctgatatggtggaagccacacatctctgccattttggaccgtgcggatgcgcttgctagagaagaactgtggttgcgacggtgtgctctgttcgttgttgtcactggttcaagaccgagggtggctgctgagactcttgctgatgaggtggctgctggtttcgggctggatgcgtcgtccttctccgttcatcgttcgtgcccagaagattgtcttgatcctgaattcggaagagttggctaatcaggtgtacaacaatggtgctgttttcaattctctttctgggtctttcaagttcctgagatggtctagacttgcccatgccgaggtggtggactttccatcccctgttcttgtggagttcaaaggggttccaattcatgcttgggatttggctactgctcagaatttgt

SEQ ID NO: 193668 - DNA, 521 bp, Zea Mays
gtggaccttctggtgcatcatcactaccaccagagaaagatgcatacatgggatctaaagaggattctattaacgactatcatgatccttcagttgtctctgagttccaaattgctaataatgatgcaaaatgtgaaccttctattgcattcttgccagaaaaggataaagatttggaagctaataaaacgagcttggaaggtccagcaaaaacaggccaattgtcatctgaagctagtggcagcactttgatgatctcagagccacaagtattgtttgtgtccccacaagatgggactctgtctttcatgaacaataatacgaacaaccaagagatgtggaggttcctgaatgtttcccctgataccatggataccgaaatgcagatggactctaattcattggtttacgaggcaagcttgattcagggtttcttgtaccttgacaatgagggttctccaatttgttggacagtgatgaacccggaacctcctaggcgcttgatatgtgctactgctctg

SEQ ID NO: 193669 - DNA, 297 bp, Zea Mays
gatactttggagctatcaaaggactcgttgtcctcagatgaacagaaggcatcagcatttgaagaaagagagagcggagatttcacggttgatgagggtgaatacgattatgaaactgcctgttcggagagccgtaatgacacagatggtaaccttggtgtgcctcaatcccctaatgcaaagtcaaggtgttcaaacttattcagtacaagatctacaggcagtcatttgtccttgtcattggagaaaagtgcagctaaaccttctggccgaccacattcaaccctaacagatcca

SEQ ID NO: 193670 - DNA, 455 bp, Zea Mays
aactgccgcaccgacctcacttgtatgtactgtttggcgtctggacacgagtcatgactcatgaggtggagctgtgggtactcggagattgttgagctggtttctgcctatgaataagcggtggcctgcaggctgcagtggtgcgcggacagtgcgtacgtcggccaggacaggcaaatatctctccggatacacccgctgtaatgtgcccgcgcccgaaaacgatggatctcgtccccaatatgtgtactcctcctacacgggcagatcaatcatgccggctccggactagaggcactgcgaactgcgatagatgccggcaaccacgtacgtgtgcgtaacgttgcctccctggccagtgaccacccaggcacccaccacttgtatgctgccacctgccatgaatgaaagactagactgggggatccaatcgagccggtgctagtgtcggtcac

SEQ ID NO: 193671 - DNA, 364 bp, Zea Mays
ctgtaagtggggtgaaggatagagtgtacgaggatctttaccaaagtttgagtagaaaggaaggagagaaggatatataatatgatggctagggttcataaggttgattccagtgggtatccgatgcggatacgcaaattagaatgatgcgcattgttcatgtctcgcaaaatgaaatgttgctccaatagaatgcgatgaagagagagaactcgtggatatgcgatacgatggaggggagcttggatgatgcacaaccacatccaccgtctgcggaacgtgctacagtgtgatttgattgcgcaaaatgcggatgtgagcgtagatatgggagttgctgcagatagcctaagaaaaaggtaag

SEQ ID NO: 193672 - DNA, 378 bp, Zea Mays
ccagcgaacagtactcgcgatcctaggaaccacataacatcggccccaaaccctaacctctgaccataacaatctagtatcggagatgtccaacgatcctccatcttccacccacccgccacatccatcggcctccaccaatcttgtgccacccaccaccatgacgctaacaccaccatcctcttctacaccccctcacacttggaaccatagccgccacagtccaggacctggcccgatccatggcgaccatgcaggccttcctgacggcacccagattcccacagccaccaccgaccacaaccgtgccaccaccgccctctccacctccgccactttacagccttccatccaccaccacgccaggcgtgccccttc

SEQ ID NO: 193673 - DNA, 320 bp, Zea Mays
ctaaagcatgcttggtgtcttccgcactcggctagtgagtcagtctaggataattatatttacgtattcatcgttggtgtaggttaaattaggtgaaaaacgtaaattacgtgacatatatttagtgtttggaagatgagatagagtaatttagaaagatgtgttatcaaacatgtgtgccgaagtgcgttgtagtagtaatggcgttaacttgaataaagagtctcaagtgcatgccgtgctatggttatatttgagatagtaaattataaaagttgcgcaatatgaggttcgatcgatgtagttaatattgattgaac

SEQ ID NO: 193674 - DNA, 318 bp, Zea Mays
agtttttggtcagaagagcaaaagacccgtacaagttggtataatgaagtttctaaagaaaactgatgcttctgttgttgagacatctagcggacctaagcaggcattgacagaaataaagccagcgcagcaaaatcctttgccaaaacaggaaaatgttgaagctggttttgcctgttccatggaagttgagaagggattaaatgacaagatggaaaatgaagagcatgctaaaggaagtgattattgtgatgttggttcccgtactctggcatttccatctatttctacagctgacttccaatttgatcttgacag

SEQ ID NO: 193675 - DNA, 329 bp, Zea Mays
ttcaaacgtccctacgagactcacgtcagtcctgaactcgcctgacttttaagtccaactgcggacacacatgctcattttttgaatctgtgtgcctctagtttagcactgtttgttcagttttgaggtcggctccaattctctccgtctctcttggatttcttcagtcttgttttcggacgtgcaggtgctgcaataaccaaagagcggggcgggcgaccagccccgtgcgcagacgatacccacctcggtatttttttaaaggcggtggcgcagaagatatatttgtagtgtaatgttaacgatgttgatgccgacgccaattaaac

SEQ ID NO: 193676 - DNA, 345 bp, Zea Mays
tcccccaaaagtccaaggatgaagaattaaatggttccaaggtcaagaggattacacaatagttctgaaaattcagcacaatagcatcacattttaggttctgaaactacacctggcaacaacctgaacatcccaactttaaccccctagatccacccgattccaagtaatacatgccaaccctagttaataatatttgcttaccaaacaaagctttacaagtttgctatagcagcccaagactaaaaactcgtggatcaagggttatagtgctccaatgttgagtcttgcactgcaaattcagatctgatcagttttcagtatctgaaactccgagggcctgac

SEQ ID NO: 193677 - DNA, 364 bp, Zea Mays
cccaaacacaaaccacaagtcaaagttcagacacatgatggccgttttccatgcgctctcattcaaggctaaatttgagtacattccatcctttgaagtctccttttactgtctcttcccatccttctctttttgtgctgaaaaagtccttcgagtcatctcctttgcttcgtgcaccaagaccttcgaaaccgaagacgcttgagcgtcgcctaggcggtaaggcgggccggggacataaggcgtcctcctcgccttggtttagagcctaagatgggtggaagtggcagcgcggcgactgcagagggcggtgcgacgactgttgcagaaggcaacgcggcgatagggcgaagggtgacacgac

SEQ ID NO: 193678 - DNA, 294 bp, Zea Mays
ggctggggctagtgtgggtgaaggggagctgcgaaatctttttgagggtgaggaattgaggataatgctgttcaactatagggagatgggtatcatcccgaaggttgagccaatgtaatatgtgatgccctcgctgtgtgtatgtaaccataatttgtatgataaggctgcgcgccttcgttgatatagccgcgtccataggccactgctgcgcggagtcttttgggagcgacttcgattgtgcgcacctattattccggctgcacccttaggcgactttggcacggagagtcc

SEQ ID NO: 193679 - DNA, 420 bp, Zea Mays
aacgatgcgacgcatgtcgggaaagtgaaagtcccggcgaagccggtgcaaggtgcgctgcaccccttcgtggccatcctcatgtaccgccgccaccagctcctgcaggagcggagatgctggtggcacgtacagccgcccgtcgtaggtcaccaaatcgtcggtgagggcccatggagccgctcgagatccagcagccaactcctcgcggagagctaccagcgccgggtcggtggcctgaacgtcatggagacgtgtgatgaagtcgaagcgcgacgcggagacagctagaaccgcgctgccgttagtctcctctgtgtcgcggcgggagagggcatccgccaccgtgttgagggcgcccggcttatattcgacggcgaagtcaaagccgaggagcttgccgacccaatgatgcttcgg

SEQ ID NO: 193680 - DNA, 299 bp, Zea Mays
ggaagtgcaggactcctctgtattgggatcaaactggagaaagacaattctttgggcctgaactgattcaagaagcagaagagcaagtccgtataattcgggagaatttgagggtggctcaaaccagacaaaagagctatgctgataatagaaggagaccactggaatttgaggaaggagattatgtgtacctcaaggtgtcaccacttcgtggcatgaggagattcgaagtcaagggcaaattgtccccacgctacattggaccattcttgatctttaggcgagttggggagatggca

SEQ ID NO: 193681 - DNA, 501 bp, Zea Mays
gattggagcagcagggctcttgggtttcaccatcttcttcaatgtccttttcacactgtcgcttatgtacctgaaccgtaagctctgaattattgtgttgattccttgcttatcaccttaaaatagaatccgaatcctgccaatgatattttttgtgttaatatcagcaacatatgttctttaattctcagctctcggcaagccacaagctgttatatcagaagaaactgcaaaggaagcggaaggcaacgggcattcaaaaggggcaataagaaatggaagcacaaaaccaaaggacggtagtcataacagtaagcaactctgacagaagtcataactcataagcaaatctgaaaaacaagtgacatcttctaatctgaggtttggttatttcagaggaaatgaaggagatgaggttgagtgcacgtttgagcaactgttcatcaaatggggtttcacgactcatgtccattggcagcaatgaagctgctccaacaagag

SEQ ID NO: 193682 - DNA, 435 bp, Zea Mays
gagaaaatgaagtaaattcagaatcacccatccatgaaaagatgacaaagttcgggtttgaggacaaaggtgatgcatatgaagattttcaagagggagatatggatcaggttgctggatctgctgaagaggaaggttatgttacttcaggaagtggtattgctaatgaaagcgaatatgaagaagcagaagatgatatatttgtaggagacatggaatcaaatgtaagaacatgtggtagttttgacaaagatccatatcagcgccaagaatcacaaggatcatggggaccccaagatttggataatagaatggacaaaatcagtgatacaatatctcatggaaaggaaagggagactaaagaatccttgctggagaatgttgaaaagacagcggcagaagaagtactaaaccatgactgcagggaagggcaga

SEQ ID NO: 193683 - DNA, 504 bp, Zea Mays
cgtcctagattaaatcgtgttttcaaacgaaccggtatgctttgtggttcatcctatccgatctcaacggcccagaacaatccgagccctagctaccctgtttttaatctcacccgtggatccatcaatcaacgacccaagggatgcctcatgcaatgatttaatctcccccgcccacatcagatcggacgactagagtgctccttcaacctcccatgaaggctggcccgcggcggcgagcgtctgcacggcagttccccaccagagttcacgcaagacgcgcacccgagccctatttacccatccaaaaggttcaacacgcaggggagatcatcacgagctagctggtaggtatttacttggtgtcgaagcgcgggcgctatcgcccacggaagcagcggcatggcggtggccatacattccgtcgagcaattactccagctctggcaacccatcccgccatgggtacttgttggtgtggtggcagccgggcacgacgagcac

SEQ ID NO: 193684 - DNA, 306 bp, Zea Mays
aagcttcggctcctcaacgaacgcccactatgtgctgcctccaccctcaatctaaacgagagtccatctctagctccttgcgacacgagatccaccaatgataatggatttagggaaaacagttgcatcaacacccccttgctcacttctatttgggtcacgatggaggcaaggcctagcttcaacatcccttcagtgggctcctcccaaacataggctgcatgtgcctactcatccctcatcggcaataaactgctttccctttctattatcgtcggtgttctgtggcctcgagccaccaccgtc

SEQ ID NO: 193685 - DNA, 281 bp, Zea Mays
aaaaacataggtgggagcaggttaattagtttttcttaaccattttctcaacttaaactggacaacgcaccagtcacttaaaacaccatattttaggagacctcacatgtcgagcatcaatttataacataagtgactcaacctctatcacgcttgacaactaccacatcacccgatttatctatttggaacatcacctgtctagcgtactactagtaccccgcattttgactcgacttgtaattatagaggaagcaacggctaccttggcatgccatcac

SEQ ID NO: 193686 - DNA, 507 bp, Zea Mays
ctccatggtgactccattgtactttgcacatctttatcactttatttcttctaactcgagtcaaagtatcaattatcttaatatgatattctgtataagtcaaatcaccctgaacattgagttcttccattggtagctattcctcagggacacggaggcacttcttaagttgagacacatggaatacatcatgcacatctgatagatgatcaggtagctcgagttggtatgccatctccccaactcgcctaaaaattttgaagggtccaataaagagaggggataattttcctttaactttgaatctcctcattccacgaagtggtgacaccttgaggtacacattatcaccttcctcaaactccagtggtcttcttcgattatcagcatagctcttttgcctggtctgagctaccctcaagttctcctggattatacggacttgttcttctacctcttgaataaatttaggcctagcacttcctgccatataaagctttaaatggt

SEQ ID NO: 193687 - DNA, 656 bp, Zea Mays
taaaaattaaagatcggagatgtgggcttcttgtccgtgggagtacccatgatactgaagataacatggatggctatattccatatgaatggaagcgtacattatgttcatggatgatagatctgggggttatttctgaagacatgcatgtcaaatacatgaacagcaatagaaccagggaaatgttggcaggtaaaattaccagggagggtattttctgtgggtgctgttccaagattctcacaatagcgaagtttgaacttcatgctggttcaaaagagaagaagccctatgcaaacatctttctggaaggtggtaaggtatctttgttgcaatgcttacttgatgcatgggagaagcacacacaaagtgaaaataagggattttacaagatagataaaggcgacgatgaacatgatgatacttgtgctatttgtggggatggtggcgatttggtgtgctgtgatcactgtgcttccacttttcatttggactgtttgggaattaaggtatgcatacagatatatatatgtgctacaacacttttgtttgtttcaaataggtctgttgggggtgggtcgggggatgcacccctagattgtctattctgtcgttggatgcatttatgtttatttaatttatttataacaattgcc

SEQ ID NO: 193688 - DNA, 322 bp, Zea Mays
gcaatttgcaaaccagaacatcacaatgggtgaagcgatactcactggatatgggttattcaaggaaaaatactggttttggatcggtgttggagcattgtttggttatgcaattattttgaacatcttgttcacaatgttcttgacacttctcaaccgtaagtttctgcttatcttttaaggccaaaacaaattgacccttgaaatataatcccctcactcagtattttctccttcacagctattggtaatctgcaagctgttgtggccaaagatcaagtacggcacagggattctaggaggaagaatgacagggtagccc

SEQ ID NO: 193689 - DNA, 424 bp, Zea Mays
cagtgagcacttgggcacttcgatcactagaaccatggcaattgattggcaggcattgggatatgaaacgagggacctccaacaactagaattaccattcactcttgacaaaattcggcgtaccgtcttttccatgtcgtctgaaaacgcaccgggtcctgatggctacatgagtgccttttttaaaacatgttgggacatcatcggaaacgatctgacggtcgccctcaactgtctatactaactcaactcccaaggtttcgagctgttaaactcagctaatattgtcctactcccaaagaaagttgaggctatcaagatcacagattttaggccaacaaaccttattcacagtatagccaaaatcttcgccaagttgctggccaacagactagccccacacctaaatgctatggtttccaac

SEQ ID NO: 193690 - DNA, 1110 bp, Zea Mays
atattttgcatattattatttccctatctttcccacaagctgcagtgtcctgcttagcactgagcctcatatggtccatgcttttagaagctaaatatttcacgtattgtctgatgcactgccctacatgctcaattgaccctttcttcatgttatgtatctattgcaggttgattttgatgacatactcagctgggagtacctgttcaagctatattggctagatctgaaagggaagctttcattaacattggaagaactcactactgccaagaatagatggaatgttcctagcacttctgctaggaaagaaaaagaggagtcgtctgatgacctgtatgatgctaataatgatgatgatgctggttctgactgctcctcaggaaaacgaaggcgaactaattcaaggaaaaagggtcaaaaacgccgaaaggtaaatagagattgtagcattcttgaaaaaaaggtcgagcttccacttagaaatactgagagcattccggtggaagtgccaaatgaacgggtgccatatccggtacacacaaaagtaccaaatggacgagtacccatgccagtagacacaaaagtaccaaatgaaccagtgtccttggcagcaaacacaaaatgggcatcaccagagctattggagtttataggacacatgagaaatggcgatcaatctttcatttctcaatttgatgttcagactcttctgcttgattatatcaagaagaataaccttcgtgatcctcaaaggaaaagccagattatttgtgactcgagacttcacttcttgttcaggaaagcacgagttgctcactttgagatgttaaagcttttggaaatgcattttcttacgaatgagacttcaacagtaactaatagtagccaagtgactatcaatctcaattcagctcatgtagataccaatggacacaatgacacggctgcaaaagtttcccctgataagaggaggaggatctatagaaagatggaaagagatacacaagttaatcttgaggattatgcagcaattgacatgcataacataaatttgatttacatgaggcgcagcctaatggaggatttagttgatgatgtcaaattctc

SEQ ID NO: 193691 - DNA, 491 bp, Zea Mays
cattgctcgaccgtctactactacttgttttgataatcggccataacataaccagggattaggctgattaggtctatagtgcacatgatatttcaaaaattcatgcaaagttactctatctcttttggagtcatctctgttttgactaatgtgttgtccatggtatttaatacctagttgaaagcctcgttcgccatatggaaataggagcgggtattgtagaggcatatatgctggatggaaaatagatatcctttgaaggctattttggtgtgtgctaacaatgatgtcccgtttgtagttctcaagtgataaatcacctacaatcagcatagctaattcttcctgatgtggcatctcatattgaattctatcagtttcgtcagcgcctactattctaatgcttacatctatgcctttgtgttcttcgagaaaatcacgagcttggcggaatatttttactaatggattatattcgtcgagcatttttt

SEQ ID NO: 193692 - DNA, 388 bp, Zea Mays
ctttaaaccatactttcgcatcctccccaatgccaaccgtaaatcggctaaatggtcactgaaagcagccgatttcaccacaacatcatcaatgtagatttctaacacaatgcccaaaagatcatgaaaaataaggttcatggcccgttgatatgttgcaccagcattctttaatccaaatgtcatcacaacccattcaaacaaccccacaaaaccagggcaacgaaaggctgtcttagatacatcctcttcggccataaaaatctggttataccctgcattaccgtccaaaaaactaatgattttattccctgaagcctgattaacaagttcatcggctataggcattgggtattcatctttcggggtggccctgtttagatcccta

SEQ ID NO: 193693 - DNA, 376 bp, Zea Mays
aaactctgttcaatctcttctttccccgacctccgaaggctgcggatagtgcattatcttctgccttggaatatgctccaagcagttcatcacttgtagcttcgatgcatttcagccagccatcgtttggttcatcgaatttatccccatacctgaatgtatacttcagccggaccagttcaccttcgctaaacttggtgatggtctccttcgccatttcctagctttctacaagcggccatactctgaatgctatatgctcttgaattaaatctcttgtaccaatgaagaagcagacaataccgaaggccttctgacacgcttcagcgacgtcatcaatttcgaccttcggctttcggaggccgaaacgggacca

SEQ ID NO: 193694 - DNA, 563 bp, Zea Mays
agtaatcttaacgacaattcaaataaggccaggtattatttcattagttactttgttcttttgcgatgaacttatctgatgaaacggggtagcagatacttgaatgtaatatcaattttacaaagaaacacaacttttatcaacacaagattttataatgatgctgtttttaccttctggggaaagttgtatggggaaagttttccagtatatggtgatatttatgtggggtataaattatgtgctcctgtctaattgtccactgtggaattctcttgcagggaaagatctagagcttttggtggtgctatggcgaagattgataaactttgtcccaatattgtgcgaaaacgttctcgaggagacagttcatctaatgaacgatctagtgtgttatcatctggaggagttacccctaaaaatgttcctcagagccatttaaatgcagatgatatggaagctgggcttcagagagaagagaggacaaagaatgcaggacaaaataggagaatacgtacatccatggtggaggttggtcctgattccaaatgttcatgtagttt

SEQ ID NO: 193695 - DNA, 467 bp, Zea Mays
ggacgtctgggcattgagggcgcggtactcgatgcagaaacgccacgagccgtccgccttgtggaccagcagcaccggagcggagaacggcgacgtactggatcgtatgatgccttgagctagcatggcctcacactgccgctccagctcgtccttctgtagctgtgcataccaatacggccgtactgccaccggagcggtaccgggcagcaggtgtatacggtggtcgtaggagcgagccggaggcagtcccgtgggctcgtcgaagatggcgccgtgttgctgaaggaggacgtccatgaggggctattgggcagcgtcggagactgccacagccagctgctgcggggcaggctgctgcgaggcccgcacgccctgccagtggatgcgctagccctgatgtcggaatgacagggttagcgcccggaaattccactggatggtccccaacgtctccaagaagtcca

SEQ ID NO: 193696 - DNA, 290 bp, Zea Mays
tcccatcgtcgccggggaggttgccacgacggtagacacgaattcaccgcaccctcgttcttcttcatctccggccgccagcacggctcggccaaattgatcaccaccgctcgctccttctataaattgagcccgcggccagctccaccacattatcacgcaccaccccaaccagtattgctcccagtcaatcaccagcgagctcgaattttaaacttcccccaattcggtttccgcccccgcgaagaacagcttcaccgtcgccagccctgttccggtcagtccctgtc

SEQ ID NO: 193697 - DNA, 500 bp, Zea Mays
tgaagtgtctgagtatgatgatttcttctccttgggtggtaactcaattactgcagcacatgtggcccacaaattggagattgacatgagattactttatatttataccaccccttctaaactttttcatggtttacttggggaacacagtcatgtaattcctccaactcctgaatttcacaacagaaagaagttgagaaaatatgcaagcatatcagattcctttggcccagtttctgaatatttggacagtaactttcatgaccaagggcagataagtaaagagggtgcatacgatcactttgcagggaatcatgtaagtgatatagatggccagcttagcaaaagtaggacttacaatacataccaagcaaaaaacctgtgccctgatacatgctcaaatgatgaaattttcagtggcagaccatggatactaaattttcacttacaaaaggtgtggtctattggccgttgcaatagatttatgcatggttctgaag

SEQ ID NO: 193698 - DNA, 302 bp, Zea Mays
ctgttagcaagagggtggaagctatgcacactgcatcacagatatggcagaccttgagtagcatatactctcggaggggtaatgtggtggtgatgatggagattcagaataaggcagatgtggtgaaacaagcagggagaccagtggagcaatatgctagtgagcttcagtacttatggggagaactagatcactatgcccctctccaaatggtttgtccacaggatgcacacattgttcataagtgggtagaggacaggagagtgacccacttcttaaagaatctggatcctgagtttgag

SEQ ID NO: 193699 - DNA, 444 bp, Zea Mays
gagcagttcacttttttaccgtttggctacgtgggagtgattctcgcggggagtggagctgtgggagctctgccaaacgcacccttagtaatatccaatttcagtgagagcctcttcctatgcaaagacttaatagattgctgcaccaacatataattatcatggatcgacctccccctcacaaacgcactctgattagctgcaaccaagcgatataaatggggagtcaggcgatttgcaaggatcttggagattaacttggcaaaactgtggatgaggctaattggcatgtaatcagcagatgtcgaagcatccacctttttagggataagagtgagataagctgaattcaaatgtcccaactgatgtgtgtttccatgatgaagagtaaataaggcatccaacagatcgtacttaataatatgccaacaggtcttataaaat

SEQ ID NO: 193700 - DNA, 302 bp, Zea Mays
agaaaccttttgtaggcagtaggcacacttgcttgaaaattgcacttttaggtcgataatataacggtaaaaccagaatcataacagcattctttattcttggtgttgtgtggatcatgtgttatcgtgttcccttttccacagtatgcttataacgttcctttattgcaaaattcggacttaaaacacgaacactatgtttgtttggtagctaccgacttaacagattctgtgcccatttccgttgagtatcttcaagtctttgctacctttcttttttctgccgagaatagctttgcact

SEQ ID NO: 193701 - DNA, 455 bp, Zea Mays
caaaacggcggtaaaatcctgcaagtccaagaaaactctgaatttgggtgaccgtcattggtgtaggcgagtcttgaatggcttcaaccttgctgctatccacatcaatgccctacggagtaaccacataaccaagaaacgagacacgttgcgtgcaaaatgtgcacttttccatgttaccaaacaagcgagcagcaagcaaagcatcaaaaacaacacacaaatattctaaatgctcctctatagacttgctgtaaataaggatatcatcgaaataaacaacaacaaacaaacctatgaaggcccgtagaacttcgttcattaaacgcataaagctgctgggagcattagtcaatccaaatggcataaccaaccattcatataaaccaaattttcgttttaaaagccgttttccattcatcaccgagtttcattctaatctgatggtaaccgct

SEQ ID NO: 193702 - DNA, 280 bp, Zea Mays
gttcattcatgtttcttcatgaggacgcacgttgctattattatatgttgatgacatgttgattacaggagatgatccagaccatattgctcatgtgaaggcgtatctgagtaaggaaattcaaatgtctgacttgggggcactcagttatttcttgggcattgaggttttggcgttttgcagactcaaaatggtatttatctttctcagtccaagtacatacaagacctccttgatcgttctggtcttagtgatactcacactgttgccacgcctatgg

SEQ ID NO: 193703 - DNA, 331 bp, Zea Mays
attggcttcgtctaccccgactaccgctacctgctgcgggggcaagggaagaagaggaaagctgctattctggccgcctcggctgaacctgtgccgaaggctgcgggcataaaggtgaaggtacttacccaccgaccacgttatattgaaccggtcgtggtgcctgagtttggcggggaggcctcttcagctgctgaatcaagagaaactgctcctccgatgcagagggctgaagaaccggctataatgccgaaggcaccttgggttgagctagttgaaatgaaggttgacaaagataaggctgaaaggtcaacaactgaagaggtaacaa

SEQ ID NO: 193704 - DNA, 2291 bp, Zea Mays
caaaatttaacgcatctgcagtgtttggcaatggcatgacaatatttgctatatataccgctttattagtttgggcggacacaatatactcactcccgagttccgaccaaggctaaccatcgaattgacatgttcacctttttttccctccaggatctatattgttatacattgccgctttgattgctgatcttcttctgctgccactacttggatggagaatgccatcaagttaaaggtattgacaatagtttcagtttcagtttaagttgcggttctgtcgttcaaatctgtacatatagttaggaatatggcactacacgcatgaagttcccggaacaacaaaagtttggacactttgtatatgtagcgggttccttttaaggcactccccacttgaaacaaaatttagccctaaatttgtgtcggagctaatgtaattaaaatgattaataatatattaactgtctaatttacctgctaatgatggtaccactggattttattttaaggtcctcatcaacaaaaggaaactcttccggtttttttgatagattttgtccttgaattcctctggcttccttccctactccaaatcaggagatagcaatgtaatataatctcccatcctttctcgcaaatgatgctgcaacgttgcatgcataagcagcatgtcatcaggactagaatgctttttcataccaatgctctgaaactagacaggtacctgccaattttatcgagtttatttccagcaacgcactttgattaattcgccttcttgaaacagtagataagttctttgctatctctcaggatacacattgttattactatctcctctccaagttttacgtaaataaaaacaacaagcacttagttcacattccaaagcatttcagtcattacaatggcagcaaacatgtgctggtacaaaacgacccacaagcacataagctttgtttggcaaggttacagctctaagctccacaacgcagttttacgcctgttttcatccaaacaccataatgtgcctcagctctatgttctgccaaacatgctgtactcaactactaaatacaggaatcaaaactagtaactgatgtttgaataacttgtgcacttccattttttatgaccaacgcctacggcctacctctgatcacattttttatatcagctatcacccctatgtgaaactgtctttctttaattagtttctcaaatgccatctaattaacacttttagctccgccattgccatcctgtcagttagaacagtaaacaatatgtgttctaaaatatttcgtcacatccagatgttgtatggtgcatgtcacgatcacaccaattgaattagaagtatctcatctcttgctgatatgaatggaaagattagaaagaatgttgcataaacgctagcatatggaccgctttataccaggtacatgtgcaaatattagttaacagttatgattgtattaggcaacaaataaacattttttttcatgcgtgctgtctttccaaaagcatgattagtttggaggctgctagtttgggagcaccttaaatttttccatgtgtagttcagggtttagccattaaactaaagtatgattaatggtctcctagacattttagtctttgtgctttttaaaaaaatcaacaaaaaaaatcttaatgtcctgttggaggcagagccaagtttggttcaaaatatttgaaaccagattgccactttaattgacttcttctgtagaaccgaggaaaaactataggacatcttttctcctgcagcttatgttgatcctgtgtggtccttttgcagctactaacttgactattttctttgtgcaggttacaatttgaactgctggcaatggggcctcattgttccttcatcttgatcctactgctatgcttcacccccagctctgctttgactggacataatgatataaatacattgttcaaactgagggacatggtcactgaagggaagggatttctccgtgactggtttgattcagaaaaagccccttgcagttggtcaggtataacttgtgtggaacatgctgtagtggatatagacttgtcatctgtgccaatttatgccccgttcccgttatgtgtcgggtcattccaatcactggctcgtctcaacttcagtggttgtgggttttctggcgagcttccggatgccttggggagcttgcacaatcttgagtaccttgatttgagccataaccagcttacaggggcccttcctgtttcattgtatggactgaagt

SEQ ID NO: 193705 - DNA, 510 bp, Zea Mays
ctctgctatggatcgcactcaatttggcacatctattcgtgtattttgtattgattctgtaggaaaatacctttctagggctcttcacaaggttcttgttgcgcaaggtacgcttgctcaattttgttgccctgatgctcatgttcaaaatggtgttgctaagcgcaagcattgtcatcttcttgagacttctcaagctctcatgcttgcttattctaccccccccccccacttttagactaaggttgtctctactgccacttatttgaaattcagccttcctcggctcttcagggtggcattccttccgagcgcctttgtggcaagatgctgattactccagccttcgtctttttgcttgtgttatgtgcctcttgtggatcgcgagcgctctaagttgaatgcacagtctactaagtgcatcttccttgggtacagtgttgagcataagggttatgttgttgggattcggttgctcgtcggaagaggatttctcggaatgttgtcttt

SEQ ID NO: 193706 - DNA, 384 bp, Zea Mays
ttggggatttcaatttctatcgctcagcggccgacagaaataagccaggagggaatgtttctgatatgaataccttcaactctatcattagcagacttggtattatcgaaatcccccttaaagggtgaagtttcacttggagcaatatgcggtctaatcctttgttggttcaattagattggtgtttcacttctattagttggactactgctttccccaacaccttgctttttcctttggcgaagacctccgaccacattccttgtgttgcctaaatcgattcttctattccgaaagctaatatctttcgttttgaaaattattggattgagttgccaggatttactgaagtggttcttaatgcttggaacgaagaaatcagaa

SEQ ID NO: 193707 - DNA, 286 bp, Zea Mays
caaatgtctactaattagcaatggccatgtgttagaaaattactcatcgaattatttgcagtaatttcagcttcaacttcaattggttcatcatcttcccgaccttgagcatttaaatcgatgtcaataccaacacttcggccaccacgaatgctccttccggcactcctactaccgcgtatcacacaactagtgccacgaccggcactacgccctaccagtgtaaatcctgcgccacgacgacctgccgtcatggaaccacgtaccatggttggtctgcctcgtt

SEQ ID NO: 193708 - DNA, 413 bp, Zea Mays
cgtgcaaaagtcgcctaagggtgcagccggaataataggcgcgcaaaatcgaagtcttttccaaaagactctccgtgcaaaagtcgcctaagggtgcagccggaataataggcgcgcaaaatcgaagtcttttccaaaagactctccatgcaaaagtcgcctaagggcgcagctggaataataggcacgcaaaatcgaagtcttttccaaaaagactctccatgcagaagtcgcccacgggcgcggccggatcaacgaaggcgcgcagccttatcatacaaatagcagttacatacacatcaagggcatcatatattacattggctcaaccttcaggatgatacccatctccctgtagttgaacagcattatcctcaattcctcatcctcaaaaagatttcgcagctccccct

SEQ ID NO: 193709 - DNA, 313 bp, Zea Mays
gtcattatggctctatcaatcagatgttgaaaggtagggaaggtatggttaatcagttggtaatgaaggggtcaaccaaacctctgagaaacctgtacttcctcttagcatttgtattgacgtcctcgggtgcataacgagatagctacagaaacttgtccccgtactcactgacagataggggaccttgcttaaatgccagaaattcctccttccttactatcatcaacccttcaggcatgtggtaatgatggaagttgtctctgaactcctgccaggtgatggcttcagggctggcatggtgtcacacccg

SEQ ID NO: 193710 - DNA, 881 bp, Zea Mays
ctcgtccagagcgcttatcgttcatccaacccagccatatttgctctctacctgtgaagaaatgaagctttgggactgggacgatgattggaagtgcatacaaaaatttggtagggaacacactgattccatacttcaagtggcatttagcccaaatgacagttttgccagtgtttcaagtgatcacacaataaaggtttgagcctctctcccttgttttgattcttatattgaattaacacaacattcaaaatataccaagatggttttcatcgtaacaaggtggtttttaatggggaacctccttccttagcaaggctgcagagaagcttcttggatgaattagtgtgttgggttatggttggtgccaaaatgtagtccccccccccccctctgtttatgcttctatttagcaggtttcgctgctttgtaagcctttttactctttataagatgcacagttctcctgcaagttcgataaagaaaatataccaagataagtgtaattaatttcctttgaaacaatgactgtgcgatagtgtgattaataagctatgctttgatgtacatcagctttggtgcctgaaatctcccacatcagagtgtactctgcacggccattcggacaaagtgaattgcttggatttcgtcacacatgatggtcagcaatatttgattagtggatctcaagactgtactgccaaggtatcgatgttgtctgtgtgtatagacacattatagttccgcgcataacaattgctactgatccatgctatatttttgtcaaatgaggcatgggccttgaaggaaaaggaatgcgtccagacaatggatgttttcatgtcgccagttgtttctgtcatttcccttccggacactcc

SEQ ID NO: 193711 - DNA, 900 bp, Zea Mays
atatattatatacatatacacaccatatataccatagtcttatgcgaaaggaacaaaatataccatatagttcctctctaaaaatagatggttactatagatgtgtccaacatccaagcaaataccaagttagcgaatcatactagatgctgccgcaagttcttgctccaaactgtaacacccagacatcattggaattgttaaacgttcctcattataaattggattgatacgttcatgtgggtgctgagcttctgcgcataacaaaggttccatttctccacccttttcaatcaaaagatgtgttttattccgtagcctctttgttcttagacattgcaatctcatatctacttctttcatgcttggtctatgtcctcctttggatcttaagcacgcttctataagtgaggagatttcattaatctcttcttggtctgcctcttccacaacttgagaatctattatttccatgagagtcccttcctgtagtccttcaatgaagtaatgagataagttttgtttggcacccgattcattgataaaaattggtttctttcttgtcaaaagttccacaagtatcactccaaaactatacacatcactcttctcagttagagaaccagtatgataatactctggatctaaataaccgaatgttccttggacaattgtcaccacatgtgtttcatcaagggatagagatcttgaagcaccaaaatctgaaacctttacagtgaagttgtcgtccaagagtatattagaagacttcacatctctatggaaaattggtattgcagcagctgagtgtaaataagcaagtgctcctgatgcttccgttgcaatcctaattcgatcatcccatgacaacaagcattttgttgcaatattttcatgaag

SEQ ID NO: 193712 - DNA, 578 bp, Zea Mays
ctggaaaggacaattgctagacttagatcgcggatcaaatatctgaaagagggagatgccaacacttccttttttcatctacaggcttgctatcggaaaaagcggaactttatctctgaattagtgcatggggaccagatcgccaccttgcaagagcaaaaacaggaggtcttgtttgattttttctccaatttgttgggtgtagcgaagcagcgtgagttcactctagatttggaggcttgccacagtgctgatgttgatcttggggccttggaccttcccattacagaggaggaggtccgagccactattgctagccttccctcggacaaagccccgaggccagacggttatacgggaagattttataaaacttgttggcacataattaaggctgatctgatggcggcagttatcaccctgcaccaaggtaacacacgcaaattgtggatgatgaactctgcgtacctaacacttatccctaagaaggttgatgccaagacagccggagactacaggccaattagtcttattcacagcttcgccaaattggtatccaaagtcttggctaatcgttt

SEQ ID NO: 193713 - DNA, 477 bp, Zea Mays
gtagtcttataatcttgttgtgatggtgttgcttaaattgatatgttgggttattgtaggttcatatatgtgcccgccccacacactagtgaagttataagtgatgtcctttatgaggtactacaagattggaaaatagaaaagaaggtgtcgactgtgactcttgataattgcaccaccaatgatagtttgatgagttctatgcaagataagttgcccctcgtctccctcatgctagatggtaaattgttacacatgcgttgtgcagcacacatcattaatcttattgtgaaagatggaatgactgttatggataaaggcattgaaagggtacatgatagtgttgcattttggtgtgccacgccaaaaagacatgagcgttttgaacacacagctgctcaaatgaatgttaaatatgataaaaggatagctctagattgtaagacaagatggaattcaacttatattatgcttagc

SEQ ID NO: 193714 - DNA, 480 bp, Zea Mays
cagaatctagaaaactaccaccctttgtgtgagtcatgaaaaataaggcatccaaacttggagggttgttatccttttcgccctagtatatgcatggaatatatgtaatcaagactaacaagtaatatacaagaaaactaatcaacatgtttagataaaatgtcaaatacttacattgtcataaattacttttctaaatggtttgctgccactgtgatggaggattgtcaagttagatctgttttttgaatttctcttgctccttgcctagaatgcaatgaataattagattactatacatgttaacaacaccatctcaccagtaaacaattaagaacagtaatgggcaacagtatatcacttacaatgaactccttactatagaaatgttctttaaccaaccactcccagtcagcttgtggaaaatcttcagggcagttcttaatagcttgttgcatattctttgctgacttaacataa

SEQ ID NO: 193715 - DNA, 419 bp, Zea Mays
gctcaatttatagggagagcgagcggtgaccgtgaatcagggcgctgacgcgcggcggccggaggtgaagaagaacgctgatgcggtgaatacgtgttcagtgtcgtggcagtaattccggtggtcgacgggaagctagagggagtcacggcgatgcggtggcgaggttgggacacgcggcgcaaggtcggacgacggctatcaccggcgttcttatcggcttccaccgcggtgacacagtacggtggccggagttctttaacggctggagcttatccacggcggtgctctccaagcgttgtccacttaccccgagcacaagttgggccggctatcgcacgaatcacgacggcaatcggtcgctggcggtaagtcagccgcgtcgtcggtctgatcttcagcaggcattgtaccatggc

SEQ ID NO: 193716 - DNA, 1753 bp, Zea Mays
aaggccatcaagtcggcgctcggcgctgcgccggagccggctcggcggcccgtcacccggccgtctgtgctcttcgacgccaaagaggccgccgacatcgacctccgggccatcctgcccattgccctctctggttcgtaccactaactaccgacctgatcggttcgagcatgctgatgctttattagttgcgctcttctagagtagccactagccagcatttcatgaaggacaacttggttgtattttccgctaaaccgagcgttctagaattttgtttggttcgtttgattcttattttagctcccatttaatataatatctaaatcagctttctcggaattccctctggattttgctgctatttgcaggttgatcccatccgtctacatagtacacctagttgtttatgcttgtgcaattatgcatgcgattttatgaaacttcactaatagctcaaattgaatgaagtttttaaaaacaaaaccaatttagttttgcatatgaggtatttcattcgaagagcttctcttcctctacggtacctgaatcaaattgcttttcagggttggagcaccttaccagcgtagacgagagatttgcaaaatacagcaacactctgttcagggagactagccttgaggtgaaccgcgaacagttgactcccaaggagaacgacaaactcaacaagtctatctccacctaccttcgccttctagctggctatttgcatcttccctctgccctcaagacccttgaataccttatccgcagatacctgtatgaatttagctcagctaattttgccgatggccctacgagctctagcttattctcttgtttctggtgggaaccttcatgtagggtgcatgtatacaattcggatgagttgctgctgagcgcactgccataccatgatacacatgcgtttgttcggatcgtgcagttggtcaacttagggtgagtgtggctctggtctggatagatacttattttctccatttgtcttcaatatcaacttgtgctggttgatgtgctttcaggaatagtaactgggcatttcttggcggtgtcaagtcctcaggtgcaccgccacccaggagtgttctagtgcaacagtgcatccgtgataaggctgtgctggagaccctatgcaactatgtaacgccgaaattaataatccttttaacagtaggattctgtcatgatttttgatatttttttgttgataattcattttactttcaggctacaccaacaaaggaattcagtcactcgaagacagtcgtctgcttttgcactgctgtgattgttgagtgtttgggtgctgtccctaagcttgacacagatgtagtgcagagggtgttgggatttgtgtttgactctcttaatcctgcagtgacgcgagaccaggaatataaggttacctcaaatgatttgcagtttttttggccccttttcaatggtcatatttgttatattttttctttcccttttactttgcaaccctcaactggatactgtgtgtacactatttcgaacattatgaatcttttattgtgctatatgggtttacttcccattgaagaactattgacatcctgctttcttagcaatgttataactacagttatgttgtatctttatgaccaggctggcgctcttatgattgttggagtacttggaacccgtgcgactctagcgcctaaacttgttcaaaatttgattcttttcgttgcaaggactgcacaac

SEQ ID NO: 193717 - DNA, 347 bp, Zea Mays
gcttattgtcaatcccatcatcggatcggtgtgactatcaaaagtgctaatgcattggggcagtgggctcaatattctctaccctaccacgcttgacaccatgggcctagatcgggatcacctccaaccgaccgagggacctttctagggcatcaagtcaaggaggcaagcgatctcgctcaggcaaatcgatatgcatgtaaccttcaggacactagccaatttcaggaccgagacattaaccttcaaagtagttgggttctaagggacctatcacgccatccttgggagtccatgctatgtaaagttcatggtcatacccaactacacttacctgaagcttaaaa

SEQ ID NO: 193718 - DNA, 416 bp, Zea Mays
accccgtaagcagcctttggcccataccccggcgctgttacaacaactacgacatgggcagcctctccctcgggcgtacggacaacccctcggtctctgcctcgtctctctacgggaaatttgcaggcgcgagtcaacagcacagttcgtcgtcacatcagcttgcagacgccatggcatttctcttttggacacaacacccggcttcactgaggatgctccccttcatgtataaatagggcagtggtccctccagggacaaggacgcgcaaacaaacgctcactactccactttgtcttagatattggcacttgcctcaatcatctctagggacttggggacttcccctctcccgccgtgcttgtaaacccctactacatgcaccacggtgcgagtaatataagcatcatccccc

SEQ ID NO: 193719 - DNA, 348 bp, Zea Mays
agcgtgaaggccaggttgctcttatcgtgagaccaaggactgaacagattaatgatgcagcgagaacgtttgagacatttggttttgttttcagttcctctcttcatacaaatcgtgtatttggtgatttcttctcagatacgaagcataaacacgggcctctatggagcttgtccctgccggtaaataaatgcaaagcataccggtagtattagaagctcagaaatctgatcgtctgataacattagttatgttctgtggcttttgtttgccctggccctgcccattgcactcattattactcattgacaatgacaattatgggagcctacaaggaaaacatgaatg

SEQ ID NO: 193720 - DNA, 308 bp, Zea Mays
gtgacttctgatgaatggtccttcccacggtggtgacaacttgtgttgcccttctcctgccagtacgtggtggagcactaggtctcctattgaaaaagatcgatagcgcacggctttgtcgtggtagcgccttagagtttgttgatacctagccgattggatgacgacattcaaacgttcttcttccaatacgtcaacatcttccagactggttgcttccgcttcagctatgctttcaaatgttaacctgggtgctccaaagatcaaatctagtggcaacactgcttctgatccgtataccatgaaga

SEQ ID NO: 193721 - DNA, 282 bp, Zea Mays
ggatagtaagaaatgttaatggaaaattattgaggtggttgaatgcagagtttaagcagaggggcaagctggaacgagccaaccaaccaagttcaggcatgcagatccagacatgcctgaaacaaaaacatggacgagaaatgagatgacggtaaaggcttctgagtactgttgctactagatgtctggagcagtggagacgagtaccactacagaattgtgctgatgtcgtcacactgcactcgtgcaatctgtctgatgttgaccgatcaaagatcatgc

SEQ ID NO: 193722 - DNA, 387 bp, Zea Mays
aaaaagggcaacatcataagcatataaggagatccgatggagctctttcctgttggataactgctggagtaaaccatcctcctctgccttggaaaacatacagactaggacatacatggcaagaataaacaataaaggagataggggatccccttgacgaaggcctctccggtggatgatgtgctgtcctggaaatccattcagcatcacttgagtagaggaagaggccaacaaaccacaaataatatccctccaaatctgtccaaaaccaagctgctccattacttcaactaggaaaggccatgaaactgagtcgaaagccttagtaatatccaacttgtagagcaaagtagccttattctgtcagtgaagcagtctagaggtttg

SEQ ID NO: 193723 - DNA, 557 bp, Zea Mays
catttcgatgctcacattagaggcattgcagcagatcttctggaaaattttcgcgatcactcattcatgatctcgaatttcgggactaaagaggaagaaagccctatataccatattttgtctgagtatggtatgactgtattggactaccctggccactatgagggatgtccactcctcaccatggaaatgatccactgcatcttgaagtccagcgaaagctggctttctttgggtcagcataacttactgctaatgcactgtcaacgagggagctggcctattctggctttcatgttagctgctcttctaatatacctggggcattattccgacgaggagaaagtgctggatatggtctacaagcaatcgtctttggagcttttggagatgatttcacctctgaatcccatgccttctcaaatgagatatttgcgctatatctcgacgaggaatgtcatgcctgagtggcctccagctgatagagccctcacattagattgtgttattttgaggatggttccaaattttcatggccaaggtggtttccgtccaat

SEQ ID NO: 193724 - DNA, 296 bp, Zea Mays
gaagattctgaggactggccctggtggccaagccataccatcttcggaaagtagaccattaagcaaagtcatattgacaccatgagaggaagatactttcgtgacatgtctattgtgagggttggaggagacagcaccgcccctgctcctgaagaaaatgaagttgttgtttgccgaagctttttgaaggcaggcctttggttcccattgagcaaatttgtggttgaagtgttgaagatattccagatctttcttcatcaaattactcccgaagctataattaggatggggatgtt

SEQ ID NO: 193725 - DNA, 1538 bp, Zea Mays
cctcctgctcctgttacctcagcaccagcttctcccctgcaccttctgcagcagctccagatactaaagatgaaccagtacgttttttatccgcaatgacaaaatattagtaacaataatattaacttggtaacaattgtatttttcactagttttgcttctctaaatataataatatgtcagtaattttggctcagttcattttggcagtagcaattaatatttttaatatttaatgtcaaacttcagtaacaatgtttttaaatcagtaaaagtttcccattttattagttttgtctattaatatctcagtaatatttttcatagttcactttgacagtaataattaatgttttttctagtgaggtgccatagtgtgacaaataaaagctagaaatcaacattcagtaattatccattaaactcattttgatacagtgtatttttcagtaattattgtttctttttatgttaacagttgcaagataaaacagttgaagaaagtacagatgttgtgactggaaacatatctggttttcctgccagccaatttgatcatagtgcatgggcatacaagggtgccatggtcaggaatatgccagatgacccgtcccagtcacaacatctcgttcaagaagatttagttgatgtatttgacattttggatgacctgaagaatgaccctgtacagcgtgatttgttgaaagaagtcgagaaacacgatgtaaagaatgtttctacatttggttctactgaaaggagcatccccctgtcccaaggtttcacgatgccccggtacgtgtgccagtaataatcagtaattttattcttttaatattgtataatagtattcagtaataaccaattctatgtcagcaggttgtacctgatgacactgacattcagtacacacctcctcagccacgagcgacacgttctcaagctcaacctctgaaatcttcgctccgtaccaatgagactaggcagattaggaaaggccagaagaagctcaagaagtcgcctaagaaagtctcccaagatgttgagcttgatgacaatggtttccccatcatcgactttgctgctctagaccgttttgatcctcctccacatcttgccgtggatgttgagagttatggtggaccagctgcctcaggttgatatggtggactcgtgtcactattcagacctgaatggcgtcgcaaagtggctgcaaagcaggcagctttgaggatggtggcagaaattcttgagaagaggattgctcacccacagtaatatcttgcaatcacggtacatttttttgagcttatacttccacccactcacatccattttgtttatgtccattcaaaaccaggttgacatactttacatatgttgaaaagttccttcctgaggatgatccagaagatgtgattgctttggagtacaacctaattggcagtaagcagatttatgaagcatgtgcagatggcgaaatgagaagcaatgaccaagtgtactactacaccatctgcatagctaatgaagacaag

SEQ ID NO: 193726 - DNA, 330 bp, Zea Mays
aaatcgtgagcacaatcatacactatatgcgaagcataatttaacgaacgcataatacgcatcgtcacgactcggcttataaatatagagaaagcgacgactactttggcatgtcaccacctctctatataagccaaaataatttctacctacaacgaccaaacattcatgtcgagcacactttattttaccatgtctcgcatacaaccatatggtggcgtgcactcgagacacttcaatcaatgtggcgcgaccactaatatgtgaactccgatactcatgtcttaataacacatcctccacgcaaactagcattttctaaactactcg

SEQ ID NO: 193727 - DNA, 459 bp, Zea Mays
tatttaaacctccaagaaccaacaattttggtaaaaatacattcactaaagttgggtttaagaattggaaaaaaagcaaaggatgtattcaaggaacatgtccaagcaattgatggttctcatagttatgcgaggaaatgcgccctcgattttgcaaatcagagacaaagtgtagctcatgtatggtcatcgacaagtgcagccgaagaggaggcatataaagcgcgtttgtctatcatgttaggcattgcaagatttctccttttgcaggctcttgcttttcgtggacatgatgaatctaaaacatcaagcaataagggtaactttttagagatgcttgagtggtatagaaaaaaggatcctaaagttgcaatggtcactggtgagaatgctcctggtaataataaaatgagttgcccaaatgtccaaaaagatttggttcgagcttgtgcggaggag

SEQ ID NO: 193728 - DNA, 391 bp, Zea Mays
tactaagaagatcgaaatccaatagagctagacgggtagagcggctgcagatgcgatcagagcctgtcgggatgtatgagaagtcatcactttatgacatcaggggattgacagactttcatacatgcatcatcacctcgcatcgaagatcaactaacaagaacaaatatccgacaagagaacggctacgaaaaccaactcacaaaagagactatgccaacgataaaaccgggtcagttggaagaacacgaggaatgaatctaagagaagaaaagaaataacaagtggctcagaacttcttagagggtttgtgcaaccaacaccggcgtccgagggatgcctccggcacacggatttctttcctcatcgccatcaaactgctcaaaacgat

SEQ ID NO: 193729 - DNA, 379 bp, Zea Mays
gaagagcaccggcggcaacccgttctctgacgaagtgtagatcaatctcaatatgcttggtgcgttgatgctggacggggttggaggtcatgtagacgacactgatgttgtcacaatacactagtgttgcgcggggaagaggagcgtggagttccaggaggagctggcgcctggcgcaaccatgtggcttcggcaactccgttagccacagcacgatacttggcttcaacactagacctggagacactgttctgacgcttggaggaccaagagatgaggttatcgccaaggaatgtagcatagctcgaggtgaacctgcgcgtattcaggcaaccagcccaatcagcatcagtgtagaccacaagatcagtcactgtag

SEQ ID NO: 193730 - DNA, 287 bp, Zea Mays
cgggggaggcctcgaaaatatccaattccaatgaatgatggatctgtttcaggcgctgatgttgaattagggaaagagacaacttgtcagactgcttcatttggctgcagtttggaccacactgcttgcacagagtttaatgccaagttatgtattgttgcagttgatgcagcattgccacctattgacaaactgacctgttcacctggtactgtatcaggagatgtgtgtacagccccaactctaacaactgcaatctgtacaaaacctaagagaccacgggggag

SEQ ID NO: 193731 - DNA, 357 bp, Zea Mays
ctcgtcctcgcggacttgtgacttgtgactccagtcccttccaatcaacaagttgctatagtagtcccttccaaaatccacactggaaccggaacctccatctccaatccaatccaactccagatccgcctccctgctgcatccccatcccgcacgagcaccaccccttgtcctctccgcctctacatctcatcggctggtgcacctcctccctcctctgctcggcccctccctcccttctcgtgctacggcagcgtggatgcacgagactacagctgtggcaaagcggagatccggcgggagtgcagcggccggcgtgcctctacgtggtatggtgacatgaagatgcgaggcgag

SEQ ID NO: 193732 - DNA, 469 bp, Zea Mays
ggatgtggctgaggcaggagttctgctagctgaagttggattgttgaaggagaggggtctgactacagaagctgtggttgctgactttgtcttcaagaacattcagccattgaaggacagggcatacccggcctacctgtaccgaggtctagctgactccacccgggtcaccaatagaagaattcctgctgtggacttggtgagccgacttgaaatgatacttaggggcaaggtgtcaaatgttggtgcccctgttgcctactcggcttggaacttgcctccttccaaggcctttacccatttcatgtcaagtcctcctactggcgatggcggtttgggccttagagtgcgaccctctgccgaagaagttagtgcgttggttgcttcgcttgaagaaattcctgatgatgaacggcaggttcattttgaggtgcctttggatcccagtgatgcagagataagtgccatg

SEQ ID NO: 193733 - DNA, 646 bp, Zea Mays
ttcctcttaatgaaaaacatgctatggcacggtcgcgaaaaaaatgaattatgaaagaatgaattaagaaagaaactctaaacatgctggtaaaatgaattgatatgtgcaattgagtaattgtactctggattttcagtcaatatttttcattgtggaaatgcgtgtctagatccttctggaaaaaatgaattatgaaagaaactttaaacatgctgggttcatggtagtcgaaaacattttgttatatctttggatatcatgctgagataagactttaattctcttgttgttgcatgcaaccttcaatatatcttgtctccttgacaatgaccagaggagtttgtcgcgcacactttgaatgtcaattgtgccaagtttgggaggcgagcatcaaggatcctcatcactggtggggaggatttgaaggtcaatctttgggctatagggaaacccggtgccctcctggtaatttcctatcccgacggtttatgtgtaatgtcaatatgtcattcttgctcttttttggcaacatctacttcaggtgtttttcattgtacattgcagagtctatcaggctttacaagtccagttgagtcagtaagctttgactcttctgaagttacgataggtgctggtgcagcaa

SEQ ID NO: 193734 - DNA, 528 bp, Zea Mays
ggaagatgggggtgggtggatgaggcaatagtgagggagagcatggagacggcgatggcgggttccgcgatgggtgcggggcgacgacggatgaggagtggatggagagcggttaggtttttttgtgggagcggagactagggataaaaatccaatgagtgttttttggcgtgtgtggtggggctgtgggagtgggggcacaatctgaagatcgaacttgaatcgcgcggcgcgggcagtgcttcctctaactaaagagaacctagggctactaatacataaactatatatatccaaataagacctaaacaagaaggatgtattcatcccatcgtgatgatgatcctagccaccaaaaacagggtaaagcacaacactggtccaattagagatggcaatgggacccaattcctcgcggagaattccaccattagatgatggggatagaaaagtttttcccccacaaggatgtaaacgaggacaacttctcccccgaggggtaaacagggatgaggaagcattccccac

SEQ ID NO: 193735 - DNA, 491 bp, Zea Mays
cttgtaacatgtttaattctaacccatctaaccctaagtggtagaggcaacactggccccaggtgtaaggggggtactccggagtaggccgtgtccagaatggaagctggctcaatctcctcgggatcctcctcctcatcactgcctgcctccattgcgttcatgtcttggtgatgcatttctatgtgagcgttggcctcctccagttcctcttgcacatcatggagctgattttccaggatctcgatggtgttgtcccggatttccacctgctgttccaacgcctggatgcggttgctcatatgttcagcctgtagatcctgctccaccaattttgaagacaggtcgaccacgaagtcctccctatcgccgagtgtgatctttgtagttcgagcgagcctagtgaggtgcgtcatggcatcactttgtagggcctgcaggcggtacagtgcactcatgcactggacagtgattctcccaacctggtcggg

SEQ ID NO: 193736 - DNA, 325 bp, Zea Mays
gccaggtttggtcgcaagatttacaaggctgtgacctatcgggttaagccagcgactgcaacaacagaggtgctagatacttttaagagtacagagcagatgagtggtaaagcagaatcacaggtagcaaactcacaagcacacaatcctacctcaacagatcacaaaggaagtgagtcacatggaactttagttgcaagtagtggaaatgctccatcatacaaagatgttgcactagcacggcctggaacaattgccaagactcaaatacagaaacctagagacgatgtaccacagaaccaaccatcacttggtcagattattg

SEQ ID NO: 193737 - DNA, 295 bp, Zea Mays
aggtttccaccaggccgaggcaccataccggtccgctcccactgcacgcgtcatcgcgtgggccattgacttcagcttatccttcctccccagccgccaccgtgttcgtggacctcgcaccatgtgatcccttgcaccactggtacgttcagatccccaccatccccaacgaccacttgtcctccttcgtcgtgtcataccaagacgatgttgatctggagcatttcctcgcgccggatcccggagaggcgaaggacgagtcaacgtccagatgatttgtagtgcacggtcgtgg

SEQ ID NO: 193738 - DNA, 674 bp, Zea Mays
tccatagctcccaagtaactagaatcactagggagttaaattatttctgcatcaccttaggtagggagctaacaactctacaccaccaagaatttaggcgattgttaggatccggcggcctcacaatattattcaacctttgcagtactaaggtccaaacccagctgataaccgcagcatgtgaattcagagccatagtgctaaacgagctagcaagagtctactgatcccagctgccgggccatggaatccagcttagtagactgggggcctatgctaggataggaatgctagagcctacaagggttcgaagctgaggatgctatgttgctcaaacaatccagacatcaccatcatggcctagcctagcgctattgttgctgctgtccatgaggagcagggctaggccacatggtgatgttgcccatccatgggttgtagaagattgcattgcccgaccatgccctttcttcttgccagatgctgaggtgagagtgggttgcctttaattttcggaggagcgtgccaaagtagaggaagaagttggggcaaatggcatgagggtgatcggtgaaggagtggcgatgaaggtcgtcggagcaacaacagggcagtggcaatcatgttgagctcctctagaacaagatcatctgggtcgaccttgaggaaggacg

SEQ ID NO: 193739 - DNA, 450 bp, Zea Mays
ctcccgtcgaacacatggcgtgcgtcgtggacattggactgctccggcgtgctgctgctcgcatagagacaagaaggggtgctgctggggaagaaatagaagcagtgaaggcgaagtcgccatggggagaggagtagagacgactgccttcaaagttcggacatggggcgagctttgcatggggtctgccaccacggggaagagacctgggcgcccatggagaggagcgtgaccagcagagaaccaagagggagagggctagggcaaactcgactgggacaccatgggaggaacaggagcagggagtaggggcgactggtgcctagaggttgaggaccgacgccatgggaaactggagcacgccacaaacagagaggggctgggcgagctggagttgaggataagtgttggctgatcactgttgtgctggcgtgagcagtactggccgag

SEQ ID NO: 193740 - DNA, 330 bp, Zea Mays
agggcagccccgcagacaccttttaaccactggatggagtgcctttgtcaacaagaagaagcttgtctcaggggacgccgtactatttttgaggtaggccacagctaacattggagataattatcacatgttggtgttggccctttctgaagattcctcataattttcaggggtgataatggggagctaagacttggagtgcgccgtgcagctcagcttaaaaatggatctgcttttccagctctttataaccagtgcttaaatcttggttcactacctaatgttgcacatgctgtggccaccaaaagtgtgttccacatctactacaac

SEQ ID NO: 193741 - DNA, 391 bp, Zea Mays
cagcacggttgctgcgggctacaacgccgaagctgtgacggactccaatgtcgacgcttcctctcggatgatagctgctgtgcatgaaccttcaacagatgttgcagcggtgtcaaccaccgcgcaaagccatctactcaacaccatattcaccaagccctcgcctgccatacttgagcgaccagtgctacatccttcggagggggtaacaacaccagcgaccactctatctactattcctacagcacctgctagaagaatcaagcagcgacacggcttcaacctttcgacggtacatcgtagcgccagacttgccaacggccctcgaacgaatgtcatgcaacgggcccagcgcgtcctctgccgcaagcttggtctcttggcaaaagat

SEQ ID NO: 193742 - DNA, 500 bp, Zea Mays
cagggagcgcgacaccgtcgacgcccgcatccgcgccgcccaggctcgcgctgcagctggtcctcttcccgaagacgacgtacccaatggtgatgctgcgtccatccagtctgatctaggagatgctcccgctgtcctcctcactacgaagctgctgttcttctcaacctccatgtgcaggctatggcagtccagaacatccgagctcttgtcccggttgttcttaacatgtcctccccttctacactagatgacgcgactccttcctacttgttgtcggcaagtacacgttgacggatcaagtgctcaccgacacattcgcactctcttctctcgattgggtgcggatggactgcgtcaagtcatggatcgtcggcaccatcaccactgaacttgtcgatgccgtgctcatccgtgacgtccctgctcgtggtgcctagctcgccattgagtctcagttcctcgggaaccgtgagacctgggcgctcatcctcgatgcg

SEQ ID NO: 193743 - DNA, 347 bp, Zea Mays
tggtgtcgatgcgtattccacagtcgaagcctctagattgcagtttatagctgaccaccagaaagatttgcgatgcgaaacagtgcagggtgtgtctgatgccattgataagggtttcgttagtgctgattccgttggaagcaggatggttgttccttcgtcgtttactggtggtagaaggtatcatgtgatgaactaccaagatgctatggcaatatgtagagtctttggccctcctgacttgtttgtgaccttcacgcgcaacactaagtggaaagaaatagcggatgccattcgtttcgaaaccggacagcagccatgcgatcgctccgatgtgattgttcgtg

SEQ ID NO: 193744 - DNA, 422 bp, Zea Mays
cagccagagagccgcggggtgcgagttgagtttggatggggggaggaggcatggagcgtaccgggcggcgcagaggatgagcgggcgacgagatcgggcgggaaaagcgctgggtcggagaagaaagcgcggaggcggagggcgtgcgcggagcggccgtcctcctggagctcctgcaatagctctagcgccgtgaggtgataccgctcctccagcaagaagttcaccacgcagttgcacaacgaagcccaccgctcgtccgctgcaccaacgcccactgccgccatcctccttggtatcgggcgggcctacctctatcgcggtgaagctcgccgggcgtcgttgtgtggcatgtggccgcggcggaaggcacagatctcacgcgtgtgactcgaggccggtgaaagaaggggaaggagacg

SEQ ID NO: 193745 - DNA, 474 bp, Zea Mays
ttagctcatttggaattttcctaaggaatgctcgcagcaagcgaaccaaggcaggaacacatggtggccggtcccaggtggcattactgaggagaacaccaaatagctgcatatagttctgcgagagaggtggtcggctcaaattgacgagttgtgcaaatatctgaaaagcatatggccagaactctgagatgtcctcgaccaatatcctctggagcactgggaagaggctggcctcaaaagcagggagtagcgctgggtcctgctcaccagtccggccaataactgctgccagagcctcaaacaagtagtggttgaagtcagggttcttggggttattgcacacttccatgagaatacccacaagtcgagcagtgatctcatgaacaatttgaccagctatattagcaatcccaagcacccgcatcaggcacttcatcaggtaggggttctcatatgaatcagggaaaccta

SEQ ID NO: 193746 - DNA, 321 bp, Zea Mays
tgacctgaatcgggccggccgcggtgagctcgattctgcggtgtttcagaacagaattgggggaaactagaaattggagctcacggttgcaagattgggagcgatactagacggtgtggtgcgtgatgaggttgcggagctaacggcgggctcaatttatagcttccgggggcggtggcgcttgaatttatgatggcgcggtggcggccggagagggaaaaggctactggtgcaagtgaactcgtggcaaccgtcgtggcgacaactccgatgatcggcgggaagctaaaacgaagcacggcgatgcggtggaggtactca

SEQ ID NO: 193747 - DNA, 679 bp, Zea Mays
ccggactacaatggttacacaatgatcaaacagaactatctcgacctacaaacatgttgccacgcaagagcgcagaaatttaaggacacggtaaatgttgtggtcgttggaggcaaggctgtgaggaagcgattggtgagagacccatcaaccaaagtacagcctcgtactatgagaccactgcatttgctctagggccccaacatccgagcaccccgcagagaacctgcgggtatttcgaagctaaaaagagagcttcccccaagtggcatgggacccttaattagatatattaattaacaacagaaagatcaaaaacagagcaaccaaagaccacagcttcgcattttggttagacttgcattaacactgatagaggcgcgtccatcccgacatctaagcacttgcatgatagagctgtattcgacctgacagctatatatttccaccatcgtacactgatgggttagcatccaaccagagatgtaaactgacatccaacaatcaagacgccacacattcaaacgagtgaggtgagcaaggcatcctacctcagtcagagtcagacactgctggggtacatgggctcacggaccttacggagacgggtcagatcagatgcttgcttacaccggcgggaggcggcgtaggaacgtagcaggcttggtgtaacggccgc

SEQ ID NO: 193748 - DNA, 440 bp, Zea Mays
ttatttgtcttacatcttatttactatctcgctcctcaaagtctccaccctctatgggcgaaacctagggatcatctcgaaggtccgaactcattacgagggtgacatagagatcgttagtgtttggtgccaacagtaccaactcaattcacgtggacatgttgctcctccgtttcccatattcaacttatcaataaatgagctctggatcatactatttaagttgattaacctttcttacggttagcaatatatgattaatgttcccgtaacagtcagtattgtacatggtccttgaagttaattaatcgtgtagaagattgggccgagagtctgatcatgatcaatgcgtgggactgtggaagcactgggcccgaggtcacatccaatccggcctgaagatttgcgagctgggccttgctacagttgtactgctaacc

SEQ ID NO: 193749 - DNA, 469 bp, Zea Mays
tggtttctttgtgaagaatctggcaaccaggacccctctcgcccgccggccttcctccaccgacgcgtcctccccactcgtcctggtctccaccacctcctccactacttggcatcgttgtctcggccatccaggacccgacgtcatggccaagcttaccagtagtttagatctttcatgtagtaggggacattctgagggcctctgtcatgcttgtcagctaggccgacatacttgtctcccatttcctacttgttgtagagctgagcaggcttttgatatagttcattgtgatctctggacttcacctgtactcagtctttctggatataaatactatttggtgattttggatgatttttctcacttcctttggacttttccccttaggctgaaaagtctgacacgttcgccaccctcattcacttcttcgcctgggtctccacctagtttcgtcgcccggttcgcg

SEQ ID NO: 193750 - DNA, 771 bp, Zea Mays
tttcttatggtccatgtccacgattcaagaataaaatattgtttggcccatccattgtgataatggtctggttgcaagaccagctggaaatgcacaagttccactggtacagtagagcccctactccatcagagttctggataccacttgctgcttggttcactgttggcctagtcggtctttggacattttttcatttcttttcagtgtggcggcgaaagatcagtttaagctggatgaaaataattgccagatcgaagaggaagaattttgaaagaaaccatgaggttcctactgctgaacatgtttggaacacagaatcattgattcgtgcaaaaggaatgatgtgctgtgtatgcttggaatctatctcacctgctcagccccttgggcagatgatgacatcagaaaatatggttcaccgctgcaatgtttgcggtgcagctgcgcacataatatgctcttcaaattctcagaaagactgcaaatgcatctcaatgtttgggttcaaacatgtggtccatcaatggactgtactctggacagacatagctgaccaatccgaagaaggccagtactgtagttactgtgaggagttatgcagtgagtcttttctgggaggtcctcccatatactgctgcatgtggtgccaacgattggtgcatgctgattgccagtctgccatggctactgaaaccggtgaaatttgcgaccttggtcccttcaagcgccttattctgtcgccactttttgtccgggccattagcaaac

SEQ ID NO: 193751 - DNA, 293 bp, Zea Mays
gcacatcccaccagggactaccctgaaaccaaggacacaaaggacagaatggccaaaaaccaatcagctgacaaccaaagagttgtcgcccacaccaaccatccccaacaatacaatcatcaccaattccacaatgagcattaccatccccaccagcaaaaccacaacatataccagcaacaccaagaaatcctagctctatcgcctccaccaccaccacatcaccaaaatcaatcgcctccactaccagcaccgaaacaagaggacttcaccgatcaaccctttgaaggggt

SEQ ID NO: 193752 - DNA, 471 bp, Zea Mays
ggcatcctgactgacggcggcgtcgccattgaaggccccgacttcagagtgaagactgaagaagagctgcaagaactgataccaaagatacaggtgggcagatagctaaactacttatagcttgcctacatttccggaactcatgcttatctacctggtgttttgatctaggtgatggcaagatcttcgccgcttgacaagcacaccctggtgaagcatctacgaactacgtttgacgaagttgtcgcggtgaccggcgatggcacgaacgatgcacccgcgctacacgaagccgacattgggcttgcgatgggcattgctggcactgaggtacgtacgtacactattcactccaattcattctcgtagacttattacactattaattcttctgatgtctgtttctaatgtttgtttgtttttttgtttgaaggtggccaaggagagtgccgacgtcattatcctcgacga

SEQ ID NO: 193753 - DNA, 403 bp, Zea Mays
gatttgggcccgctgctcctagatttgctccgctgcccatgccttgcccttgcgtagctacttccctaggctacatcgccctatcgtgccagctcctgccgagtgaacatagaaaatgggaagaaggtggtagatctttcaagaccctccctagacagcacaattcattcaatccatctttcacctctgcagttcatatagacagaccagtccatgtaggcaggttcaagccagctccatatatatcgttggtcctactgcagatctggtgcagtccgggaggtctggtgagctcattgatggaggaggaacaagcccatgccttgcccgagctccaacacattacacgaggaaaggagaaagaagttcttgaagcacgtcgagggtacatgctgcaactgtt

SEQ ID NO: 193754 - DNA, 351 bp, Zea Mays
actgattatctatgcagctcaaccacaaccgttgccacgccttccattgacctaaaacccatgtttagtgatacaatatatcctccaccaccctcaccactaccatgacatgagccccatggttatgattacttgtatggttcctggaaggcttctccaaccccacaccatccatggatgccctgaccatgaggtgctaccgctactcacctagtgtcgccatggttccgatgaggaagacctcgaggacgacgatgacgagagcctccatctccacagatggctgctcgagttctgagcccaagaagaaatcccactctgtcagcttcgctggcaaggccaacaaggtaa

SEQ ID NO: 193755 - DNA, 306 bp, Zea Mays
ctcgtctggtttttgagcgtggaagcactgatgcagcagcaaaggttgctgacacaatgagtgttgattttgtgcatgagattatatcagcatgtgtgccacctgttttacctccacgaacaggacaaggatgggcttgcattcctgtcatacctaccatttgtaatattagttcagaaaacagactatgcaccaagtcttctcctgctcaaggatggagtgcacatgattcgtccttgtcttctcgtcaagaacccctctatcctctccaattaaatttagtgaagcatttagcccagttatctt

SEQ ID NO: 193756 - DNA, 296 bp, Zea Mays
gggttggccatgggagggaggtgctcggcgtcgcccgtgcgcgcacgggccagtgaggtgtggctagggatgaatcttaatacttattcagatgtcaaacttttagtcttcttttttcaattgtgaataaataacatatataatttgctatgtagatttatattctcgtttttagcattgaggctattaatcttcacaaaaagtaaaccttaaattccttttatatctttttaaataattgatataaaattcggatgtctatctgaatacgggttcggatgttttccacctttttt

SEQ ID NO: 193757 - DNA, 459 bp, Zea Mays
ggggatgctagcgtggactcactcttaatggtgaattactgagactcgaacggggattgaaacagagggtttatattggttcaggcttgcgccctagtccaatgtagtgttgatcgtagtattgctttggagcgtgttacaattggtgtgcttgtgtgtgagaaagggggagggccttcccttttatatttcaagggaggaaccttacagaggagtcctgcttttgacaagaaagaggagagagagggagatctgcttccctaggtcggcgtggtcggtcttctataaggtcgtgtgtggtcgtacccctagtttgccgccatccatcatgctggtaccagtagcaagtccattgttgatgtcctagcggtggtgcgtggcgtggcagatctcgcgagtcagtctcatggcacggctgtacgaggcgtggcttcgcttgtcgtcatgagcctcgtgtca

SEQ ID NO: 193758 - DNA, 566 bp, Zea Mays
gccggggcaggtgggcccagcggcgaccatgagcaagaggagagggaggagcgttcctcacctgccgtccgtcgtcttccttgctcgccttcgcttccctcctcttctctttcctagactagactagacttggcttgccttggattctcatctcgtctcttctttcttctcgctccaatcggcgcggacgtagcccccgcgcacgctaccgcctaccggagagattccgccgcccgttgggtggattccagcgccgttgagcaacaggactctagcgccgcaccggacaccaaccactagacgctgctgcctccctccgccgtctcggggcaccgaaggaggagcagagagatccatcggaccgctcggcggggtgcggccgccctcgctcctcatccaaattatccaatccactcgattccgattggcaactacccttcaccccgcgcgcgcaaccgctagctcctgccgccaagcgcaaccggacgaccgccgccctccctacgccaggaggtgcccaggtgtaggtccttcgccggcgacgaacacccacaaggttcccttcc

SEQ ID NO: 193759 - DNA, 441 bp, Zea Mays
tcgcgccaccgccgttgtgattcacgtcgacgatgacccgataaggccgccaagtaaaagccatgcacctggggataactccggtgactcaccgccgtacccctcgtgctccgcggatgtggaggataagttcaccgacgagagccgccttccggccttgtgccacgtgcctgagtacctccaccgcaccgccgtaagccttagtgactctctgttgatcgccgggaatgaccgccacggtagaagccacgaattcattgcgccagtactttcttccacctccggccgccgcgcgtcctcctaaaaattcacggccaccgtcttaccctcctataaattgagaccgtgactagctccgtgaggtcgtcagctaactagccaccgctaatcagccacaatcatccaccagtgagctcgaattcgcgttttcccccaaatctc

SEQ ID NO: 193760 - DNA, 333 bp, Zea Mays
aagaaatctaccaagtagtaggtttgaattagtagtccattagaagacaatgttgtatcgattgagctgttagaaacaaacataaagaatggtgattgcctcaatgaactgaatagaaaagataatgaaagaagagttgatccacggggttgcatgtgtcgggcgccagcggcctctgcagtgttcgcccctcctacgcgtcgttaagatggctccccgtcaagaaggttcaggcttttctgatctcggcccggtggagaagatgcacacatagagatatacaagttcagtaacatccacctatttattgtgcacggtcaaaatagtgggacc

SEQ ID NO: 193761 - DNA, 537 bp, Zea Mays
ttgatgtaaagttcttgcagtagctgctttctgattaaaccctctttctggatttggcttcagaataacaattttggtaacagtctgatctgtgtcagttgcctcaagcatctgccttctatttgatttacccttcctccagaagaacatatattttctctctttagcctgctcctttgtagccaaaggatgctgtcttgagcctcctcttcctaccagaaaattggtctgtccatgaattttattgggctctaatccggcagccaccttactgttttcatgcttttggatactgtcaactatatgttggtttggcttctgaagcagcttcatgaaaagttcattgtttgaacccagtatttccaatgcatccttgaattgtttggatcgggctgccatggtgttagaaagattattctggtcagatagcttagcatcattaccctcttgagattgcgcgcagccaatattgcgaggaagattattcaattcattgacctttttatggattagggacttcagtgaaggacacaattc

SEQ ID NO: 193762 - DNA, 426 bp, Zea Mays
agcaacctttcattgtgaccataccatctaatatgttttccacgatgaaactttatgagtggaaccgatcttaagcagtcaatgaaatcttagaacatccatggtgaactcatgaggacagatgaaaagagaagccgagcggatgagacattatgctaggggattacatgcagatgggaaccaaatgaagaaaagtctgttcctaatgactctcatgcccaatttctcatcatcttgtgtgcagtgcatgtcaaatcctcccattgcctatgttgtatgtcatacatctttgcctcatgctatttggtttacctatatatccaaaaccgctactttgaggcacaatgtgtggacacactagcttgatctccatatatatatactttgatatacatatgcggtccatggggtctcacacacacacac

SEQ ID NO: 193763 - DNA, 450 bp, Zea Mays
ctcccgtcgaacacatggcgtgcgtcgtggacattggactgctccggcgtgctgctgctcgcatagagacaagaaggggtgctgctggggaagaaatagaagcagtgaaggcgaagtcgccatggggagaggagtagagacgactgccttcgaagttcggacatggggcgagctttgcatggggtctgccaccacggggaagagacctgggcgcccatggagaggagcgtgaccagcaaagaaccaagagggagagggctagggcaaacttgactgggacaccatgggaggaacaggagcagggagtaggggcgactggtgcctagaggttgaggaccgacgccatgggaaactggagcacgccacaaacagagaggggctgggcgagctggagttgaggataagtgttggctgatcactgttgtgctggcgtgagcagtactggccgag

SEQ ID NO: 193764 - DNA, 444 bp, Zea Mays
cagccacagtagcaagggcattctttgatgagattgtccgactgcatgggttcccaagctctatagtcagtgaccgagacccaatgttcacgggacacatttggagggaccttttcaagctagccggcgtcaaactaaggatgagcacaacttttcatccacagactgatgggcaatccgaagtggtcaataaaactatcgccatgtacctgcgctgcatcacaggggattgtccgagggcctgggttgactggattgcttgggctgaatattgctacaatacctcttatcactcagccctgaagacaaccccgtttaaagtggtctatggcagagacccccccccctccactcatcccataccagcaaggagcagcagctacaccaactatagaagaaatgtttcgcgaacgggactgctttctcgcggaagtcagagacaga

SEQ ID NO: 193765 - DNA, 404 bp, Zea Mays
cacgcatctgatggtgaagcatggacccattttgatgccattaccatgagaaattcgaagaggctcgtaatgtacttgttgtgctggccacagatgggttcaatccctatggaatgaccgctgccccatacacatgtcggcccttgtttgctatctccatcaatctcccccggcgtatgctttcaaagaaagaacatattcatttcgttgataattcctagacacccgaggaataaaatgggcatgtacatggagcctttgattgatgaattggtccgtgcttgggaggaaggggtatggacgtatgacctagctatgaagacaaacttcaaaatgcatgtttggtaccagtactccatgcatgccttaccgacgtatgggctattctacgcatggtgtgttca

SEQ ID NO: 193766 - DNA, 362 bp, Zea Mays
gtccaatgtaactccaagactggtgaaggagaaatgatagttgaagtaccatatgttttttctaaaatattttgcatcgtcatctccctgactggtgaacaaccttttcaactcagtaggcacatcaggtatgtgcactttaatctttccctttctgcaacacattccacgtggctcaaattgaaatttcatggctccgcaataacaacaatcaggtatttttcgtaggacatggtgtctatctggcaagttatggtagacatagtcatatgggtcttcggtatgactagagtacccaagcaggggatatgattcaaatgcatcatctatgttaaaaaataaatacactatttgcagttatt

SEQ ID NO: 193767 - DNA, 463 bp, Zea Mays
ttcacatcctcgaaccttttccttatgcccgtcatcacgacgtctgtaattaggatatgaatccttcccttgcaaggttgcctcacggaaatgccgggggtattgattcttgcacgatgcacgacccttagtgcatgggcagttatggtttagcgacccgcatgggccatgcatcatatgcttgataaccatctttcgcagttcagggtacttgttggacgggatctcagctgagatcaaaaggtcatactgttcagggcacgtgagcttgtacttcctttgcatgatgagtagaaaatgggcatgtggcaaacctcatttctgaaattccacgacatggacgtgggctcggactttaccgagaatatcctgtttagtcaacctatgctttaactcatgtagtttcgcatgaaagacacgcactacaagattcggacgatcttgcggtgtctgtccaggtaga

SEQ ID NO: 193768 - DNA, 528 bp, Zea Mays
caacgtgaaaggccatggttcttgtttctttacaacaccattgcttgtgccagcagctgtatgtgttgcagcccaatgaattgccgacaattgaggaccattgaaactacgatgcagatgatcaacaaaatttggggtgaagcagtctggaatggcaggtggttgctcttgatacttcgggaaatgctctggacttggctgaagtattgcattttgcatctaacagaatttttttgggtcaaaatcgactgatatataagttagtaataagattatggttaggtgtaatatagcattaccagcacactaagacggcggaaagcgtgcaaagcaacatattctctttgtgttgttgcaagagaaccaagtccagttagataccaggtactctgagattggagtttccgcagaacattagactcactgctatgtatacaacacaagaatgagaagacaacttagcaaataaatatgcaagtgatgggcaacaagttatgaatattgttccaaaatgaaacaactatagca

SEQ ID NO: 193769 - DNA, 951 bp, Zea Mays
tgttccagaaggactaccattagctgtcacactgacgtaagcatggtttgtgtgttattttctgccagccctttcgtcccttgccactcaacatactttatttttgtcaggcttgctttctcaatgcgcaaaatgatgaaggacaaggctctggtatgttcccaactttctataccttggttttgtcatactacttgatccgacattgaatgctttgcacgctcacttcctatggaatgtaggtcaggaggctttctgcatgtgaaacgatgggttctgccacaacaatctgcagtgacaagactggcaccttaactttaaatcaggtgcaatggtgtttattcactttatacatactgacatacatgtttcagataattctgtttgttgaatctgattggccctgatttttaaattctcttcttcctggttgattttaagatgactgttgttgaggcatattttggtggaaagaagatggactcaccagataatgcacaaatgttatctgctgatgtcacatcactgattgttgaaggaattgcacagaacacttctggaagcatatttgagcccgaggttagtcatctccattcgtggagaaagaaaaagcatatgtggttgcatatgcatttgagatttcaggttttagtaaagatatagcttcgtagtgatccctatgcgccatcactcagtggttagataaaatgtgcacccttacaatttttttattggaatttattgcacatgcatgcctgtgtagtgatcttcagaggaaattttatgtttggttctcaagttcaattgattttttctggcttgacaattatcaggagagcatgaacagacatgtactttcttggggccatgaattctgacttatgttctacagggtggtcaagaaccggaggtgactggatcacctacagaaaaggctatattgtcttgggg

SEQ ID NO: 193770 - DNA, 305 bp, Zea Mays
caaacaggtgaggcgcctccatacaattctcacctccagggattctatgaacaatgtcccaaagaatcctgaggctcgacggcggataactttcttcagcaactctctattcatgaatatgcctcgcgctccaacagttgagaagatgatggcattcagtgttttaaccccatactacaatgaagatgtgatgtacaacaaggaccaacttcgccgtgagaatgaagatggtgtctcaattttgttttatcttcaaaagatatatgaagatgattggggaaactttttagaacgtatgcagaggg

SEQ ID NO: 193771 - DNA, 441 bp, Zea Mays
gttggtttctctgaacttgtgaaagggttagcgaaggaccgtactgtaatgttcatggcctggaggaatgatgcagcaagtaggatcagaaatcagaactagccagcgacaatcacgctccagcttctgaaacgttgctgtagccttttgttgatgttcaggactgggagctagattgtcacgatttgacactgaggacgttactgtgcctgcaagcctaacctaagatgtatcaagcatcaagtgctgctgctgctgctatggaaggtcttagccaaaattaaattatgtttctaagctctgcatgcatcttaacctgcgctaataggttttcttgatggcctcaatgggagcagcaggaacctactactttttatgcgcataaactggcacttcgcatgatgtacttgttcataagttggtcaaaaagtcggttccgtg

SEQ ID NO: 193772 - DNA, 492 bp, Zea Mays
agtgttccgcatcctcaagggcattgtgttccttgtgctcattggtttgcttgtccttttatttgttggttttgaccttgctgtctcggatgttggcgccagtatcttggcattcattcccactggctggtttattcttctggtgagccattcttgggttcttccacacgtctttctttttagctacttgctgtttgtcagtgtacttattgctcctgttaatctttgtttagattttagatgtattggcttgtttttctgattcatgtttgtggcaccttctgttgctttaggttgcgcaattatgtggaccgctgtttcggaggttgatcatagagccacttcacttgctgtgttgcccatatggtaccggtggtgcatgcagaggtccctgctgtgccaggttcagacagaggaccggtgctgcgcttcggaagatgggaccatgggactccatccaggagatggcgaggatgtacgaatacaccatgg

SEQ ID NO: 193773 - DNA, 408 bp, Zea Mays
ggggtgaccactatgccctgctaacagagcaatcgacttaagtcggcaacgactgaagacggtgcaacatgctcgcgcttacttaactcggggtgaccactatgccctgctaacggagcaatcggcttaagtaggcaacgacttaagacggtgcaacatgctcgcgcttacttaactcggggtgaccactatgccccactaacggagcaatcggcttaagttggcgatgacttaagacggtgccacatgctcgcacttgcttaactcggggtggccactaaaaagagcaatcggtttgagttaatactaacttaaactggcgcagcacactcggcgcgcatacagttactcatctaggggcggcctctatgtcccatgaagaagtctcgaaatcatcacacaacattt

SEQ ID NO: 193774 - DNA, 360 bp, Zea Mays
agggctataaaatagcaaagagggttgcaagtgagctgtgagtgtagcaaatggacagacgtatgatgacctttatcaggtgctagacacgaaggagggagagaaggacatgtttaggatggctaggacccaggagaggaagacaatggacatcaaccaaatcaaatgcatcaaggatgagacaaatcaacttctggtgaaggataatgagatcaaggacatatggcgagagtatttcgacaagttgtttaatggggagaatgaaggttctatccttgagttggacgactcatttgatgatagcaactgacactgtgtgaggagaattcaggaggtggagatcgtgaatgctttgaagag

SEQ ID NO: 193775 - DNA, 299 bp, Zea Mays
ctgctccacctcaaatgattgcgcccatgaatgtgcactcccttttctattgaagagaatacttgcagctaaaaataagttttgttagtgctgaaaaatctttcacccataatttaccctgctctatatgtttgttctatagttttgcttgcttgtgtcactatgaaatttaaaattctagaggaaccgaagctggggagagcatggaagtttttatcatcaatgtctgaaatagtcgacttgaagaagctctttgctccatcaaccattgcagtggtacactggtttgatgacttgtt

SEQ ID NO: 193776 - DNA, 317 bp, Zea Mays
tcgtgggtgcgtcggcggaggtggagaacggggaagtcgaaggaggcctggaccgggcggaggcggtggagttcggtgaggatccccgggcggagcggcgacgagaagcgcatgggcttgaacttgctgcgggcatcggtgcggactgcgagcgtgaactcgtcggtggcggtgagagcctcagcgtggtcgaactcggagcgggcatcgtaggagttggtgaggttgagcgtggtggggtcgagcgtgacgacgccggaagaggcgatgcaaaggacccggcggtaccttcccctccaagagtgcttgacgacgag

SEQ ID NO: 193777 - DNA, 387 bp, Zea Mays
tttttgcagttcgtttctctgtaagttgcaggttcgtttctctgtaagttgcaggttgaggctgcttgaacgcttgatagttttgtgtcagtacgcttggatgatgcagcgggcgttcagatatatctgatgtttttagcgtgccataatgttccttgaatgatttggctttttggctcattgcgtttgatttgatgagaaatgcctgcggaatgggtctctacagtgtgcaatgctgtctgggattcagaattttgtcccccatattggacgatatactgcattgattcaaatcgttagtgaatctaaatctagtactaatcggttatttgggtggacaagtttccgaagtccgttgttttttctgaatgttcataccagtacgaa

SEQ ID NO: 193778 - DNA, 305 bp, Zea Mays
acggaatgctagcttgaattcatcccaagtgacctgatgtccggctggttgaactgctacaaaattcacccaccaggtactggcagggcctctcagttgttgggcagcaaataacagcttctgtgtttctgtgcaactgactaatctgaacttctgctccattacccttatccactcatcagcttcaagagggtcttctgctttaacaaagagtggaggatgtgtctcagagaattccagatacgaggttttcacgcggtccttgtggaggaactctcccgccatgctgctggaattgattaccc

SEQ ID NO: 193779 - DNA, 813 bp, Zea Mays
ggaaaggcaatacaaagaactcggaaggcggcactcagatctgcagaaggagaaggacttggtgcttgatgaagtgatcaagatacaggaacagataaggcttgagaggaaggagcatgaagattgtacacagtcaagcaacattagatttgatgctctacagaagaagattagtctattgctagaagagggcaggagtagagaggtgcagcttggtgaggaggagctcaagattgtcaaagctgagatagagatatttgtcttgcagcagtgtttgaatgacatgacagaagtaaattctgaaatcgcagaacaactgcgaaagaataaagaaatatgcaaggtccaggagggaaaaatctacagcttatcacagcataatcagaaactaactgaagggattgattcagtagtgagagtattgcatctggatcataagtatgaatccttaggccaaatgaagcttgaaatcattgtgcagctcatcttaaatgagatcagctgcctgctgaataacatatctgatgcccaggatgtgaagcagaaggagcttgttgagaaatcacttgtagttacacttctggagcatttcgggcaagaggtggctgacttgaggtcagagcggaatgtcttgaggcaagatcagcagataaagattgaggaactgctccagctgcagagagaaaaggaggaacttatgaagataagtgatgaattcttggaagaggtggaggctcgtaatcacaaagtggatgagctaaaggctgaggcgaagttcttggttgtaaggttctccgaactgcaagagtctag

SEQ ID NO: 193780 - DNA, 397 bp, Zea Mays
aatacttgattagtcatttcagtccgtccatcagtctgaggatggtaagccaaactagaattcaacttcgtatccacattctcttcaaaacttttccaaaatctggaggtaaactatgatcctctatccaaaatgatcttcttcggtacaccgtgtagagactcattccgagacatgtataacttagccaattgtgatcccttacaggtagtcttaaccgggatgaaatgactcattttggtcagtctatccaccataacccatatacaaccatatcctttcgaggtgcgaggtaatccagtaataaagtccataccaatctcttcccacttctactcgggtatctttaatgggtataatagtccagctggtctttggtgttcggccttaactcttt

SEQ ID NO: 193781 - DNA, 508 bp, Zea Mays
cccacgacgccactgtttgggatatctggtgacgagtgctctcagtcacggcactggtgacgggttccctttctctgagactccaaccactggcggcaacacgggatttggtgcgtgtgtgcggcagctacgggagattgtggagctcgagtggctctgcatcccgctcgtagcgctcagatcgtgattggctgctttcatcctctacaatcactagttgagcagattttgggtgagcgcggtgttaatttgttgatgctaaggcaagccagtaacctggcacacaacatgttcgatgatatgtcatttacagaggtggtctgggatgatgaaggggcactattcgatgaaatgcattgcacggatgtcatctgggatgaggagacacatcatggctttgactcacatggcctattgcagcaccatgctgaagcaatggataaccagatgcagggcaaggagaaattggctcaaagtggagattactatgatgagaggaaagtcaata

SEQ ID NO: 193782 - DNA, 416 bp, Zea Mays
agtttcacatgactccttgtcaattctgaaagaccatagaagtcgtgtggttcctctggttatccgcgtgttggcaccgaaagtaaggaaactgaagctactaggttctcgaaaggtttgtgtttggttactgcttatctatccaccataatgacatttgtaatttttgatttgctttgtgcttgacctcatcattattttttgcattctgccagcacacaggtgccagtcatcgaaaggcaattcttcgtttccttttgcagtttgattcaaatgaacttgagctttttttttctttacttctgaggtccttgatccctggcagcctccagcttaaaatgtttggttctcagccagacaaccttcttggaagtttctctgacattgttggaacttcaacagaaatttgtgtagag

SEQ ID NO: 193783 - DNA, 582 bp, Zea Mays
cagatttggaaagccagggaatgcctaaatttgttacctaatagcaaaaatgttcaagcagaaactgatataattgatgctcttactgttagacttccttatctaggggtgactatccttcctcttcagttcaggcaggtaaaggatcctatggatatcatccgcatggtgataacatgtcaagcaggtgcataccttcattttgaagagatcattgatgtcgctaaacttctgggattaagaagtgaagaggaagtagcggatgtggaggaggctattgccagagaagctgtggtaaatggtgatcttcaacttgcccttgatatctgtttaaatttaacaaaaaagagtcatggtgcagtgtgggatttatgtgctgcaattgctagaggccctccacttgacaatttggatactggtacccgtgaaaagctattgggtttcgctctcagccattgtgatgacgattctgttggggaattgttgaatgcttggaaggagcttcatgctcagggtacttttgagaaattaatgattacaaccgcaacaaatcctcccaatttcttgattgatggatcttca

SEQ ID NO: 193784 - DNA, 829 bp, Zea Mays
gcatacctagacggtgtttatgtccactgaaataaaacaccacatattaatatgccacattgtttctcaataaaacaaagaccatggaaaatttagccaaattgagtgagagaactgtccaaacataggttaaagttgtaaggcaccttttttccaccatacagttgctaaaaagttggaatataaagaattctaatcaatagatcaccttttaaaccacaaatgatgtttccatgatattgagggcattgtattcacatgagagggtattagagtacaactagtggatgaagacattgttgggctagctactgaccttttgtgataccaggtttcctataatcctctctattcaaggcatacctaggtggtgtttatgtccactcaagtaaaacaccgcacatcattatgccacatcgtttctcaaaataaaataaaataaagaccatgggaaatttagaaaaattgcgtgagagatctgtccaaacataggttatagttgtatgtcaccttttttccaccatacagttgtgaaaaggttgtaatacaaagaatacaaaacaatagatcaccttttaaacctcaaatgacgtttctatgatattgaggacattgtattcagacgagtgggtattcgagaacaactagtggatgaagacgttattgggctagctaatgaccttttgtgatactaggtttcctataatcccctgtattaaaggcatacctagatggtgtttgtgtccactcaagtaaaacatcgcacatcattacgccacatcgtttctaaaaataaaataaagacaataggaaatttagccaaattggg

SEQ ID NO: 193785 - DNA, 504 bp, Zea Mays
tgggaagaaaatctcagtactgccgtgagcctcgaagtgttgggaataactgagaagttttcagttgctgcaggcgctcgaagcatcactactgattacgcgaagctagattgtgtaacatcaatcttaatgggtcttttatctaggaaccaatccttggctttttggaaggctttccttcctgtggtctacaatatatttaatgttcatggtgcaacactaatggcaagggagaatgaccgcttcttgaagcaaattgcttttcatcttttgcggcttgctgttttccgaaacgattcgattagaaaaagagctgttgttgggctgcagattcttgttagggtaagctgcttagctgaattgtagctttatctggtcttcaattgaatgacactgattagatgttcttgtggttctagaactcattcaactatttcaaaaacactacaaggttaagggtcatgttgacaattactttgtccgagttgatgtccgacgtgcaag

SEQ ID NO: 193786 - DNA, 349 bp, Zea Mays
ggacaacaacgacatgaattagcgggttgccactatttctagggcttttttatgtttcgtttggattacacgtatattgtttgagtcacgggctgtgtacagtatgtacattcagctgtccccctgtgaacaaggagatatgatgatgtttactaagtcaaagcatgcattgttatggtagataactacagttattggtagcaaaagggcaatatgatcatgtttcctaattaatagtggacaaaatatttgcattgttttcaccgacagcatccaagcaacaatacaaatgtcatcatgtatatatacacacctatacatagagcacttatcatcaccaaaggctacc

SEQ ID NO: 193787 - DNA, 297 bp, Zea Mays
cacgcaaccactggcagcggcggtaccacaggcacacatccatgcccattaccctctcccctcgcaagctagaaccagggcgaccgatacatctgggcggtcggcgcccaaccggccacaatcaccatgcgcaccatcgtcaaccgcggccgtacgaaaaggaacggagaaagcgacaaccccgggagactcaccagccgatgatgaggtcgcggtcaccctgatcctgtcgacagaccaagctccggcacgaaaccagcagcggctccaccctcttctctctcctcttcgatgcgc

SEQ ID NO: 193788 - DNA, 408 bp, Zea Mays
gcgccggcgagattctcggccatggcctccttgaacgcggactctgcctcagtataaaatccagccccgctctcccctaaccatcatctcgctgtgagccatctagtcaccgggaacagagaagcgtgtgccgccgcctgcgttgaaatggaaacgcaatggagtttgaaccttggatgatgtcataagatgaaatctagggcatgtggagtcttgtcgtggcaccatcgggctgagtgggccctctgcaccgcctcaaattgtcgccagaagtcggggcgccgccacggaccgcgctcctctgtgggcggggtcgacgcaacgcgattaaccggtgagctcccttctatattgtttgtgctggtctgggcatcgtatggtggcggccggtggttggaatcgggctcg

SEQ ID NO: 193789 - DNA, 417 bp, Zea Mays
atttacagcagtaccttgaacaagtcgcatgcgtgctataaacgaattagcacggctttgaaacacttctctttcttgctgccaccatctctccttttcaacatcagtcccataagactcggctgatttccccatcaaaaggttccaaaccctcgtcgtctcaaaatccaagtcaaccttagcacgaggccgctgctttttgactaactgcaagggcctctcattgggaaccatcaccacaccaccatatgggacaagagcatttgaaggaccacttgttccctcaaaagaaataacagctggtgtggtcagagataaatgcatctcagttctctgcacctgttcagtattcaaatcaagatgcttcaactttgatgcaactccttgaacgtaatccatatagggtcctgttgatgt

SEQ ID NO: 193790 - DNA, 400 bp, Zea Mays
gtcatattgatgtgtggtgttttacttgagtggacataaacacaatctaggtatcccttgaatagaggggattattggaaaccaggtatcacaaaaggtcattagctagcccaggtatcacaaaaggtcattagctagcccagtggaaaaaggtgccttacaaccttaacatatgtttggatagttctctctctcaatttggctaaattttccatagtctttattttattttgagaaatgatgtggcaaattgatgtgtggtgttttacttgagtggacataaacaccatctaggtatgccttaaatagagggtagtataggaaacctggtatcacaaaaggtcattagctagcccaataacgtcttcatccactagttaaactctaataccctctagtg

SEQ ID NO: 193791 - DNA, 289 bp, Zea Mays
aaaaatttgtaagtccacttgttagttctcacttggtattttaactctaacaaatgtcaaagtgttagaataattcaagtctctagaacatggcaattcttgaattgtataagagctgaaatttattagtttctgttttgggctgccccgcactgttttagttgtgttgtttgtttgatgaactaaatcatgttttctgtagaaaagtcatatggaaaagttatagacaactctattatcttacttgtgtaaaaatttgacaggcataagtctgatcgtttacgagtta

SEQ ID NO: 193792 - DNA, 678 bp, Zea Mays
gttttgtgaattctattgccattgcccagaaagatgctcatcacaatggaatcatttctaatgctgagaatggtgacaatgtaagtggctgggtactggtcatataggataacacttttctgttcatttgtgatacattcttgtgttattcatgttgttctgcttagaggagatgcactttcttattgcagtttgaagcttttgactttcggatgctgacccgaagtgagccgttttcacaactttttcattgcctctatgtgtacccattgactgttagcttgagccgcaaaagaaacctgtttgttagagtggaactgagaaaggacgattctgacatccgaaagcctccattagaggtttgcttgctgaattatttgtcctgatgttgaatgttggtgtctattcaaacatccttatccattagagacgtgggcttccaggctgttcatcctagggagcggaatatgatgctacagaagtggggccatacacagattgctgttggaacaagaatggcttcctaccatgatgaagttaaaatcagcctacctgctcttttgacaccccagcatcatcttgtgttcacatttttccatgtagatcttcaaatgaaacttgaagcaccaaaaccagtatgcagcatgttgcttattagtatggattatgcttagttgt

SEQ ID NO: 193793 - DNA, 454 bp, Zea Mays
ccaccatcaccgtttctcgccgagagagagagctcgggggccggggaggtttgccgccgtagtcgactcgggcgcacaccgccgacttggccttgtgaaaccttcctggcgaagagaggggcgtccgggaaggttttaccctcactgtcggggtgccttgcgcatcggaggactgggaattcctcaccgtcgttgggcctccgccgcgggactgcgccatcgcgtggcctgggaattcttcgccgcgaatcgaggtaatcggtgtaccatcttcttcgcttttcactggtcgaggtgtagggtagttgagtttggggattagagctccgaggcgtggaattaacggtagtccggcgatgttccgccgtgttgggcggcggcgccgctgttctggcgtcgggagaaggaagatgggcgatggccgttggatcgtgaatgtgcggcccagattagc

SEQ ID NO: 193794 - DNA, 276 bp, Zea Mays
ctcttgtatagtgtacaagattgttaatgtacaggaccaaacggatcacaggcgtttagtgtctgtcagttctacaaacaagggtggttacatccacaagatcacgatgtaatagcgcgaggttccgttcatcgaatgccatgcaatggaaatcttcttgatttatgctgcgcgggtcatctggctaggaatacgactccacattcgtagactccattcatgctgcttaatttgaagccgacatggcacaacaagcagatttcataacacatcttc

SEQ ID NO: 193795 - DNA, 320 bp, Zea Mays
tttcaattactcggacacacaaaaattgggaaaaagagcaaggtgtccacttcaaatgtggccaaaagtaccataagcaataacaaaccacgggagcaaagccgttgagtgccagattgcatagtcataaataattacatgcaccgaacctgatgacaccagctgccaaacaacacatcaagtgacagtgcttatgaccgttcatgcgagcatgcctatcacttgaatagcggaacattattgaggccaaacttcatgaaaaattcagcaaagcaagcttcatccttttttgcacagttttgacaaacacaacttaaaac

SEQ ID NO: 193796 - DNA, 285 bp, Zea Mays
tattggtaatgactgcaatggaccggcagttttcatgtgtatggctttgacacgtctgcaagtgtcacacttagccacatagcgtgcaatttcaattttcatcttcgtccaccagtagtgctgctttagatcatgatacatcttagtgcttcccggatgaatagaatagcggctaagatgcgcttcatctaagatttgctggcggagttcttcgttctttgccactactatgcggttattaaaccatagcacaccttgatcgtcttccttgaaacatttggctgt

SEQ ID NO: 193797 - DNA, 438 bp, Zea Mays
aatctttttagatgcacctagtgctcgttgattaggtgcctgtaagttttaggaaacgggtacgactccagagagagaacattaatggtggtacaactaccacactgcgagtacgactattctatggatattgtactagttgactcgatacgtatggtactcgaaactcgagttcaacccctaactggtacaatgaccacctatggaggccctgtactgttttagttaggccatgcggatgctttaagaagctcatctatagaaacttttagaatatgggttatgcattgttccaatcagcggcatcagttgattttgatgaaatttgtcacgggtttgcgacgctgaatagctgtggaggactggaggtatagagagatgcgtagtcagaggtatagggctgcgttatcaggaaggatctgccgagcaattgaaact

SEQ ID NO: 193798 - DNA, 399 bp, Zea Mays
caaaacctagcacgaagaacacatagccagagaagtctccgtacctgcgtggatcgtcgacacgttgaggattgggtgtactggagatggtagcacacgtcgggaacaccacgcgacggccgtcagtaatagtgctgatggggaatgcgacactccctttcacctgtcgagggcgcgatctgttactggaggaatcacatggcgcagtgaagagcgtagacacgtggagaaggatggactgtaaggtacgcaccagaaacaggatcgtagtcgccggtgtacggagcggacactcgcggggaaagagaagcagtggcgtgcagcgctatccagatctccgcccaagcgcccacagagaagctagcgggccaccgttttttcctttggactggaacctgg

SEQ ID NO: 193799 - DNA, 275 bp, Zea Mays
attggtttccatctatagcctaggattgtttccttgtacagggaatagtttcccatctatgtactttccatgcttgactactggctatatataacaggctccccacccacaatgggtgtgtggtgattccctccattcttcccttctacacattcaaacaccccctaagtataatggatattgtccttctaccgacattctttcaaattaaattgttactacctatgcaatagcatgtaactatagatagtcaggttttcctgctttgtaatccc

SEQ ID NO: 193800 - DNA, 521 bp, Zea Mays
ctggtgctccccaaggggatgagctgggatgaatgtatcccttttgctgaagatctgcgatttgaagcttcagttctgccaactcgataggagccatgcggtatggtctcttcgcgatgggtgccgtcccagggatcagatctatgtagaactccacttctctttctggcggcattcctagtaactcttctggaaacacatccatgaattcctctaccactgttatacttcctgttgctagactgaacatcattgggtcattggcgggtggctgggcctgacaagagactgactttccctgatggtcggtgaggaggactgtcttgtccgcgcaactgatgatgcctttgtgtttagttaaccaatccatccctaagatcacatcaattcctttggatggcaagacggttaagtctgccaagaatactaccccacttaaaaggattctgacttgggagcatttgagctggcatagaaggtctggccctgggtgtcggcatttcgaacccggggggtccctg

SEQ ID NO: 193801 - DNA, 439 bp, Zea Mays
aaatagaccattataaaataagaaactgcaactagcatcatagaacaactagaaagaaattgtggccgaatactatatttatctaatcttgctactctgatttcttaaacgcaacggaaatcaaatctgggccaccagacatgtagacgagaataaagaaaaacattaccgtctgcttactacgcaaagctagcaatgaataaagaaaaacaaatctggtgaacatgtagacgagaagctagtagtagagggtagggcaggacaaccggacaaaacaacattaccgtcgagctcctccgcggcagatctgggccgccgtctgcttactacaccatcgagaagctagcagtagagatctgggccaccatctgcttggtcatgaggtcctccacggcaggggcaggtgagcagcgtgtccacaggtcaccgcctatagatg

SEQ ID NO: 193802 - DNA, 298 bp, Zea Mays
gatggacccatcaagcgatgggtaccaaaatatgcttgacaagctttgcaggaaaaggagatgatacgaagccttggggtgcttgagagagtccattcaactcttatcaactcaagctatcaatcgtcaatgatctatatacatgattgacccaaggttatttttcaaattgttatatcttaaactcatatcatctcgaggaagatattatatgttgtaggaagtgaagaagatatcatgtgcaaaaatcaaggcctacaacatggaggaaagctgaaggatggtaacacttatcttt

SEQ ID NO: 193803 - DNA, 366 bp, Zea Mays
tttttcaggaagttcatatggtacatacacgtattgacatgtgtcagctcttccaaattttgcattttaccaatttcatatggtaatctggtgtcaagatcaatgaacagcctagccaattgccgaagttgaataatagccggaggtaactcactcaccccagtgtttcttatatccaatgtatccaagtactggagttttaccacttgctttgggagctctgtgatttctgtttctctaaggttcaagtatttcaggtggattagcctctctatattttccaggtggtggttttctaatcccttacaaccttctaggtcaagcacgcgaagagccttcatgtttgaaagagatggcagttgcttc

SEQ ID NO: 193804 - DNA, 366 bp, Zea Mays
agcaggtggacaacctggagaggaggaagaaggagctgaccaacgccaactgcaagccgggagttctgaaaaccaccaaggccgtaactcccattgtttctgctacctgcctcaacgacacggagatcatggttcaggtcagcctgcacagcgatgtggccgccacagctctccctctctccaagtgcatcaaggtgctagagaacgaaggccttcatctcgtcagctcatcaacctactcctccgcctttgagaacaagacattctacagcctccatcttcaggtgcatcactgcttcttcttttttttttgaaagaacgactgcttctttcattagatgcatgttcaatgttcctgccttcctc

SEQ ID NO: 193805 - DNA, 386 bp, Zea Mays
ccaacacctccaaaagacatccctatatgatgcaaatgggtcttcttccagaagaggaatgaacatggacaggtggtgaaatgcaaagcaagactggtggcacaagggttcatgtagagatcttatgatgaaacttactctccgtgccatgagtggcataatgttctcttatcgtatacctatggtagtaaaatttaatctaaaaatgcacttgatggatgttgtgacaacatatttgtatgtgccattggattcagaaatctatatggggtccctaaaggattaaacatccttgaactaaatcaaaaccgcaacatgtttagagtatacatgcaacggtcgttgtatgggttaaaacctataaagacgtggttcaaccaattgag

SEQ ID NO: 193806 - DNA, 356 bp, Zea Mays
tcagagtagcctcagccaaaggatccttcatgttttctacagtgaagactacctccgtctggattgcagctttaacatgttcacagccagatttttccaaaattgctgcaacccctcttgcaccggcaaaggcgcagaaatcaccacggtcgctaaggatctcgtcaaaggcttcagctttttcgccaatccattcgatgattccttcgggatcgcctctaataaatttttgcctagatgagtatgcacccaccttcgcaaaactttctttcaacttcttagcgcaatccaaggatttttcataatacctctccttcgattcctgaagctcatctacattcttttgcaatcttgcg

SEQ ID NO: 193807 - DNA, 331 bp, Zea Mays
tctctcatttgaccaagtgaatttcctgcctaccaacgggatttctttcagctccaggtcatggataagtctcctgaatctgcccagcattgccctgtttatattggtattgttcttgtcttctgagctgtggatctgattaaaatctccagcaattacccaagggccaacgcatgtctccctgacctccctaagctcctggaggaatgaaagcttgagagggtcgtggtgtggcccataaacaccagtgaaccaccactgggcaccaccttcctcttgcaacttgactgaaactgtgaaatcatgcaccaaactctcaataacagaatag

SEQ ID NO: 193808 - DNA, 284 bp, Zea Mays
gccggccgttgcgagtgtaggtgagggggagttgcgaagtctttttgagggtgaggagcttaggataatgttatttaactatagggagatgggaatcattccgaaggttgaaccgatgtgaggtgtggtgccctcgctgtaagtatgttactatagtttgtatgaagaggtcgtgtgccttcgcgcatctggctatgtctatagggacgttgtgcgcttggtcgggcgcatttattatgttggtgtggttgcgcctgtagctggtctgtgcgcggatagtttct

SEQ ID NO: 193809 - DNA, 417 bp, Zea Mays
tggagatgtgcatgacaaagggccttggccaccacctattcagttcgggatgcatgccactcaacgcaggccaattccctggccatccttctctggtattataattcggaggcacttgttgcaatcactgcccttggtgccccactgctcagtaaacatgagaaagagcatgtttacccattgccaactcagtgtgatacattggaagcattgctttgagtttttagacaatgcactgtcggtagattgcttccagtcgggtgcgcctaaatgggatcaatcatctgacacccacaaggtatcttcagctgaagataaattggttgcgctgtgccgatttcgtcgagctcgaggtctctgggaaaaatgtgatgagaaatggagtcacgcctacaaatgcattgttgatgctcatct

SEQ ID NO: 193810 - DNA, 2663 bp, Zea Mays
ctccctccctctctctcctctctctctcttcttgcgccgcttttccttcgctgctccgcgcggctccggcgggcggtgcgggaggaagaggagggggcggaggggccggaagttttccggccgaggagcccagcgggaggatcgaagaggaggcactggtccggggctgtccactgcatcgggttcttcgaagttggggggaccacgggactcgaagggagcgcccgatctgctccgccggcgaggtgagcttctggaggggtatgtggctgttctgcgttcgcgttccgctctcctgcgtgccgaaatgtgggtcgtgttgtggagagcctcgcgggtaatttcacctgaggagctcgctcctgtttttcctttttttccttctctctctctctgggtctttggattcgtccgggaggcgtttttgggtgggcgaatcgcttttttttttggtccgcctgggggtctattttgggatcggtttcccaacactccgcagaggcgcgtgagaacaggggaggcgtcaggtaaggtttagagacgtgcgaagacttttgggtttccgatcgaatgcagctccgccgtgctgttgtctaggcatttcttcttcttctgatgaatcgctcttctagttgcgtgaaagagtgtcgccatgtctatgttgtttggatttggagtactgatggtgcatgtggctgccgcttttgacgtttgaagagtttagtcttaatagaacatgggcactgtgtactatttacaatgatttttgtgtaagtttagcttgggacaggagccttggttgtgccatgcttgtcacagtttatttttgagcttaattttgaatccgggacatttatgcaagctgcattacccaagatgatagagggtctgtggcatgcctcgtcaggacagcttctgataataaaatgaataatcctgcaccattgcccacaatcacaacaaaatcatgatgtttctggtttgcttccaagtagtatgttacggaaaaccactactataaatatgtgacttcctgttttattatttactcattaatttgttcgaaattaatgcagattgcactagtcctttgattatgaacaagatcttcacatattttatcagatttaagtgtatagttagtagagtattcacgtatcttttaaatgctaatatcatgcgcgtttggtttgatgtgatatcatttttcattgtaccaaataaaatttggaaaaataagatgttttttattcaactcgcgtttggcatcttttttttatatgtaataatttatgaaattgacacattattttctgtacaaatcacataattaatctgctattattggaataaaggaaatgactgaattggctttgacaactcataaatgtcctggatagttgtgatataattaaggctagcctttataggtgaatgtgataaatgggttacattcaaaactcaagttacatccacaccaagaaaaaaaaatctgaagaacaactggagaagccatcctttacttcattcccttgcaactctggcgagtgaggcagcagaaggtcaggcaatgcctcactttggttgggttatttaggttcttcagtttcacttttgaggaaacaaattccagttctcccgtatttttggttggattgatttgctcactcgggtttcaagttgagtaatcatgttagttttctctttgatatatagacctaaattttgtggagaaaatatgctttattttgatattaactaaatcatgtcacaccagtcagttagcttgccagcaagctaaacaaaacttgaggaccgctgatattatttagagtctcttgcattgatgtttcaaattgtaacgagtgcactgactcactgtacttcttttccataatataaactgtgaccttttgaatattatgtgactgtattgtgtcttcattacttttacaggtgaagtcagctgatatgatgtacctcatttggataacaatttgactggcaccagattttacagaaatatgcaggaggggctagggcaaaggatgcatgtacctcatggtatcaatctgtgtatcgcaacttcttccatgccctttcaggcgcaatctttcattgagcccagtaccggacaagtgaaccctcctgtaacatctgaaaacttatctgctaactcacaagctgttaatgatgctggagcagttgaaggtactgacatgaacgaaaaatcggttcaaaaacctaagaggaaaaaacataggccaaaggtcattaaagaaggacaatcagcaaagctgcagaagcctaaaactcccaagcctcccaaggaaaatgggaatcagcctactggaaaaagaaagtatgtcaggaggaagggactaagtgcaccagctgaacaaattccactatgtgctgatacacacactagagctaaaccaggagtagtccaaagatgtttggactttgatgtggaggaccagcatggacatttggatctggtaccgcaaacccaggaaacagagatacagactggtcctgcggacacacaaccatcaatatctggagttgaaagaagtaatgttcaaatatcataccattggggtggtacaagcagttctattagttcagttgacccaatagctggtatacacggattacag

SEQ ID NO: 193811 - DNA, 421 bp, Zea Mays
gaaatatggacgtacgagcgtttcatgtcaatactgaatggttatgtatcaacccatgctcgtcccgaggcatccatgatagaggggtactgtaccgaagaggccattgagtcgggaggaccattttgcaatagtatactaaaagaccaggttgcaataggtctgcctccgtcacgacacgagggtagactgtatggaagcggtaggatgggacggaaatccttcatcccaccggattacaaaacagtacttgaggcacatcacaacatcctacatcacctagagataatggagccatttatccaacaacacatcaatgagcttcacgggcaaaatcctaggcaaacagatgattgggtaatgaagcaacataagttgcggttcaacacatggctaattgtgaaggacattccacacggag

SEQ ID NO: 193812 - DNA, 409 bp, Zea Mays
tgatgggagtggatgcacgaaggcaaagtggagggtgcgacagaggaaggtatccaaagggagcgatggagggaaggtaaccgcctgaaaatgtcaggagaggacgcacgaaggcaaagtggagggtgcgatagaggaaggtatccagagggtgtgatggagggaaggtaaccgcctgaagatgttgggagaggacacacgaaggtaaagtggagggtgcgacagagaaaggtatccatggggtgcgatggagggaaggtaactgcctaaagatgttgggagaggacacacgaaggcaaagcggagggtgcgatagaggaaggtatccagagggagcgatggagggaaggtaactgcatgaagatgctgggagaggacacacgaaggcaaagtggagggtgcgacagag

SEQ ID NO: 193813 - DNA, 293 bp, Zea Mays
accaggcagctcatcttcttgcccccgcaaccaaccagaatggccaagcagccccaacacaagtaggaggtcgtgcatgcttctactgtggagaacagaatcactgggtgaagaattgtccaaagaaagcagcccagcaaccgttagcagtcaatgccccagcaagacaaggagcaccaccgcaagcaccaggagtccgtggtcaggcctacaactgtggaaaggtgaaccacctggaggccgaagcaatctaggatgcttaggacatggcagtaggtatgtttctagtcgaa

SEQ ID NO: 193814 - DNA, 372 bp, Zea Mays
ccggccgcgctggctgcggatccggtggcggcgtgcggatctggagcggagggatgggatcggggaggaggagcacgggatgggacaatttgagatccggacgtggaatgcgacgaggaggaaggaagaattgctggagatggaagatgtgcttcggtgacaccggatttgcgccgctcgggttaatcgaaatcgacgtcactacggctggacctcggcttcctattggtcggggctcggggctcgcgggttttctgtctacgagaagagcagattagtagaaatgcttgcggcccgacggcgcgggtaggccggctgggttcctaccgtttgcaaatgcagccaggcagggaagctggttcaactctggac

SEQ ID NO: 193815 - DNA, 389 bp, Zea Mays
ccgaaagatccaactcaagagatgacttgtcgggtatcgtaattagaggtacctggattacatccctaaacgtgcttaaccccgaggttgccaccaggcacattcccgaggacaataaggtataaaccacgattcgcccaaggcccctctcggcggtcacccataactttgcctcgcccggacctgccctcggacaaggtacatactcagtagaatcctcgtcccagccgaggtcctctctccccataactaccgtctccgcctcgcccgagcccgtctcgagcaaggaaggcatccccgaggcaggtctcagccgaaggtcacaggggacatgagcatttaatgagcatacctaccccacgcagcgctgcaggcgaacaggagcgaca

SEQ ID NO: 193816 - DNA, 448 bp, Zea Mays
gtagagagggagagatggagagtcgtatagaacgtataggaggagtcgtataggacgtagagagagagagatggagagtcgtaggcagccgcttgatgtgcggcccacatgctgtgtgaagggaaggggtgccaactaggctcgcccgctactctccgtgtgtcctccttctcacccgtccgcatctctttacttagtctttttttcgcgtctcactaaaaaaccatatcagagatcatgtgctaattctaatcacaattcaagaaataaatgctaaacgtatcaacagacaacaatcaagcatctagttctaagaaatgtgcatcggcaacagtcaacacaccatcgtaattctatggaatgtgtgtggcgcgctattgacgatgactcgtatttgccactgaactatttgggccatcatcttcttctttatgggtttcgtccaaac

SEQ ID NO: 193817 - DNA, 699 bp, Zea Mays
aatagaggggctgcggttgatttggaacagcttggagttcccacgtttgatttagaggctcttgacagccctttctcggcggatgaggtctggaatacaatcattagtcttcctctggataaggcgccagggccagacgggttcacaggtcgtttttacaaggtctgttggtccataatcaagattgatgtcatggctgcaatttcctgtgtttgggccagaaagtttgccaacatgaattgcctgaactctgcttacatcaccctcattccaaaattggaaggggcagacaaggtcacagattttagacctatcagtctcattcatagttttgctaagctggtgtctaaacttatggctaataggttggcttgtaagctgcagcacattgtctcgcctaatcaatctgctttcatcaagaaaaggtttattcaagataattttatgctggtacagcacactgcccgttttttgcagcaacaaaaacagccccgtgtcatggtcaaactggatatttctaaggcttttgatagtgtttcctgggcttttttaattgaagtcctcatcaagctgggttttgggcagatatggtgcaacgtagtttgcggcttgttgtcctcttcctcgactcaaattttgcttaatggatgcccgggagaagtcatttatcatcggcggggtttgcgtcagggggaccca

SEQ ID NO: 193818 - DNA, 460 bp, Zea Mays
gatcgaagaggatcaagggactggacccctggtggagaagggcaccaaaacctacgtcggaagcgtcgcagtcgacgacaaattgccagtcaaagtctggcatttgtaggacaatcgtgccaaggcattcttgcacaacagtcgtgtcagggcacgacaattgtgccaaagtctcatacgaactttcggtagtagccagccagcgtcatgaagctgcgcacgccctggggcaggcagggctctggtgaggatgagactagttccaccttgtcgctgtccatggcgacaacgtcagaggagataacatggccgaggtaggcgacgaacggcacactaaaggagcattttgaccgattcaagtggatgccatgtgtgtggagggcatcaaggacgagacaaacgtgttgaaggtgctcgggccatggcgagctgcagatcaaaatgtcaccgaagaagacca

SEQ ID NO: 193819 - DNA, 292 bp, Zea Mays
gccaccgcgtgcgagttgtcgcccacaccattgtcatagaatgaagctcacgccgtcgtcgaggatactgccgccggggaatcctcatatacgccgccgttcgaggtccctattcatgctagggagcttcgcctcgaaacgtgggcggtgtccgcaacctcaccatatggatttagcagccggggagcagagaattcgtcgccggtgatgggcttcgccatggtcccgccgttctgcgtggtcagggccacttctgtctcaattcgtggtatggactctaccctggtattct

SEQ ID NO: 193820 - DNA, 332 bp, Zea Mays
cttagctctatgccaccggtaccttagccactccttctgccactaccaccccacaccgctctgtcctagaacctgtggcctaatgggtgggatcaacagtcccttgttggttccttcagcacgatgaccctgactcctctcgttgtgactgaatggtttgctgattctggtgcctcctacgacaccacttcaaacactagtatactttcttcttacctacctctctcgtccactccatctatcattgtgggcaacaggaacattcttgcgatcatctctgtaggtgattcagtttttactaggcactttcatctttgcaatgttcttgtggc

SEQ ID NO: 193821 - DNA, 418 bp, Zea Mays
tgcaaaatggaaacacattatcatccccctccctcctcttcctcccctcccttgaggctctcggtcggcgccttcttcctcctcttcgctttcctcttcctcgtcttcttcattatcgtcgaacatcacagtatcttgattatcagctgcctcgtcggcactgactccttttgctttttcctcctgtcgtttggcctctgctgcgattagcatagcctgaacccatatccaaaaatatcagacacaggaaatagacacttcaagcaaatgagatcagaagggtaatgggaacgttggaaacaagataaataggcaataaatgcatagcctaccgtaagttcactatctggctccaggtagagcagagaagccaactgctcaccgatgaaaggttctgagttcctggcaatctctactg

SEQ ID NO: 193822 - DNA, 277 bp, Zea Mays
ctttgctgcttgcaaactttcaacttcattgtttaatgtgttttgttcgctatcacctttacccttgtgatcctaccttgatgcttgtcgtatgtctgccacttaaaacctcccttctcccctctcaattcgagagtggtgctctacttatcccgcctttggtcgtaacctcatctttgccatgtgccagtcttaccttagctctattctttgttgtactcataccactggctctcccatgccttcatcttttctctcatacccttgtccgttatcg

SEQ ID NO: 193823 - DNA, 320 bp, Zea Mays
gcggcggcggcggtcacccaatcatcgtaacgagagagagagagggagcactcgtgaactcgagaagagaacgcaggaatgaaccgatgaacacagtcgagtctgtttgggcgtttggcaaagtcctgtataaatttggatgggcaagaatggtaccgtttaggatccgcggccgcgtctggtcgaattaatcgtaccgcctactccagcgagtcgcgggttggcacggccggcggttcaaggaaggggagctcggcgtcggcgctgggctgggaggagcacggtgaagcagaagcctgaagccctctcgacaacgcagt

SEQ ID NO: 193824 - DNA, 468 bp, Zea Mays
gaattggtggttaataagagtttggaggagccgaagcaggaggataatggggaagtaaagatagaaaaggcacaccgcctcaatgcaaagattaaggcggaggagtgcagaaataatgatgtgacgagtgcaacagaaggatggatgaagatatgtgggaatggggagaatgcagtaggtgaagaaggggtggctgttgatggtaacaccaatgtggatgaaagttcagagtttgagctgaaagatggagcactgcccttctacatactggatgcatacgaggaaccatttggtgctaattcaggcacagtgtatttgtttgggaaggtaaatatcacttctacactgaaatttcaagtacaattctggtaaattatccctaaggacacagttatactttctgatgtctgacatacacctttttctttaattgattattagacattgtaaaacctggggccaattcat

SEQ ID NO: 193825 - DNA, 357 bp, Zea Mays
gcaataggtcgctgtggacagcccatttaccgcctggggccttacctcaccgagcgccacaacagttgccctccgatgagtcacccccttccggtcgtgagatcatctcatcccaaattcgtgacagactcacgtagctactataaattaaaggcactccctgctccaccttctggttatgcacctagcgcacccttctttcacctccaattacccaccagagctcacaaattccaatttccccccatcttggtcatttacgccgccgtgaagcacccagccgcgaccaactgttcctaggttcgttcattccctctgtgccatgttttagcatccttgaatgttaacatagctcgt

SEQ ID NO: 193826 - DNA, 503 bp, Zea Mays
tgatggccttgacctgaagtactaccctcgccgttcgaccggaagtgctggaggtgtgattgtctcgcccgttggtgaaggcaatcccaggatgaacagcatggtcaacttggtcgtcgtgctcaacaccgagctggaccacgcccttgacgagttgggcaaggtttaggcagagattgcggaattgtgtgctgagtgcgcatcacgccactacttggatggtggttctcccgcccctgtcgggattcagtacccttaccattcgccacccgtggttgctttgattatggtacccctgactataggacccagatagatttggatccatagatcgatggagtcggagtctgtaataatgcttaattcagtgtcttagtcttagccagtcttagttagagttagtttgcttatcatatgttggatgcttgtcgtgatgaacttgtaatgaagttggatctttgtaatgattgtcaccaaggtgtgggtatcccctaccacttggt

SEQ ID NO: 193827 - DNA, 665 bp, Zea Mays
cagttcaggtgagatctgttttttgtttgtatcatcccattagatgggtgagatgtttcatattgtagggtggcagctgctcaagtgcccattatgctgtctgcaacttgtaaagattaggagatggataataagctatgtgaatgcacattaattataaacactcagtgtgaaactgttgaaattgccaactttgcttcggcaatttggaatagtttgtcacacctcttgacttgtcgcctcaacgcgggcacaggcacagctgttgcttatctgcctaatgtgccggagtcattgccatggcacatggtactgtgatgggcagagcaagtggtgggtgcatgcacgaggagctggtgatggcagaggggatcttatgcaccatggatggtgagttgtctatgcatggcagacctacggtgagcggctctggtacagtggtctctggcggccgaacatcaggccttgtctttttggttgtgtagaaattagggcttgtttggttagaaggggattgaggggaaactgagctagtttccccctcaatcccctcctaaccaaacaagcccttattgtttttttggcatcctcaggctgttgttgatctgttttgtttgtgcttgtcttgccttgcactgtggattctttagccaacaaacactggc

SEQ ID NO: 193828 - DNA, 584 bp, Zea Mays
gaagaaggaaaagaatcatctgccttggttcaaaagctacagaaagagattaaggaagtagttagagatacaggcacaaatatacttgagaaggatgaatcttttgatgaaaaactgttgactgcgttccgggcagctatagggaaatcagtggatggaccagccaaaagtactaacaccaatcaattaataagaacaaggaggtcattgcttcagaagggcaagaaacgtgagaatttgaccaaaaagttgtatggaacatctacaggaagaagaagaagcgattggcatcgtgattgggaagttgaattctggaaataccgttgctccccaggaataaatcctgaaaagattgagacattgcaatcagtacttcagctactaaagaaatcctctgaaatggacaaggaaagtgctaaggggaaaagggaagagaacaacaacagttccattttgtctaggttgtatttagctgatgcatcagttgttcccaggaaggatgatattaggcctctctctgcccttgcaggatgtgcgccattagaaaaaagtagccaaattaaagctagttgtaacaaatcgtc

SEQ ID NO: 193829 - DNA, 572 bp, Zea Mays
ctaggatatgattaataaaaaatgaacgagatgcatacaatatatatgaagcactagttataaccattacttatgggtgtcatcggtcgctgctgtagggtctatatggtggactagagggggcgaatagtcttttctaaaacttaacgttggctgaccgaaataattgcggaattaaacttaaaggtctagccacatccgagatacgaccacggcgaggtggctagaaattgcggagtcatagggtagagtgcacctaaagttgcccaaaacgaacatcctgtcatattggagctactccgatggccttgacatgacaacttattgccaacgtcgtctgtcgtcaaagcgaaccaggtcaagtgcctagagactcccgtgacgacctcggtctagccacctacgtccgactcatgccacgcttgttgtctagcatgtgcaccacgatgctgtgttggtcatggtcgtcctcgtgcccgccgccttttcaatgtcacgaggtcataccagtacaccacaccgcagttcattgcatctgaatctactgaagagcttcactcaatcaaatcaaa

SEQ ID NO: 193830 - DNA, 412 bp, Zea Mays
gttggagaaaggacatgctgcttgaggatgtggtggatattgacgttggctatgatgcacctccaccatcgtttactgctggtttggagttgcagaagcagaggagagcacgtattgaagctgctaagcagcgaattgatgcaactaggaaggctcctgctgctccagctgcaaaagcaaataactcagaagacgttgtaagaaaaaaattgaccatgaagaatcgagggggaaagaagaaggatgatatcgatcatatccttcccagtgacaatatgacaggttgttcaggtgctaggaaaaagagacgaagaggttcctgtgacagtattgattgggaagattgcatcattgagctcctgctactgcatggtgcaaatgaagctgagattgaacaaggccagtacagaag

SEQ ID NO: 193831 - DNA, 551 bp, Zea Mays
agctggcgcccgcgacctcggtgtcaaaggcgcgcggcgcagtggtgcggaggacgacgacggacggcacgacgcgagaaagcgcgcggcgccagtcctccgccgtgaccgacgactcgatctccattgccagctctcccccggcctcctctttcgcagggctctccatcgtccgccgcgatctaatttcccctcggtggcctcgattcggacgagctctccggcggtcgctagggttttgggcacgggctagactacgatttggaagaggatgtttatcgtcacgcaggtgatgtgaacctctagccggatggggacggggctggccggctggggtgagcgtgagtgagatcagcggtagttgggagtgaagctggtggtgaatgcgctgcgaagtgcgaacttgccggccgccgcacgagatttcggaaggggaagaccggcaccagagtcgaatgcttcagttgagcgtgccaaagaagatatttttcccgggagtcgcgtgatcaggcccgattcaaagcaggacgtgggctcgtggctggttcagt

SEQ ID NO: 193832 - DNA, 354 bp, Zea Mays
cacatcccctcgccgctatccacgcctcgcagcaatccagcacgcaggaatcccatcgtcgatgacccgcgcgcgcaggaccaccccacccaatcgttcttcccatgcaccgcgtgccccgcccatatcctccgcaccccaaacgcaatccacgcctcaccgccatggtaggaatcgcaacccaatcccttgtcgccatccaatgcacaggaccaccatcggcccgcatcccatcgcaagtgcaggaccaccccaccatctcattcttcccattctacgcgccagccccgcccagatcttgcgatgctcgagtatttaaaattctacgcaccagccccgcccagatcttgcgat

SEQ ID NO: 193833 - DNA, 407 bp, Zea Mays
cccggagtgggtgaactccatgtaacgtgtgcgtggcctatgggggatgagatgccggcgtgttgccttgctgcataaaggagtgagtgcataagagatggggttatgaaaaatgtaacagaattatattcctctagctactctctgatcaacgtgttcttcacgttgccgcctgtcccctgttcccttctatctctaccgatttctggaattccgctgtcgttgttggagatctcacatctggtatcagaggtaccgattctgggcatcgttcgctatggatcctgatcatacctatttcactcggttgcaacgtcgtcaaggtgcaatggatccgaataccaagttgattctagaagagatggagaaaaagtttgctgccatggatctgaagtaggagcgcaagt

SEQ ID NO: 193834 - DNA, 346 bp, Zea Mays
aaaacacacatacacaaattcactcgtcagtgcttgttcgaaacactaacacaacccataacggctagttggtcactccctttaatatattggagtgtgaccacttatggaggctctcttgttatcttggggcatcaaatacatgttgggagccatgtttatccctctattataggattgtaagtgagagagtggttgagtgaccctagtgcaacacatcgagagagtaatcgagtgtcactagatggtcgagttgcaaatggttgtacttgttacacttggaggttgccacttcataaatgtcttggtggttatggatcctttgaatctcacataaaggttgtcc

SEQ ID NO: 193835 - DNA, 475 bp, Zea Mays
acagggtgcaccattgtcgagcggattcagagaaaggatgaggtagccgcgagagagcgtacatgtaggagagagacacagacaccacacccagagcctgcaatcgccgtcgaccatcctatctagcagtcaccattgccccagcactacgccgccaccgctcccaactcgatcagcctctgcctccatcgacttcaagaaaatagctattttgattacgcgtatccgtcgatggggtcgttgatatcatcatcaccagggatgtggagcagggcgtcgctttgtcgtacgggaggtgtgtattgcgtcctccatcttaactatagcagctagcaaaaaggctaacgtgattagttcctttgggtggcaattacgcattgttttagatagggattacgtgttggaattggatttggttatggctcatctaattaaaagtgacgacatctgatcagcaggaattacacaaaaaaaa

SEQ ID NO: 193836 - DNA, 385 bp, Zea Mays
aaattttagctaatttaattccaaccaactattgtgaaacgaaatccatgtaatgaccatttactgctactatgtcatgttttgaggttttttattggcaaaatgaattcgcctcatccctggttagcattagaaagttgaagcaaacatcaagtttgtgcttgtttgacacaattcacaagttctgaacctttttgcaatttttctttaatattctactccatgcgtcccaatttataaattgttttagcttgtttattttcccctaaatggtcagcaagtttcagttttgttcacaaattcagcagcgtttgattttagccacagctggaaaaccccagaatcttggatctgtttttgcattgttttcactgatacaatcctg

SEQ ID NO: 193837 - DNA, 456 bp, Zea Mays
cacctcaaaatggacctgccgttcatcgtcaggaatttcttcaatcgatgcaaccaaagcactaacttctttggcagagggtcgcactctaaggcccaaaccgccatcagcagcaggaggattcgacacaaaatgggcaaaggccttggaaggaggcaggttccagaccgagtatgcgataggggcgccaacgtttgaatccttgcctctaagtatcatttcaagccggttcaccaagtctacagcgggaattcttctgttggtgacccgggttgaatcagctagacctcggtacagataagccgggtatgccctgtccttcaaaggctcaatgttcttaaagacaaaatcagcaaccacagcctctgcagtcagacccctctccttcagcagtccaacttcagccagcaaagcccctgcctcagccacctcctggtcagtgggggactcggtcca

SEQ ID NO: 193838 - DNA, 497 bp, Zea Mays
cccgtagtgagcgaagaaagggcgtcgaggtgctcgtcatgaagcgttttgtgtgcttgaaagagggacatcacaggaagaagaagccagttgagcctagcaataagaaaaagaggaaacgactctctatacgggatgggtgcccagcaatgatggaggtggtgcgtaggggcccagataggtgggtcatcacgaagttggtgctggagcacacccatgttattgttagtgcagaccgggcacgggaggtccaactccatcgcctctctggaaagtttcaggaacatgagaaccagttgcaggaggtgcgaaggaacgtgtttggagatacgaatgcgcaagggctctttaattacttcaagaaaatgcaatcagataattctagttttttcttttctatacaagttgacagtaaaaactatgtgagcaatgcagtttgggttgatgcaagagctagaatggcatacacgtactttggggatgctgtttactttgac

SEQ ID NO: 193839 - DNA, 803 bp, Zea Mays
tcagattcaattgcttcaaagaagccaaaaataaggaagagagaaaataacaattctgtttcaagttctgctcccagcattcctaatactcaaggtttgtttctattggtttgtatatcctacccatatagcttcccttttttttcgagttctactgactctggttataattatgctttttagatgttatcactaccttctgtgaggtggtggaggatttctgtggaaaaaccgaaattcctgatgatggagatggcggtgactggttgtcaatcccacttggtgatgttaaggttctcgtgaatgaaattacatctgttcgatccaaaaggatattgcatgaggttcctatggatacagttacaaggttattggatgtgattgaccgtcagattcgatattctcaaggtttgtcgatagatgtgaaagaaaatgtgagttacttaccatatcatagtagtttacattttttaaatttgcatttaattttatcttattctgtttcagagccatttagcgaatttcttgcatgttataacttagcaactaacaaatgattggataccttcagtctgatgtcgttgatgctgaacctctggttttctctgctttggaggccagtcatgctgcgttggcaattatgacccaccatgatatgccaaagcaactgtaccgagaagaagtatgctcacgctgaattcctttctcagcttgctgtgaaatggtattgttacggttgctgactgtttccttttttgcctcctgaaaaccagcttattgagcggattattgatttctcaagg

SEQ ID NO: 193840 - DNA, 614 bp, Zea Mays
ccctctttgagccatgaaattcttgaccttaatcttgccattgttcgcttgaaagaggacagcatcaaggattgttttttgagcctgtttataagccagatctctgctggggtaagtggtctttcatcatgtgccatctccagtctatgcagcaactcctttgccaaagccaactgcaaccttacatgcccaacctgcttgtcactccacccttgcagtcttcttgctgtcatctttagcttcttctctagagtctggaaggggcatctgacagcttcgactgagttccatgcagaatgcacttcctcctgaaaaccttcaagcttgggccaaaaggattcgaaatggaaccgccgttttccaggcctattgtcactgagacccaggagcagagggcagtggtccgaatcaagtgacgcagcactatgaagaagaactctggggaaggttagctcccaatccacagtacaaaacactctatcaagcttaacaaggaccgggttatcttgctggttagaccaagtgaatttgcgtcctaccagcggaatctccttgaggcccaggtcattgatcagatccctgaaacgacccatcatggctctattaaagttgga

SEQ ID NO: 193841 - DNA, 596 bp, Zea Mays
gctggagctcactagcatattgttccactagtctccccatctgctttactgcatctgccttgctctgaatttccatcatcaccaccacattcccctttcgggggtatatattaatcaaggtcttccatatttgtgttgcagtacgcatggcttccaccctcttgctaacagtgggagacatggatgccaataaccatgcaactatcacagagtttgtcgcatgccagatcctccattccgcgccgagcttatcaatcggctcaacacatgtctcctccaaatagtgctccactcccttgcctcctaggagtacacgcactcttctagaccagcttagataattcttactaccttctaacttcacatcattaggcacaagttccaacttcaactcagatgtacctgtattggccttagcaccaatcaaccctaaccccatgagctcctggatcatacttctcatttcactcatcatctcactctttgtaatccctcctgaaccactgccatcaattgttgtcttcttcgcagcctcttctgtactcattttcacaaaagcacggagtcacacgctcgactcctctctcgcatccgag

SEQ ID NO: 193842 - DNA, 510 bp, Zea Mays
ctttctcttctctgatgaagccttgtcagttgggcacaggcctgacatctgccccctctggagaagttgcttgtccccaagcaagagcgtcgggaaagcgttgcttgaccacataaaagtcctcccaggtagctgaatcttcaggaagaccactccactgtaccaaaacttggggcactgcccgatgacccttcttcaccaatcgacgatccaacactgccacaggaagcaaattgcgagtagcaaaatccacagagcaaggcaagtcggaaaagacaggcgtatgatttggaataaacggtttcagctgggacacgtgaaaaactggatgaacttgagtagcagcaggtagatccagcttataggcaacctcacccactttctcaagcacccgatagggaccatagaatttcagagctagcttggggcaaggacggttgacaacagaacgctgtgcatagggttgtagtttcagcaagaccatctcacccacttgaaaatgtctttcag

SEQ ID NO: 193843 - DNA, 288 bp, Zea Mays
gctcaatctcttatttcagggctggggtataccgatagggtctcaagtggtggaaaggttgggctccgggcaacaatggaatgtggtggtcacaatctcgctgaggaggcaaaccagtgggcaagacaaccactgaatgaaacctattaagtagagttatagctcatccggcagctgatcttggatagactgttccttgtcaggtagttgttgcaactgatagagctcgatcacagcacactgtcctcgggaagaacgtaggccaaacaactgaagccaagatccttg

SEQ ID NO: 193844 - DNA, 542 bp, Zea Mays
ctgagccttgatattctcagaaggtgatgtcagtcttttcctaagagaagtaagtagtgttactccatccttactgctcggatgtcggatcattgactaccactgaggtcagcactggcattttttttaacgtagagctctgcagttcttacgctgacaccttataagtgaaagtgcaatatagaggccttgtgactatcttttcgtcagcaagagaacaacatcgatcttggtagttcttagttgcccctgtgtttcggaagtgttgtgtcagattattatatacccatttctagaaataaccaattgctcatattgcttacttagacaaataagcaatcttgaatctggaattttacagtgtacctgaactatcaactcccttcaacaaacttttttgtatggaacaggagcagcagcaccccccccccccccccgcctagtgaaaatattatgaacagaaaaagaacatcaaacagcaaagaaagaaaccaaaaagttcaacaaacattgcttatcatcaccagcaattattatcctta

SEQ ID NO: 193845 - DNA, 349 bp, Zea Mays
tgacaacaagcatgaaacaacctgcaatgaagctcaaagcaagtcatagatgcgatcaacactatgatttcacaacatcgaatttggatgcagccatacatcagcatcaatgtctaaaaccacactcttttatgaaggggtaatatgcactaagcacaacccttaccaacttcaacaattcattttaattcattggtaaaacatccacaccagatgaacgtatatgaagatcaaacacctcacttcacagcaccacaaaacaagtagttctattgaaacaaaactcctaatcttcctaaaccccgttcttgccatcatgaaaagataatcatgtaatctaacattcttt

SEQ ID NO: 193846 - DNA, 727 bp, Zea Mays
tgcgagctggattggcgaagcgagccaaaggtggttggagaggcggcacgacacagggtgtgttcggaggcaatggggccgcacatggcacactcaaaggtgatagggctgcacattgcgcggaagatgccgctggaaccaggggtagggaaagaggaggtacgtctatgggattggtatcaaggataaaatcaatgtcgagagatggggaggagccaacaaggggaaaaatgtcctgatcaaagacaacatgtcgagagatgatgacacagtggatgagaagatcgaggcactggtaccttttgttattggagtactcgaggaaaaggcaacgagtggaccgaggctcaagtttgtgtggagtggtggtggaggtgttgggatagcaggcacaacgaaaggcacagaggtgtttataggaaggggtggtgccgaagagggtgaataaatgtgtggggtgactgccttccttggaggggagacaattcaggagataggtggcagtgtagagacccttagctcagtaacgagcatgaagggaggcttgaaacaggaggatgcgaatgaggttggtgacgatgcaaatcatgccctcgaccttgccgttctaaggggaggtgtaaggacacgacattcgcagctacacgctgcgcgagacaaaaggcacaaaatgtcacattgaacaccctagatggtgcaaccgaactgagtctacacccaagcgaag

SEQ ID NO: 193847 - DNA, 919 bp, Zea Mays
agcctttcaattttaactacccgaaatagcaaaagtaaatatcctttgggttgattaactgattgttgaatgcttgacatacttatataaagataataaaataatgctaacctttgcacatccttccgcaatctgtgcaagtgtaatgagcgcagcatggtgcttctgccactcagcagaagacaggtactgtggtagcagctcagaagcaattggtacaattgcgttcccaccaatggcgatggaaaggcggtcaaggcactcctgcgccactccatagttgttcccttcccctgcgtcctcatcttcagtttcagcagagtgccaagcagggtcatcctcgacatcaagcagcatctgcatcagcactgcaaacagcctaccaacaaactgcgggagtcgccgcatcattcctggtgcacgctctctagcctcagctagagtaatcacaaactccaccgccaagtgtctggtcccatcttccagctgtgtagcctcagcaacttgcaacattgcccctaccacatcagcaatctgcctcctcaggaaccttggctcggcgccagcgagctccaccagcagctccagtgcctcctgcgcagagacttcctggccagagtttaggcaatcagtgagcgccctcatcattgctgggagcaaatcctgcatcttatccctgtcggagttggttggcaggcactgaacaaggttgactgcggcacccagggccgcaatccgaacatcaggagacgtgggatgcgccagggctgaggcgaggaggttgtggatagtcatgagatggtcgaggagagattctgcgatgtaatccgccagcctcgcgaagatgagcagcgctgactcctgaaggttgtgcgcatcaggccccgacgcggcgcggaagaggaacggcagcagctcg

SEQ ID NO: 193848 - DNA, 328 bp, Zea Mays
ggcgaatgaacgagaacaagtggggagagcagccaaggcgagcggtctatttaaaggggccgagagacgatcgttcactccctacccgctcaccggacaatcacaagaattcaatagcgattcaaacctcctagaaatgagtgatgcgcctggcttcgcttcacataacacggcaccgggtggaatcaaagtcaaccctcatacggagtattacacctctccatcgtatcaagttactatttcaggactacacgatggacatcttttactgggcagacacccgttgggcacacccattgggtgtaccgctcggattcttcgagatttt

SEQ ID NO: 193849 - DNA, 324 bp, Zea Mays
ctccacgccagtcgcaagtcttcacgccatctgcaacctccatgccatgtcagttgtcacgtcccacccgcccactccacaacatactccagctcgcttctccacccgcaccaaaatgcacaccaactcatctctatcgtacacaagcagaccatgactccacccccaggcccgcgcacgctcgccaacacccgtgtcgcctcccgcaccctccgcacgacacaccccagccagcctcccgcttctcgcgttcgcgccgattggctctcacaacgaacttcctccgccatcaaaccatgacctccacgccagtcgccagtcttc

SEQ ID NO: 193850 - DNA, 349 bp, Zea Mays
gtgaggcgctgctgcgctgatcgccatgggagccagggaggccgacaaccatggggcagagagctccatccgtcctactgcttgaggaagtgagggcaccaagcaaggctcttgcaggggagaaaagaaagcagggacagtggggagcaccgtatgaggagtagctcggccaggctgttgcgcctagcagagaggagcagcggcgcgcagccgaagctgggcgaagcacaggaggccgacagcatgctccaaggaggaagacgactgggtgaagcaggcacgccgacatgaggggccgcgtcggtgctggccatgggcgcgccggcctaaggagcggcgccgtcgcgag

SEQ ID NO: 193851 - DNA, 283 bp, Zea Mays
gtttttgtttgttattttctttacccttctcatcactctatcctaccttgtgattacattacgtctattatctaaatctccaatctcctacctcaatttgagagcggtgttttacttatattacccttggctataacctcttctttatcgcgtgtaagtttgggcgcaactccattctttgttgtactcacaccactggctctcgaatgccttcatcttttctctcatacccttgtcagttgtcccctttgacccttgtgatattgaggtcttctacctaaat

SEQ ID NO: 193852 - DNA, 415 bp, Zea Mays
cagccggcctggcccccggtcctgaaccagtccctttgatggcggacgggttccggtgactttgtctatctctgagtgctgcaatgttctcctccttgcgctcataagcacgggccagactcattgcggtctgcaggtttgtcggggccagcagctcgacatcggtgtggaggggatctccaagacctgctgtaaacatgttcacctgctgcataggagacaagtcatcacagcgacaaagcaagactgaaaactgtcggtgatatgcctccacggtgcctgtcctataaagggctttcagttctgccaggccattggatcggatgggtggtccaaacctcatgtggatgtagtcaacaaatcgcgcccacgatagaatgccatgatcacgttccagggcatagtaccactcggc

SEQ ID NO: 193853 - DNA, 445 bp, Zea Mays
cagggcgcaacatgacagcctgcgccaagccctaggctatggagactaggggtcggcgtagccataatgatgactcctgggaccatcactgccccatgtcgtctgccacgttaaatacaagacagcaaggcagccctaggccccatgagtacgtgtggctccacccgagggtaaaataccgattttacctttgccttgcggctccttcctaggaaatccactgatgaccggtccttttcccatctataaaagggggaagctagcctcaggaggaagggaaattgaacatgattgaaaggagagagctcttaggcaactggagacctttagacggacatgaacccacaaagaagaacaagaggaggaggagcgccgacgagcaccaagaagccagagccccacctagtcaagacttagctaggactccacccatcagcttcaaagc

SEQ ID NO: 193854 - DNA, 643 bp, Zea Mays
ctcagcacgacgctcgcagcagcgacgacgagggaggccggaggaagaggaagaaggataaatccaagaagaagtggaagaagtccgtctccgacgtcgcgggcgtcctccgcgtcctcgacatctaccggatggccaccgtcaggttcaagggcgatctcgacctctggttccggtacctcgagttctgccgcgacaagcgacacggcaggatgaagcaggtatgccaccaccatcaacagtccaacaccagaccgattcatctttagttggttgctaagttcaaagttcacctctgtaacttgctgctgttctgctcgatttcacagatgtctcgttctggactatacactgacattctgctatgctcacaagaagatcggggaaacctgaaacctttctatgcctataatgtgctatattccagctacacatctagtacgacgtggggccacacactctaatttggccaacaagttattagccaattattacaatttgcattgcacgttcttcatttatttcttatcaagtaggaatgttcaattttgagctatgatcataaggaagacctttatttgcatacactggcaaactttgatgttgttctgtccttatgcttgtcttcttacttcaggttctg

SEQ ID NO: 193855 - DNA, 992 bp, Zea Mays
attagctttaagatttctcactgggcaaatctcctttggcactagttctacctttagtttcacatcgctcttcgggcaaatctcctttggcactaaataccaattatatttactatttttagtaaatctccttccgctgtgcgcactagcatctatatctgggtaattctcctttggcattatcagtcaagtgtgctgcctgcctgcacataacttatacgagaatatcaagaagtgattctggaaggtaatacaccgatttccttcaatgcgacatttgtggttcctgcaagctatgatggccattcattacttgtatcccaatgatccataactagatgcacttaaatgtaggacatgtaactaaaaagttagaacacaaggatagagagaaacgcttatggcttatccaatcctcactcggttaatttgataatggctgtgagaatgaaaacaaattgtgacatcaacatcaatagaaggctatgaggccatacatttgtatttcagtggatagataatatattagcatattgcataaggtgataatggaaaagtctccacaaggtttctgtgccactctccatgtggttgctatagtcatggcagaatggaatggaaaagaaataaccatgtggagcaacacacaatccaatagtcaattttagaactagacgataaacagataaattttgagcatgccaagtgttttaagaatttaaaaggtttttttgataaaaaacctgtaaattatccttaagatataaggtttggatgtttggtattgttaagggtacctcccgctcccagtacattgcaaacaccataaagagatatggttctgtttatcttttctcgttacgatctctgatcctcttatatttccatcattttctgcagaaatacttggccagctggtatattgaccttctggacatcaatttgcatattgttccttgttcttgagattaccacgttacccaagcagccac

SEQ ID NO: 193856 - DNA, 790 bp, Zea Mays
gcaaaaactgccaatgtcaatttcacatccttccaaaaggttggattcaatatagttgctgtggcattttttcccttctttgatttcacatccttcagtgagtcccacctactatgaaccaccatctttcttagctggtccttcttctcttgtatgttgtccaaagttagatagtttgaagcaaacctagtcactcctgggccttactatctctttcccctcagtgaagtatctcatgcactctagtgttcttgtgtgcccatagacaaatatggtgaatgcctttgcttggtcaatcaccttcttgaaccgaggcatgttgccaattccttggagcatcaagttaattgtgtgagttgcacaagaggtccaaaagttatgtggtctcttcacatgcagtagcttctttgctcccatgttgttagaagcattgtcagtcacaacttgcaccacatcatctggaccaatgtcttcgattgctttgtccactagttcaaagatcacttcacttgtgtgtgacacatctgacatctcttttgaggaaataaaactagttccatcagcacaattagtgcacacattcattatgcttctcttcttatctgaccaagcatcggtcataatagagcacccattcttcatcttctcggcttcacgttcttgcagcaaactcttggttcttgcatattcttcttccaacaatctccctcgcaggtcaaacatagttggaggttcaattccaggcccaaattgtccaattgcttcacacatttgcttgaactcatcgttg

SEQ ID NO: 193857 - DNA, 402 bp, Zea Mays
gttcgaatgataagggaaaatttgagaatcgcacaatccaggcagaagagctatgctgataataggagaagactactggagttcaaggagggtgatcatgtctatttgaaggtgtcaccactccggggtatgaggagatttaaagttaaaggaaagctgtcccctcgctttattggacccttcttgatcttaaagcgagtgggtgaagttgcatatcaactggagttaccggatcatcttgcggatgttcatgatgtatttcatgtatctcagctgaagaaatgtctcagggtacctgaggaacagttaccaatggaagaccttagtgttcaagaggacttgacttatgctgagtaccccatcaagattttggatactctgactcgagttacgaggaataag

SEQ ID NO: 193858 - DNA, 456 bp, Zea Mays
acttattgagacctgataaccacatttagctagcttagcaggagggagcatgctaactcataatgccttataattactgaatactgatgaaccagcggagccgtacttcattgacatcctcaagtagctctgacaaacaaattaggggacatgacaaacaaattaggggacactacctctgcgtatctgcacaagggcccaagagaggtggggcctggccataggaacggagctctcagctcccacaccgtgcactagtgaatgcaagcagctggtctggccttccagtaatccgatctgcatgcagtgtgatctaggattcacatggataaggatgaaatcaagagagcgctagctaggatcacacgccaatagcacaaggaaggaaggaatgagcgagcgaaccttaagaaaaacatcgccgactggcttctttgtgtggctctccgtcgttgg

SEQ ID NO: 193859 - DNA, 276 bp, Zea Mays
gtaatttagtggccgtatcatatccacagcgcgatatttactgacccccggcgctatccagctgatctgagcgcgaatcacgacgacgatagcacgaatctgcgcgcgactcgtcggcggcaaggggctgaacctgatactatctggttactgtaccattggattgttcttcagttagcctgatagaccaagtttggcattgattttctcctaaacttacatggcaagttgttgatcagccagtagcaaagttgttgtctaatgctccagctataa

SEQ ID NO: 193860 - DNA, 361 bp, Zea Mays
gaacattttctgggccatcatgcatgtctgaaaatcatatccacaatacagtgttgtggtaccctactgtcatgcattgctccaacaaagtccataaattccgggtcacgtgtcttgttacatcggaggtgttgtttctcagtttcttgggttaaaaattcatgattatgctcaaggttaactagttcaatcctgacagatatgacacttttttgcatcatcataaatgtttctaagctttatccgtgctttgcaatgtgttcgacctgtgtatttgttccggactctagggttaccatcttttctttctgcacatctcccctctctagagcaatttaaccatttacagtttgtcttttcc

SEQ ID NO: 193861 - DNA, 344 bp, Zea Mays
agaagctcaacggcgtactgtcgctgagacaggaagatcccgtcggaggagcgcgtgacggagatgttgaggaagtgatggaggtccccaaggtctgtcatggcgaactctgagtgaagaagggtgatgaagcgctgaagaagatccgtcgaagaggcggtgaggatgatgtcgtcgacgtagaggagcaggtaggcgagactctcaccctctttgtagacaaagagggagacgtcggaggaggaggcggtgaacccgagctggcgtatgtacgtggcgaaccgctggtaccatgccctgggagcctgctttaggccataaagagagcgctgcagaagacaaac

SEQ ID NO: 193862 - DNA, 336 bp, Zea Mays
aacatgtaaaactgcatgtcattgcattaagagaaagtaaggccaaaatagcaaaatacaatgaccttacattcttacactatcacgacaaccagaacaaacaccttacattaccatgcatgaccagaacaaccttacgtgaccttacaaccaaaacaaccactaaaagatgacttaaacagccttatgcaaccaacttgatgcaaggaaacagatgacaacggccagccacaaaccgtaagggatttagatcccaatgggttttgaggaaaatatttttacattaagcaaaactctgaacagaagttatgtgctctacaacttcctatttcttca

SEQ ID NO: 193863 - DNA, 618 bp, Zea Mays
gtcttgagttctggtcttagccctttcaagaaacgagccatcttcttggcttctatgctgacatcgtcaggcgcgtagcgagccaattctgtgaatttgtgcacatactcactgacagatcttcctccttgagttaattcccaaaattcatcttccttgagctgaacgatcccttggggcacatgatgttctcggaaggcggcttcaaattctgcccaggtagcatctttgacggtagcgctggagatatcccaccaggatagggccatcccagaaagttgatgagcagccagatgaacacgctggttttcagggcatccgatggcttctaacttcctttttatcgtgcacagccagtcatcggcgtcgagtggattgctggatccagcgaatgtgggaggcttgagccttagaaaatctcccatcctgtcctgaggccttccaccattcgggcgctggttctcaaggcttctggtgaggacttcgatgagtcgagtttgattggccagaacttgggctaagtctaatggcagctccggaggtgcagggaggtgggtctcactcccttctccaccggcttctccttcagctcctaggggaaaccttgctccaatcccg

SEQ ID NO: 193864 - DNA, 326 bp, Zea Mays
gttgtaagacaccttttttccaccatacagttgctaaaaagttggaatataaagaattcaaaacaatagatcatgtttgaaacaaaaaatagtgtttctatgatattaagggtattgtattcgcacaagagggtattagagtacaactattggatgaagacgctagtgggctagctaatgatcttttgtgataacaggtttcctataatcccctctattcaaggaatacttaaacagtgtttatgtccactcaagtaaaacgccacacatcaatttgccacatcgtttctcaaaataaaataaagaccatggaaaatttagccaaa

SEQ ID NO: 193865 - DNA, 365 bp, Zea Mays
aaagttcgccacatataattcttgtagaccaatgagggcagacaaagcaggagaaggaacgccactgctttccccactggctatgtagcgccgactgttcttccgaatccgagggatttcatcttattcttcctcgtcatcttcatcagcaacacggacagcacacccattggggtcagcgtcagatgggtcacacccattgggatcagcttcagtaaattcaggcacgggcacttcctcagcagcaggagccgaaggaccagcatctcgatccaagctagacactcgccgaagacgtctcttcttctttttctgcccatcagcaggagaagcaggctgattggctcggcaagggcgtttcgggc

SEQ ID NO: 193866 - DNA, 313 bp, Zea Mays
cttcttcccctatgctcatctcgtcgatcacaggacccagtagagcaggaggtggtgtgaccagtgagttaccatcaactactccctctgtctctggatcaagacgaacgccatctcctaccatcgccggcgactctctagagccggccatctccacctccaaatagttatgcaggctttgtggtgtttttttggatgaaaggaaatcacggatactatacaagtaaccgcatccacgtttacagggtctccccattatttccgaaaccgtcccgatattatggcgatgtcaatgtcaaactaatatccataa

SEQ ID NO: 193867 - DNA, 513 bp, Zea Mays
ggtcagagcaccatgcccaaaggtcaaaagaacgggtacgctctctacgcctagagcgctcctgaacataatgaatagtgcagcttctgcctaaggcccttgatgccacctcctcaccccagcagtgaacaggaatcccttccacccggaccttaactctaaactcccagctggtctttctagcatagctctcttccgaccagtcaccgaaatgaaactcacgcccacgataagaaactgatcttctatcgatagcccattgcttggttcttgcatcaggaaagataataaaaaactgttctgggaaatgtttgacaagttgatactgaccatggcagagattgaacttctctctcaacatgtctcctgccacaatggtgtcaacctcatggctatttccatcgaaggagcacaccaccgccttgctgatgagatcatccctgcgacgacggattgagccagtcgccgaaactgcacagaaggcgcgcgacggtcttgcccttgggtcacctg

SEQ ID NO: 193868 - DNA, 295 bp, Zea Mays
ctggtgcagactgcacatgttttgcaaaattcagccaataatgaggccatgcctgtgatatcaaaggaagctcctcagccattgcctgcattggatgcaacggatttagacattgatgccaaacctgtcctggcaccaccatcagagagtaaaccagggcaattgtcaccggaacctccccttctgctacctcatgtagcacagcatacaacgtgttcgccagggatgacacttttagggtctgagaatatcgagtcctcgcagctgctgccacgagctctggttcttcctcttg

SEQ ID NO: 193869 - DNA, 387 bp, Zea Mays
tggaagggtcggagagcatcaccaatacgtaagtatgctagaacagggatgaaaaaggaatgagcagacctggggacggctggccgcggtgaggtgctttcacggcggcggagaacggttttgggggaaatgagcaattctctggctatggaggttaatcggagacgggagtgggtgctacagcttcacgattatatggcgcaaccatccccgccctcaatttataggctccaagggcggtggctctcaatttgaccgcgatgtgttggcagccggagacggggaagaagcctggcgcgcgcggttacgtgtccctagccgtggcgggctcatcggcgatgatgggacggcagtagggaattacggcggtgccgtggaaaggctcgg

SEQ ID NO: 193870 - DNA, 426 bp, Zea Mays
ctagtcgaaagttgtttccagctatctcttccactaccagagttgaagaattctgggacagagagcagagttataggagcgttagcctatggaactggttatggtgcccttaactggacagaacctgctttggatgtggtggaagtttgcaggccatgtgttctttgggactgtgatggtcgtacctatgcaattgattgctatctaaagttacttgtgaggctttgtcatatatatgataccagaggcggtgtgaagacaattaaagctggtgcatctcaagatcagattctgaatgagacacgacttagaaatttgcagctgcagcttatcagggaccttcgcgaggttgtgatccttattattcttgaatgttaaattttaagtattccttcctgtcttcctaaatactagttgaaatctaat

SEQ ID NO: 193871 - DNA, 324 bp, Zea Mays
ctgtgctgctgccggcggtggtggatctccttgctgaagagccgatggtctgtggagaggatgggagctgggttcctagcacgttggtgttccctgtttctgtggtggttcttcattctgatggaagttcagcttctggtgtggatcctcctgcgccacccccttcgggctttgtcgacgaagatagtgatcatgaacatcatgtggagcggtcggggcgccctgcgtcttctgttcgggttccaattcatttgcgtctgggtcagcgcagtcgttctgggctggtggatgacatgtctgttgaggctgttcatcaggatttgg

SEQ ID NO: 193872 - DNA, 790 bp, Zea Mays
gtcgaggaaggtgctgccggcgtgtggtgggctctgctgcctctgcccttcgctgcgtccccgctccaggcagcccgtcaagcgctacaagaagatcctcatcgacatctttcccgcggagcaggtttcgcaagttccctttcttccgcacgtccgtttatgtcagttatcagtcctattattctccttgctcgccatcagctgcattttcgtgggattttacccgttacgagctggcatttttatgagcatttacattgacactggcgcattacccgttatgagatgagctgcctagagccccaattaactatttctgtctccatcactggaatccttcaactgttcactagatctccccaataaggagatgtcaacggcatatataatggccatctttctgtttgttcacacagctcggttacttttaaacgggctgtggtttccacggatggttatggaccatactacatgtggcagctgttggttctatctgaaaacagacttaatttcatcaacatttgccacaggaagacggaccaaatgtgaggaggattgggaggctttgcgagtatgttgctagaaatcctcatcgcgtgccaaaggcgggctgtgcttctcacctcaagcgtcctacaaattgcatctaatctgttacttccacttcacttgttttctcatgcgtattggtgtctgtgcagatcacagcttacttggagaggaggtgttacagggagttgagaaatgagcagtatgacattgtgaaagttgttgtgctaatataccgcag

SEQ ID NO: 193873 - DNA, 336 bp, Zea Mays
aagaaaactaatgtgccaaaatcgatgcgggaatcgtgggaagtacgcaagggtcgcaacatgggcacggtcgttggcgcagtatggcggaacagcggcgtctctctcttccttctctgctcctcgatttctctatttgtgttacaccggtagccctggtttcatcatcgtggtgatccaatgagccgaggaacttatggagccgcacatatatatagccatggtcgaaggattcaagcctgtgaaaggaccccaacaatcacagacaagtttgttgcggtttgaaacgaactcgcggacgcggagaacactagcaaatgaaacttatgactagct

SEQ ID NO: 193874 - DNA, 541 bp, Zea Mays
taggggatagccgaagtgcccgagagtctagagaggatgtcatgaccggggtggccaagacgacggtgctaaggggtggcagaggtagcaacggcgagggcgtagggtgcggtaacacaggatgagggaggtgggggtagcgaataggatataggggggccagagttgttgcatggggcgaccacatcacgagtggtaagatcccatatggtgagcccctagggatcgtactccatggaacaatggtttgtcagtggtgaagcgacagactgagagaagattctacatgatgttgggggcaacaaggatgtggttgaggtacaaaggaccaggaagaaccgtgtcacctattgaggtgacaagcaaaatcgataattactgacaatgatgaagaagggaaggtggggctacggggatagtggaaggagatagaactagggttaggggtgggggtggggtggtgtggtatgaggcatccgagttagcaacccagtcggagggagtagcaggagagctagggtgacatgagtcgcaaggagag

SEQ ID NO: 193875 - DNA, 387 bp, Zea Mays
gggagtagggcgccatggtgggcgaagacggggagcagggcgtcggatcagggagcgaggcgcatagaagatggagctaggaagcagggcgccatggagggcgaagacgtggagcatggcgtcgagccggggagttgggcgctgggccggagagcggagtgcgagcacgaggaagagggaggtcggcgctagcgtgcggctgggcagcgtggaggtgttcctgtggtgttggcggtgccggtcgcaggtgcaggggaaggtcgtgcaacctccatggaaagggaggcgggcacggggaagggggagaccggcggccacgagaggtggctcatgaactgagaagagtgggagggagggaagagaagataggcttgataccatgttgga

SEQ ID NO: 193876 - DNA, 484 bp, Zea Mays
aaccttcatctaaactttctggtaaatcatcgggtgaagttctttttgggacttctccacgatatgatcatcttcgtgtgtttggatgtatatgttatgtcttgttaccaccacgtgcgcgtactaaattgactgctcaatctatagagtgtgtattccttggatacagtcctgaacacaaaggctatcgttgttatgatccatctactcgtcgtattcggatttctagagatgtgagtttcaatgaaaatcgccccttctttcacaaccagtttactcactccacctattatcccacagaatctacttctttcatgtgtcttccttccattcctgcatctgaaccatcatcttctacatccacatctgatgttctcattcccataacaccaccttccacctccacgtcatccacctcttactcttccaaaccacctatcatccaaacctacattcgtcgttcctgctctattcctacggctgg

SEQ ID NO: 193877 - DNA, 1045 bp, Zea Mays
taaataagcaagaacgcgagaccatttctatctaaacatagcttatgtagcgctaatatctttaattaggttgcatagttgggtaatgcactttgtgttatcagtttgtttgctaattaaccaacaacacatatcgtggcttgacccgacaatagccacatgatagttgggtcattgtgaattaacatggtagtgtcctatcttctttggatccacctaccacccattactcggttcttcattattgaatcacactagttcttgcttgcttccaaagtgttaggttcctccatatatgtgcttttgtagtcccatggaggtacaccacatctagttattcatcctaagttattacttcaattttatctaggagggatcctattattatgaaaaatccttcgatgtacaccttttgtttgtgtttaggatgatgcacgagagctatccattgatctaagacatgctacgagcaatagttgtgtgatcatgttagtaattggatagctggagtttttggtgtttttcggcaactcttgttggtaattggataactggagtttttggtgtttttcggcaactctctttttctagacctaattgacctttccaccaacctttggaccttgaggtatcactcaagctaccacaagaaggttaatgaggtgtccatttgagtgccacttcaatcatacacaacctgtactatgtggtggggtaataacatgtttgtaggcatcaatggtaacatcgacagagccaatgaaaggttgtacctcattcttaaagagtcctttgtcattgtatatgtaattttctttgaaggtttttgttactgtatatttttgtcttatctatcttaaaacattcttcacatccacaagacatcatacaagttgtctaggagtttcaaaaattttagaaatgatttgctattttatttgtttgaaataatttttttatgtgttgtcaaaagaaattctaaattgaactatgtatgccctcaataagattcaaaaaaattatataacaatatggttgggctcat

SEQ ID NO: 193878 - DNA, 379 bp, Zea Mays
aggaaaccttgtcactgtggatatccctttacccctaaaaaatgatgaccagtcaattgaatctgtggtagcccaaactaatttgccaaaggaacagatattagatttgacttctgtattgaaagacctatctagtaaatttgagctgagcacacttggctacctccgtctactaagacttcacaggatagatgaaccagataaatttgacccagaaaatgtaagctacaagtgggtgcctctgagcttggagttcggggttcctttattcagtccaaagttgtgcgagaagatttgtgaaagggtggttgcatcccatatgcttcagaaagatgatctcattgagcattctgatgtgatgcaaaatgtaagaaggcag

SEQ ID NO: 193879 - DNA, 624 bp, Zea Mays
atatcaaatttggtttaaatagtattttttctcttctttccattccatgttttctcaaacaacatcttgcaggcaggtcacatccttgcttcttctcacagccatgcagcttcagctgagcatgagctagatgaaaacatatatgacaatggaatacatgagggaaatgcctatctgctcgaacaggtctgattttagccctgattcataatgttaacactattacattgcctgttccgccattacaaaaaagaactgttcccagggagtgcatcaaggagcacatggacattctggagtgagatttgttagtggaataatattaaagtcgaaggcacttgcttttgagcggatgctttttcgagctacaagaggaaacatgttattcaatcaggcatctgcaggggaacctgtaactgatcccatatctggtgaagaggtctgatcatcatggtttgcccttgcttattctgtgtacattgagttaaatattttgctaaatttgctccacaatatttactgatcacattatttggactctgttttcagttgtcatatacataagctaaaatcaatggaatactctaattcagaaaccaacttagttcatttggtaccttaaaa

SEQ ID NO: 193880 - DNA, 328 bp, Zea Mays
gcgaaatggaaggcggtgagcacaatgaaattgatcacgcgattgcttcagatatcgaaaacaacagtaattactaattcgtccttaattgatatgatacttaagttatagtggccaattgatttaacacaactttccgtcaatagaaagtacaagccaatgtccagtcactgctccacatagtgacaaagtgactgaaggagcagacgttgggatgcaacaacagataaccccgaatgtcaccaccaatggtaattacaagctccttccacaattagttccctaattattcttagtggttaaaaccatgtgaatcaatagatgccga

SEQ ID NO: 193881 - DNA, 282 bp, Zea Mays
cttgttatctcacacttgtggacttgttctgcaggtgcaacatgcatgcattcagttcatctttgttgaaactgagctattctatgttttatttttgttatgcattagagtggtagtctggagcctggagggctgatatgcatgacatgttatctaatagaaacactgtcctgtaatgtaatcatgttatattttctgttctgaacaaattcaaagaaatctcatggagacaaactttgatagtacaagttggaggtctcgaattttaaggtaatatcgtgc

SEQ ID NO: 193882 - DNA, 323 bp, Zea Mays
aggcgactgggaggaagtgatatgcgcaggagggcaagtgcgtcgggtaccacccccttccctcccatcctcctttatctccctctccaagcgatgattgcggggaatggtagagaaggaggaagacgtgggatgggggcgcgatcatcgcgcggtgatgagggcggctcgcgtggtgatgagggcgatgacatttttggaaaggaagggcggcaagtgcgctggagacggacggtggcaggggagggggcattgatggagatgtggaggcagaaccgtgcaccatatcctgtgaacgtctacactactgtcttatatagtag

SEQ ID NO: 193883 - DNA, 362 bp, Zea Mays
cacggagacagcgcagacaatggatgaacaaaagtgttcccagtgatcttgggtagtctagctcaattgtatggatcgaggagcatcaggagaaccaaaggacactgaaacgggagagcagagaacacgaacagacctagaacaagctagccacggcgagggttctttcacggtggcggaaaacagatttggggaaaaagagaaattagagagctatggtggctaatcggaggcagaagcgggtgcttaatttacctaacgaagctagcggtgtgctaaatttatagtgttcaagagcggtgaccttcaattttggaatggcgcgctggtggtcggagaggaagaagatcactggtggcgca

SEQ ID NO: 193884 - DNA, 278 bp, Zea Mays
gcattttgtcacagatgcttttgatgagcaacacagctatgagagtcttccccgcaccagtttcaaggaaagcaattgtgttcctgctctttgcttgctcaagcacctcgagctggtactgcctcgccttctcctcagtggcaggcttctccttccccgaccgatccacctccgccttattctccgcaggagggcatccatccttcgtcctggcacgctttccctggcggtccgcctcagcctcccacatgccatggcggaacaccatcttgccgccg

SEQ ID NO: 193885 - DNA, 525 bp, Zea Mays
cacgaggtggggctcggaggtgatggacgccatgccggaacaggaggcagcggtagcgccggcgaggctcaggaggtggaactcggagtcgttggatagcatactggagcaggaggcgagagtggcgccggcgaggagcacgaggtggggttcggaggtgatggacgccatgccggaacaggaggcagcggtagcgccagcgaggctcaggaggtggaactcagagtcgttggatagcatactggagcaggaggcgagagtggcggcggcgaggagcaggaggtgggactcggaggtgatggacgccatgccggaacaggaggcagcggtagcgccagcgaggctcaggaggtggaactcagagtcgttggatagcatactggagcaggaggcgagagtggcggcggcgaggagcaggaggtgggactcggaggtggtggacgtcatgccggaacaggaggcggcggtggcgccggtaaaaagcaggaggtggaactccgacgcagtggatgtaataccggagca

SEQ ID NO: 193886 - DNA, 330 bp, Zea Mays
aggcgtcgccctgggacacttctaccggaagtatggtagccctagcgtgttaattggaggttcaatttccttttgcgctcacgatgacgagatttggagcttcggggcagggaatgggggttcaccgatgaggtctccgccgtcggatctgtgcgccgccgcttctgttgttgctgggaaggagaagccacctgtgaccgtcgattggcacccgcacagtcaggattaggaggtctaggtaccggttcgcctgggtgatctacaaccgtagatccatagatgtacgcgcatggtttaatgaaggagagttaaaatcaaaaccgttgattt

SEQ ID NO: 193887 - DNA, 337 bp, Zea Mays
taagttggcatacgctaaagtgaagttgtttaatgcaggggagatgctagttggtctggcaagatgcttctttatggatgatatatcaacaggtcttgatagctccacggcatttgagatcatgaagtttctccaacagatggcccatttgatggatctcacaatggtaatttccttgttgcaaccaccgcctgagacattggaattatttgacgacattatacttttatgtgaggggcaaattgtgtatcatggtccccgagaaaatgctacggacttgttcgaaaccatgggattcaaatgccctgacaggaagaatgtagccgatttccttcaa

SEQ ID NO: 193888 - DNA, 379 bp, Zea Mays
ttttaatggatctagttgctctggtttgatcgattattgaatctgctgttctgcagttattttacctctagactagaacttcagtatcaaatgtaaaaaatctgtgatctagtttcattgaaggatatatgttatgtgcttcatcaaaaaggttagattatgtagcacccgtcatgacactttccgaaaaggcagtagtgctagcgcaaaacaatcaggaaaacatcatttttgaggctgagttggccttttgaattgtctcttttgttttcaacgttttattgcttcttgatagtttagtttttttttcggatgaagggtacttagttataataatggatggttacgtgcaaaactcttgcagaggccagaatataag

SEQ ID NO: 193889 - DNA, 1326 bp, Zea Mays
aaatcattgtgttttcttcttattttctcatgctctttttccagggcgttacatattacgtgcttctcatcctgattatgaaattgagttgagaggctcaccagaggttaagattatgcattctttccattggatgggatgttacactgatcttattgtgttaaactgttaactaatacattttattatgtacagattgacctgcgatttggaaatgccgtggcagatgatgtcttctttgtatctggttatgacatttatggcactgtggttgcacaggttggaagctgaatggttcttttattgataatcactaacgctacaaccatatgattgcatgtctgtgtttaaagtttgatctgcattgtttagcaaatccaaatttttatgttgaacatattctatgtattttctttgccagggaaatccaatagtgggagtccacctatatttgtattcaaatgatgtaacgaaggtcccttgcccacaaggtttcagtgatgcacccaaggaaggtgcactttgccatgcaatatctggtgctgatgggaagttcacatttagatcactaccttgtggtaagttgataatttattgaactaataaaatgtcacctcagtgcaatggaattgttatgtcaaatttcttcttcatgaaagttgttcaggatttcgtgatgacaattgagtaattaacacatgtacattggatgtcttaaagtgcatcaatacatgaagtatcatttcgatctataacttgttcatctaaatacctctgttcatctagctgtatctggtgctgatgagcagaggtattttaaataccaaatgcaggacaagctattttaaacaaactaattaccaaccaaatattttctataccacaaaaccgattcgttgtattcatgcagcaccagtgttaaacattttaattgtttggtcctgttcattgggaatcctgttctgctctttctgagtctctaactccctatgtgacattatttgtttactgttttctgttatatgcaggtagctatgagttgttgccatactacaagggagagaacaccgtatttgatatttcaccatcttcactttctgtttctgttgagcatagtcatttgacgattccccaaaaattccaggtactgcctgaaattgattcacatcttatagtttcaggtatagaagtttcagtgaaagaagtttgcctcaggatgatgaaaaaataaatatctattaggcccttgaggaaaatattatttggatttaagcacctgttggataaacatttatgcattcagaataagaggtagtagaaatgaca

SEQ ID NO: 193890 - DNA, 568 bp, Zea Mays
tcttgtaagctagaaatccccagaccccccaagtgcaagggtttgcacaccttgttccaagcgactagacaatgccccccttttgcttcttttctacctctctacaagaaacattttcttattttatcaatggcttcaaatagcccaatggggaaagtcgatcgccattgcagcaaagactgtcattccagaaagaacatgttgcacaagcacttttctgctagccctattcatcaaatcagccttccagcttgggagacgatctgcaatcttttccaccagaggaaagaactgttgtttggataatttgtgcaaggatagaggaaggcccaagtatttgcagggaaaggaagcaattgcacaaggcaacctattttggacctccacaatgatctcttcagagcatctgataggataaacatttgatttctgggtgttgttgtgcagaccagaggcatccccaaaaaggtagagaatatcaagagtggtggagatatcagcaacagaggggtgcaggaataaggccacatcatcggcataaatagagattctgtgtagcttctttttc

SEQ ID NO: 193891 - DNA, 322 bp, Zea Mays
aaaccagaatggatttatgatgaagggcttgaggatgtcattcatcagtgactggaaggtggatggtgcattcgtgagaccggacggcattaccaagaactcatagtgtccgtgatgggtgcggaacgccgtcttgtcgatgtcgttcaggtgcattcgcacctagtggtagccgctgtgaaggtcaagcttggtggagaatgtggtgccgtgtagctcgttgatgacagggatcagaaacatgtcctcggctgtaatagcgttcagctagcggtagtcaatgcagaaacgtcacgagccgtctccagcaacaccggtgatg

SEQ ID NO: 193892 - DNA, 433 bp, Zea Mays
tttatctctgacttcagcaagaaataagtcacactcttggagcatgtcatcaactgcctgtctggatgcggtgcctggctggtaaggaagcagggctggcggttctctgccatataccactctgaatggggtggtttgcaaggctgaatggtaagaggtgttgtaacagtattccgcccaaggtagcaactcaacccatgctcgagggcgatcccctgtaaggcatctgagatacatggcaatagttttattgaccactttggactgaccatctgtctctggatgaaaagctgtgctcattcaaagttttactccagatagtttgaacagatcacgccaaatattctctgtgaagaccgggtctcggtcactgactatggactttggaaatccatgtagtcggactacttcaaagaaagactgagccactgtt

SEQ ID NO: 193893 - DNA, 440 bp, Zea Mays
gtttttttactgccttgcagaatagctagtacgcgttcaaagcaactgattggctgttgatcagcaagatggatgggaaaggattgtttgcggagatagggatgaaggaggaggacattgccacaatgctgtctgggaagaaagtttccgagctggcagaggatgcgtttgatggttccaaggaagaaagacagatctttgagggtgtcttctgcctaacaaacgttgatggtggattgaatgatcattatcatggaggcattggacatactgttcatgcagggaaagtggtgacaagttctagaaaaccatcaagctctgccgacaattacaaggcagcacactgtcgcatagtagagtccttcactgctggcaacttatcaagctatcgtgtctcctgtcttggtgccgatgagcaggctcatggagcaatgcattct

SEQ ID NO: 193894 - DNA, 441 bp, Zea Mays
cgagttagtgttgagcatgacctaggtgctagtgatgctgcaccaaagacactgagattgtttgtcccttactggataaaaaaccactcgtcaattccattatgttatcgcatagtagaaggggaatccacagaaagcacagaagcagactcacttagcagaccagactcgctaagtagagtgtctaagtcttcaaaattttcccttaaatattcttcaaagtctcttgtcagaagaggaacaatgtcgcacagaaatatgcaagtactggaagatattgaagattgtagcacagactatgtgatgctatcaccacaagattacttgaaccgatctgctggtatgcgctctgagtcaagggataacaatttcagtccagctcgagttgcaatatctatggctgttggtggttgcacacagtacagcgtaggagtatcgctt

SEQ ID NO: 193895 - DNA, 752 bp, Zea Mays
gttccgttccggggaattgattctggggagccggcgcggccgcggctgctttgatcccttgccgcctgcctggcctgggctctcgtaccgcaaccgcaatttgggtgagtccacgcttacctgctcctgccattcgggctgtttcttcccgcggtttgggagcgagagctgcgtgggaaccttggctcttggtttctcgctgttcctttttccgtgcttttatgtggagtggaggtaattctcattgttttcgcagcggcgtgcgtgttccttgcctagattggcgtgatccagctctgctccaaccgtagaagtgcgcgcacttgctgctagctaaggtaaaatctatgtttcatcttttgcttgttcatgagttgctactagatcaattttttcccttttttctcaagagtctgaatcgcaaggtcatgccatgcgcatgcaccaagcaggagtaacgactccttttgtgatggaaaacttcctattaggttccacgcctacccatatacacccccaaactttgctaattctagtgaaatctccaggaagcgcccttgtgtctaaacaactcctgatggaacttctgagttctgacccttacctgtattcctgatttaccagttctgcatggtttcttctgtcaggaattcaaacatctccttgtctctgattttgctgttctttgcatccttgacagaagcatctgcagtgatcgttccaggctcgtgaggaaactcatttgctcgaat

SEQ ID NO: 193896 - DNA, 296 bp, Zea Mays
gcagcacaatgatatgaccattagaattttagaacttaaatctctttgaaaaatcaatgagccaggcaaaaacatgcatattccaaaatcagtgccaagctgaagacaaaacatatagcaagctcacacgacggatacgcagcttcgatcaaagttcactgccacgcccacaaatgcattcacatgtcatattttagtctggcttttgcgagcatgacaagcagggatatgggaagcaagagttgtgcccagccagttttgtttaactttgattatgagcgagaaccagcagggac

SEQ ID NO: 193897 - DNA, 365 bp, Zea Mays
gagatctgaatgcagtttcagcttcagaacttggtgaactagattatgacacaagacttaacacctatgataaggttaggccacaattgtttcttggcttgacagaagagcatgtgggcgccatattatctcattgtgtgtatgatatgtcatctgaagaattaattttgcggcaaagtgcatctagggctctgcagtcgttcctggacttttccgcctcagttatgaataatgatgtgtccaaatactctattgatgataaatttagagagaataataccagaagcatttgcacgatgggctgtattcagaagatattggaaaaaacttatctgcacaatatgggagtagcaatgactaaagat

SEQ ID NO: 193898 - DNA, 435 bp, Zea Mays
gatgcatgaaggaaatagaatcataaacgaaagtatatgacagaaaagaaagagacagaatagaaagagaaatattatgttgaacggctcagatttaccccaatatcaacacgacacatcctactctaaatgaacttttgagtaggattgttcatttggaaataaactggttgcttgtatatggtacaccaccgccacggcaatgagacaatcagttgcaaactggttgcttgtatatggtacaagccatccaagtttaacattgtattgagcacaataccaaaccctaaatcctaaaccctaaacaattcaagtggatggggcatttgacatcacagccgccgaagagtagttccaaacaagaaaggaagatcaacagataagcgacaaataaatatctagaaaataaaggaatgcatagggtgtttggtcatc

SEQ ID NO: 193899 - DNA, 547 bp, Zea Mays
atttgatctagtactgttatcgaagtgctagcggcggaggtttctggaagagagaagaggggaaggagaagcgggcaaggagaaagtagatggcggcgataagctttctgttcttttcttgcgttctccttcgcgacacgcgcataagtacgattcagcgttcggcaacattccaccgtttccacccgtttcaggcccatacagccgacggcaaccattacaaggcccactgcggcccacaaaacttggcgttcggacgacgcttccgcgcttgacactgctcgttaccgtgctcgacaccatcttcatgttccgacgctggcttgttgctgacattcccccactcttgaggaccagcttgcccccaagctggtgccgcaggaaatctggctcgaagagcgtcggcatcttcccacgtagcaagctccggctccattccagaccagcagactttgacctgggcgatgtgctccccaccacggtcgatcatgcgacgttggagaacccggacaggcacctggactgcatgtgtatcagtaggtaaatc

SEQ ID NO: 193900 - DNA, 2067 bp, Zea Mays
ctcttatgcttaaactgcaaaaccaaactcttgcagcattgcagtttggtaatattagcccactaatttcttgcacaaactttaagcgaatttggagctcaccaaaaggtatgtgcatgtgacatactacactttttttgttccttattctggttcttgtagtagggcatcatatgctagtctattatactgattcaatactgcaggtgacctacctggttacaacctaacgttctggcggccacaagctccctccaattatgtcatattgggtgattgtgtgtcctcaaggtgatttgcccccttcatatctatcattttgatgaagttatagttggagaatggaaaccctaaccctaatcagggttgggagtgcaattatataatccaagtagttgggccaagcccattacacagaggggtaaacatgtaattacacagggactgacaaaaacctaacgggattctaacagtttttactttcatcaagtgtctgttgagttttggtctagtaattgttctgtctaagccatcgtcatctttggagatgcatgctaaatactatagcaggcatgtgactgaaaacctgaaactttgcgctggtataaataccacgagtattaagcaaaaagttttaaacattgtcttgctgatggcatgccttttttcctttttgtctacattgatcactatggatgcactttgcaaatagccaatgagcacaattttttcatatgggtctctaattgtgatattacaaaataacagttatgtgtaaagctcataagaagtctacgtggtgttgttaactgcctcaaaactacagatttaatgtgtcattgtatcacaaaactatatatttatgtaactgtgacaatgtaccagggaagtacacatttgatgcgtctatggcaaaagtacagattttgtttggtcaaccatatggttgtagttttcagagtttctgcagctttgtgatgcaacacatttaatatgcattttactatagaaattctttttttgaaacaatgtatagaaattattatatctgttattttgtgatcgatctaatgtagtattttggaacctcctcctctgttatgcatgaaaagatgcaaacttcaatggacttgtccacgaaagaagtgatataacttttattctttttacctttattagcaccagattgtttgaatatttggacctttttatattgcttcagcaggagctgatgtcttgcaccttctcaggtctgtgccaccttctcaggttgtggttgctataagtaatacttatggtcgtgtacgaaaacctcttggatttaggctaattcatgtattacctggttctctggatctcattgattcctgtcaatcaactgaagaaaacgaatgttctatctggattcctgtaccaccacctggatatttagctctaggatgtgtggtaaatattggaaggttaccaccttcaaaccatgtagtgtattgccttcgttctgatcttgcgacttctgcgacattttcagattgtatacacactctctcacctgctgctgggtatgatatcatttacttttatttgtctgatataccattttgtacagtggttcttttttatgcatgaagtttacaatgaaataccaacaccatgtgaatggttgttcttgttttaattttgttcacagaataatctctgaatttagcatctggcgtgtggacaatgtgattgcttcattctgtgcacataattctatagagcaacccactaaaacagaagctcttaatttgcaccatgttctcctccggaatccaaattgctatattgttaaagatctaagtgcagattcatctatccagaatgaccaatcttctgatcaattaaatcaccgcaagagtctttctggatgggatgtacttcgcactttgtcaagaccaagtaactattgtatgtctactccccattttgaaaggatatggtgggataaaggaaacgataccaagaagccattttctatatggagaccgttacctcgttttggttttgcttcggttggtgactgtataa

SEQ ID NO: 193901 - DNA, 273 bp, Zea Mays
attttctccacttcgcacttcgcgagtcttgcctcaactctatccttggttatgcttttcacgattatcatttttacccttgttgcctctacatcttactttgatgcttatattatacctatcctttaaaactttctctcttccatctaaatttcatagttgtgtcttacctattttcccttggtcgtattctattccttgttgcttgcgagttttaactccatccttggtcatgctccaattaggtattacctttacctttctcatctctta

SEQ ID NO: 193902 - DNA, 385 bp, Zea Mays
tcttgaatattcaatcccttcctggtgaatatttctgccctgtttgccggacacttgtgtatcccaatgaggccctacaaactcaatgcacacatctctactgcaaatcctgcttggcatatgtagtggcaaccacacaagcttgtccttatgatggataccttgtaacagaagctgattcgaaggtatgcatattcaatgagttcttgtatgttgtgaagtaatgacactcctcttaggctcttactatcacatttgcaatctacagcctcttatggaatcaaataaaactcttgctgagactattggcaaagttgcggtctattgcctgtataataagagtggctgccaatggcatggagagctatccgcctgtaccacacat

SEQ ID NO: 193903 - DNA, 391 bp, Zea Mays
gttgaactatactgcaccagaattggtccaaagtagagattctaaagttggctctgcttgtgatatgtttagctttggatgtttggcttacaatctggttgctcgtagaccacttctggactgccataacaatgttaaaatggtatgttttaaaatctgaatgttgacatttacccaatgtagatttgttcttttagcctcagtggtctgaactgtatattttacactttctctgcttcagttttgcaagtagaccatcttgttcaggctttatccacattctacagcacctatctgatgggattctctgccccctctattcttgcagtacatgaatgccttgacatatttaacaagtgaagccttttctaatattccttctgatttggta

SEQ ID NO: 193904 - DNA, 1139 bp, Zea Mays
tcttcggtctagtcttctatgttcagtagcttgtaagcggacatttctaccatagggctcactgtttcaacctgatgcagtcaattagcagttcgttgggtgcaaacctttcaagttatacagctggagaagtgtattcaagtggatcaagggaacaagttaacattgatcaaataggcatgtgttttttggaagaagatatggatgttccagaaatagcagaagagattatcgacttgctattgactggtttgagggattcagtatgttcttatccttatattatgctgtgaagttttgacttgttctccagaacgtggtagtaatatttacccagttatatgatcttttatattgtaccccatttttattttctttctctttgcttgccggctaatatcttcttttccccacaagggccttcacctgccagtctacctccactgcatttcatatcttaataaatacataacattgcctagattgtcctgtactggagcaaaaacacacacagccttttattgtttggatttctagaattattcgacaatataactgaactttaaatccattaatcaattagtggtttgattgctaaaaatcgagttggtgaaatttttctgtgtagattcctgtatgctactatggtttgtgaacatggttgcttcatacaatcaacacaactgcctctaactctaaggacataaatgcaggattaatggtggtatctgaattgaaataagctctcctgactgtgtatatgagaaactatgtacacaatttgaagtcatgattcactgcttcatgtacttaggaaaacagtagggagtctggtctttgtacttgctattatgtttttttttgcatgttaaaataccaaagtattattgggccatgaaatgcaaatactatcatttgtcttcccagatgaagttatactaagagataagttttttagttattcatctttcccatttatagcctcaaacactgctgtttttgaaaggcgaacactctttgattctgtgtcaggatacaattgtaaggtggtctgctgccaagggaattggtaggataactgcatgtttaacacctgcattgtcggaagatgtgctatcatcaatattgcaacttttttc

SEQ ID NO: 193905 - DNA, 623 bp, Zea Mays
ctgaagtatggttcgctgggctgaaaacactgatttcacgttgtcaccaaagaaaatggagaactgaatctagaagtgatttgctttcctctggtgcaactagtccgaggacttacacacgacggagttctcctttgagttcacctttcagcagcaatgacagcatccacaaggtattactgtctctattgtctattgtattaaaatcctacctagatgactagaagactagagtaaaacattcgagttttcaacccttaattgtgctgggaagtctcttcatagttagaagggatccagttttcatgttgttggttcagctagcgatttctccactcaaatcattctggaaacaccttgttttcactgatgtgttcaatcagagcaggaagccttggcagaaatttgatgacagatgacactagagtgcaaagctagaaaagaaagctttttttgtcaaattgctagtgtacttaatcacttttaatggtttctccttcccttcacattactttgcaatatatgtcatctttttttatattgtcatttatttttgaaaatgaatttttataccaggatggcagtgacaattatcgactccgtactccatatggaagcccacc

SEQ ID NO: 193906 - DNA, 355 bp, Zea Mays
acgatcgagcggaacagattagatcggcggaaggttataatccgatatgcgttcactgccctaggatcaaagatcgatggcccgaaatcgtccacacattgttgtcatccgaaccacacgtcgggcgaacaacggcatagattctatgcatcgaaggtgtatcgctattttctaatccgggccgtccacacagagatctagggttgagcgattgtcttccttctctagcgtgcccgacggcggcgcaacgcatcaccgtggcgacgcaaccactggcaacctgaccaatcaacccaattgccctaccctaaacgctaagcggtgcaaatggaaggggtggaggtgcagaaccaat

SEQ ID NO: 193907 - DNA, 496 bp, Zea Mays
gtttccagagttacaatccttcaacttaactttatctcatctgaatcctcagtggatgttaggaaattattgccagtccgtcaatagaatatttggttgccatccaaagttgcttattgatcaaaatgtgcttgcagacccagaattgggtcattattgtgcaattctctcagcaaaaagtagtttcagaaactctgttggtgaagctgtatctgcaaagttatctaagctttcatttgcagtggctgcatgtgccttgaataagtgcggactacctgtaagtttaccctgtgctggctaacttcttttcacctgtccaccctttgtatctgcatattttgtatctattattttgcattattctaattgttgaattttttcccactcattagcttgaagcactagaatgcttgtctactaactcgagcatagatggcaaggatagcataatcgcacatggtgatggagaccacaagattttttatggaatactgag

SEQ ID NO: 193908 - DNA, 499 bp, Zea Mays
ggcttttcatgttctttatcacactgataacaatgtactcttgggagctccaactgggagtggcaaaacaatttcggcagaacttgcaatgctccatcttttcagtacacaaccagacatgaaggtttgtttatcaacttccaaaaaatctgaaagtttttttttggcatgatggcaatttaatgccttcccaatacctgttttaggtagtttacattgctcctctaaaggcaatagtacgagaaagaatgaatgattggagaaaacgtcttgtaattcagcttgggaagaagatggtaaagagcactccatagcttttatttctctggtacattaaaagtaaacattcatcttaactgaagtaacacttctcataattgataggttgagatgactggtgacttcactccagatttgatggccctattgtcagctgacatcatcatttctacccctgaaaaatgggatgggattagtcgaaattggcatagcagaagtt

SEQ ID NO: 193909 - DNA, 537 bp, Zea Mays
ttagactatgttgtgtctatgggccttgagcccagcccatgtgtagcctatctattgtaacattttctacaatccactatactccttcggcatggtattaggctaaccctaaccccttccctgactgctgaggcgtgaatgctagccctccatctctccatcccctggccgttggcccctccctctgctgctagccctctccccattgctgccaccgtcgccatcacacccttccctagccatcgccgccacctgccttccttccctccttccccttgccgccgctgcctgccctcccatgtacgacacgtttgtctcctcccctagggagacctccctcctctcctctccctgtttgttccctggccttcattgcctcctaccacaccactctggatgctggtatactcctcccattctcccatctcatccttcctttatcattattggcaatgggaactttctcccggtcatctctataggcgattcggtccttcctggttcttctgccttcataacattcttgtggtccccaac

SEQ ID NO: 193910 - DNA, 284 bp, Zea Mays
tggggcgtgctgggaacatggcaaattacggcctgctgagacgaaaatgggccggtacaagtgaaaatcgtaaaacagatccaccgtacgtatataacgtatatattatacacaatgtaattgtttttcttttcttttccacaggtgacgtgtacatcaagtacgtggaggacaagaccattgcccattttgctggtggcaaaaatgccccaacgttcttcggctaattaatcagctcgctagttgctgttagggtttatcatttcatgctccgactaggtagg

SEQ ID NO: 193911 - DNA, 291 bp, Zea Mays
atttggaagcataggaatagatgtgtttttgatggttgtaatcctagcttggtcacagcccttagggtggctagggaagaggcggtgctctggtccttgactggagccaaggccctgtccttcctccaagtcgatgagttgctggcttaaaacagcgttgtgggttgtgtttcctccatgttagtcggtgatccttagttagtctctagtggtgtgtgtgctgtaatggggttctctccccctttcttattcttctattaatacaaagatgcgcagctctcctgcgtatac

SEQ ID NO: 193912 - DNA, 279 bp, Zea Mays
gaaggacagtggctgatgctctgtgtagctcatcatggattggggatttaaggggagtggtaacatgggaggtcattgctgacttcattttgctggcagatgttgtggctgacgttgatcttcaatcgggagttccagataaacattattggaggttctcttccaatggtatctattcggccaaatctgcttatgagataatgttctgtggttctacctccctggcgggctttgaaagagtgtggagcacctgggcgccgcctaagtgtcagtttttcc

SEQ ID NO: 193913 - DNA, 783 bp, Zea Mays
attccttcatctccaaggcctgacagctgtatgaagtcaggggaaagaaaaaatgatcaggatatttcaaggtctggaacaagcatacttaaaagtagcaaaaaacctggtaagctcttcatttacttaattatttctcaagaaaaatggcaaatctcagttgtccctccctcctgatgtgctttctttatggtttggttgattaaggatatgctgaaaagaagcagaacaatgatttgtccagaagtgataatggcaaggaagatgttaccgtgcatccaaaaacaatggaagtttctggtaaagatgcttacgtagtgaagacatctgatccaccagttcaaccccaatgtgccaaaaaggatagaccaaatgatgttgaggatgacgatttactcatttcagtgaataatgttaacatagcgccaaatgagcatgccgaggtggttcccacaacatttgctgccatgacttatgaatcagatttgcaagatgttccaagagaaagcacctctgatgattcagctccaaaagtggtatgttgccaacaaaagcttttggaaaacacaggagatgattctggtaaaatcgtagaggtggttcaagattcaggagatatattgtctgtgactccacatggtcttcagatggcacacaatctatacccccctgacaataaattgcataaaccagatttgaagaaggaagcttttgctgatcaatcttccgctcttgggaattgtttaaaagattttgttattccagagcagtcttacatctggc

SEQ ID NO: 193914 - DNA, 608 bp, Zea Mays
gtaccggctatggccggcgataactgcccggactaaccatcggggaggcttcactgacctaagatggcttcggaacacacatcaatttgacccgaacgcactgagaatggcatgtccacatgcacggcggaaaccgcggtgtcgattccgtgttcttaattatctacgcccgaattggtcaaacggatgctacggtgagctttacgtgcctacatagctgctagaacaacacttgagagatgcagagctttaccagagtggtctggccacggacgagctgttcttggcggcgcggcggactgaattgggggaaaacggcgtcgcggcggctctgggtgaaattgggggtggagattgaggcaaaacggccgtaagaagctgtgctttcaccgtgcacaatcgatttgggagaaggtggagggggcggtgtgaatttgacttcgatcaagtcactgtgtttgcgatgatcacacctcgccgtgaacccaatggctatttatagccgtggcggtccggcgatcacttcgcggccacggacagcatcactagcgcatgccgaccacgtcggtagaaggtacagtgtgggagaactacgacatgagcgccac

SEQ ID NO: 193915 - DNA, 442 bp, Zea Mays
aactacttttggacaagatctgtgtctcgacaacaatgaaattgtaggggaaaatggggaagttccactatgcagctcaaccactgtggctataactcctgaaccaactgtaaacagagagatagaacatgagtttcatcaagctgtgtatcaggaaccatcgaattcattcaatagcagtaaagtttttggagatccactagcttctgactccagagatgttgcaccgtcagtcatctcgagctttgattggatgcttaatggtgcaatgcagcagtcattcaatgtctttccttctcatccaactaatggaaatgaacaagaaaatggttcttctgaagatgcgccaccacttcctcctcttccaccgatgcagtggagaacaaacaagatacagacatgctcatcaccgttatctgcaaagatcgggagaccaccaagg

SEQ ID NO: 193916 - DNA, 377 bp, Zea Mays
cgggagggaaagcggatgaggcgtgctcggaagaaaggtgttctcacgttcgatggtgacagtgatgaggatgaagatgatgatgcagcagaagaggaaggttcattaaaggtggatgatgaatttggggacttgtttgaggatggtgtcattggggaggactgggaggaggtaggcgatggaggtggaagtgatgcatatgaagagtacgatgctgaatcaggtgacatggaggagttttgggtcaagaaggctgtggctcaaggactggttggcaatggtaatgagcaggatgtttggtgagtgcatcagcttgtgggactgctcaggaagttaacgaagattgagaattcctcaagtgtgcttttctcagcaat

SEQ ID NO: 193917 - DNA, 543 bp, Zea Mays
tcatcagtaaaatcctcattcacaggattgtatgcaaagttggctgttgaaacatggctgtcaaccctttgatctcttagtgatttctcatatgaaatcactttatccctgacttccctcatgattgacaaagcatattcttttgattctgagttcatggaaccaaattccacaacttctgcaaagtataggtggccaagtttgtacagatcatcgtagcttcccagttcctgattacctgctgagacaggctgggatatggaagcacaagtttgtttacagtccttgcaccagcgatgaatgatgtatttttgtggaatcatcagcacaagctcctgtctcagtacagtgagtgcatgcctgcacaatattcctttggattggtacaaacggcagaggcaccatatgtcaccttgaacattatcataagcaactttgtagtctaccttgtttgtttgatcgacatgctccgaaactatgtatgtaaccactgactcattccgttcaagtatattataattgcaatgaaatgaatgtcctatt

SEQ ID NO: 193918 - DNA, 980 bp, Zea Mays
aaagaagtttcaggaactgagggatgaaggcatacctacagaaaatccgataaagagtgaacagaaaagtagaccaaatttctgcagtggagaacaggttaaaaaacctgttttgaggtatctggatgatgatctagacttcctgtcccgcaaagatcaagataaaagatccaattcaaataatgtgaatgatgacatgagcttcaacggtcatgttaagaaaaccttgtccaagaatgcaccggatcaaagttgcttattacagaaagagcggattaataaacccatctccagaaattcagaggacaatttaagttcctcattccacaaaaagcagcgtaagaaactgatctccagacattcggaggacgacctgaactgcccatctggcagagaccgagctaggaaagtcatttcaaaaaattcagaaaatgatgaaaactcccctttccacaaacatcaagtcaagaagtcagctccgcagagatcaatcgatggtctctcattccaggaaaagcacattaagaagccaattgatggaaatggagaagatccaggtttttcatcctgcaaaagacgcatcgaggatcccttttgcacaaatgttgaagatgcaagcttctcatctacgaaaaggctgtctgagaagcccatgtctgagaagcccatcagtataaacaaagaagaggaccttgaccattgccaccaggaatcatctaagaaacctagttgcagagttgagcaagatgatcatggttactcatgtgatgaagaggctgttaaaaagccgggttgtatggatagccacgatgcccaaggttcagatatctctgctgcaactattgcttctgttggagatggctctaatggtttaagcatgccacagcctaataattctgaacctactggttgtactgtcgccaatggggttatagacaaagatatcagctctccactagatgaaataagatctgagaaga

SEQ ID NO: 193919 - DNA, 518 bp, Zea Mays
ccacgcacaggtcgaacacctggccagaaccgagcgcactcgctggcagggagccgttccaacgacgtcaagcacacgggatcaatcacagatgctaaccgaacccctttctatacttaatttggttagtccgtcactcaatcaggtctgtttgcgataaccgcggcgcaaatgctccgacgagctcgtcataggttataagagtcgttagcgttcaatcaagcgactagggaagaatcagtggccagctagggctaccaggcttgcgtaaacttggatgaagactacctagaacgaccagtctacggaagccatgtccgcgacggcgttccgaatattaccttcacgttcacaatgctacagcgcgatagagttcattcggttgagccgatgagtatcacaatgcaagagggtgtagaaacacggacgagaaggacacaaacagacctgtggtttggtggccacggcgcggtgtctcacagcggcgtggatgaccaatttgggggaattccgatgac

SEQ ID NO: 193920 - DNA, 601 bp, Zea Mays
cgctgccgatcactcattatccaagtcaacacaaggacatcatacaggatgcatcggatgttcaacttctgctggaataaatggataggtattattacacagtggatagatactattacaaagaatgagaatataattgtacctataataattatcggatggttgtaaataactatagtgtaacaacactaacaaacaagcataccaaatcatattatagaatgtaacaattgggtattacaaaagcattgattgtgcacccaaaataacagctaaacaaaaataaatatatgcatagtaattgagatcttctgggtgtcctctgcttaggtgaacttgttttcataatgttctttgtcttcaaatcaatagcagactttgaactgcttgacttaatgggaacttgtgggggtgggatgtccgtgttcaatacccgagactttttctttggatggttagttactgaactggagggtgcagctgatttaaaagtgtgcttcaatgttggagcaggcataaaatcgtcgtcagacgatgcaactggtgttgtaggctgactttttttcacccgacaagctagcgcctttctacggaaacgagt

SEQ ID NO: 193921 - DNA, 372 bp, Zea Mays
gtgctagagaagtgcaggaagtgcgacaagtatctgtgttgcagctggagaaatggatgaagggagaggaagtctgggtatttgtgcttttagagcaggtttcagaagacacaattgggacaaatgatgcagttctacaggagattttaaaggaattcgaagatgtttttgctgtgccttcgaaattgcctccaatcagaccttatgatcatcacattcctctgttgccagggtctattccagtaaactcaaggccttatcgatattctccagctcacaaaactgagattgaaaagcaaattgctgaactgctagcagcagggttgatagtccctagtgtcagtccgtttgcttctccagttttacttgtgc

SEQ ID NO: 193922 - DNA, 279 bp, Zea Mays
tgggattcgtaattttagaggggatatatttattgacgtgacgagtagtttagagaatgctagtttgcgtagaggatgtatcgttgagacgtgagtgtcagagtccatttatattagtggtcgcgccacattgattgaagtgtctcgagtgcacgccataatatggttgtatgcgagacagagttatgcgcatgatgagtctagtaaaaatccatcggtgtcggcatgatttctgttgtatggcggatcgatgccttgccttgtcaatcattacattcc

SEQ ID NO: 193923 - DNA, 277 bp, Zea Mays
ttttcatggtgacaatgtaagttttatgttttcttattttgtatgaataaaagtacactggacatatttttgaatcacttgataattagggtaattgtatctcaactgaaatctgtgcatcgattttcatgaaaacagtatactacaatatttgtttcagtattctatcagactaatgttcacaaatattgtggtattcctctacattctgctggttcaccattccctgctactatccattgaaaagcattgtcacactgtttcgaatatgaacatg

SEQ ID NO: 193924 - DNA, 397 bp, Zea Mays
gcctcgcacactctttcaacctgtccgagcttgggcaagccttgaaccaattcttccttctccagttttcgtagtgcagccatattgacatggccaaacctctcatgccaccgccaggctacttcatcttcacgaccacgcacttctaggcacacaggccgttgtatcttcaaatggagaagatacagcctgttttcaacccgcactattcttgccagtaatcttccatcaggttcctgaatatgcatcaccccatcatcaacatggatcttgtacttcgcttcatcaagttgcctaatactaatgatgttcgttgtcaatcggggaatgaaataagcgccaacaaatgaccgggtctcgccattcttgcacatgaacttgatggttcctcgtccct

SEQ ID NO: 193925 - DNA, 347 bp, Zea Mays
ttctgggctttccgtggctgctcctgaaactttgtatcagatgccacgaaatacatctacaagtgcccagcagctgcatgatgtggtatggcctggcgattccactacgaagcctaagggctgggtattcccaaacactggccttcctctgagagttggggttccaattaaagcaagctttaaggaattagtgtcaggcagaggagataacatgagtggttactgcatcgagatattcaacgcagcaattaaacttcttccttacccagttccttgccaatttataactattggtgatggcacaaaaaaccctagctatattgacataattagaatggttgctgcca

SEQ ID NO: 193926 - DNA, 367 bp, Zea Mays
cctgcgcacgtggaccgacctactccgaccatcgccggagacgatccgcacatcagcgtgaccgtcaagacctcccctacaccctcgaccacttcaccggagcagtctcgccgccggtaagcccctccgccctttcctccgccgcggtcactgttccattaggggaaggatcgcgggttcattttcgtagaaacctagggggttttctgcatagtaatagactcatgtgaatagtaaaccgaggacctatctgtaatgaacttagaacctttcgcgagggacccaaacacaaaacctttttcctttaaaccatttctgtttattattttaaattaggcagagaacttaggacatttttatcttgaga

SEQ ID NO: 193927 - DNA, 347 bp, Zea Mays
aagcctttctcaagtcacttgttcggcagtaccccagcaacagtgcattacatgtgtatgtatccatctgcatcccagactccctcaacaagcagaaataccggtgtgctatggcgagactgcccttcttgcagtatgccatgatcatagtgttgtaagtcaccgtgtctggcaacaatccctcctgcacgaggtgcgagtacagcttccccatatactccgtcatgtcgaatcgcagcagcgacctgagcgccaagttgtagcactttggggacagcacgagtcgcttaccacccactcgacggattgcctgaattgcgtcgacggcctcgcgcacgtcctctgcg

SEQ ID NO: 193928 - DNA, 591 bp, Zea Mays
tttcgagtaccgccttgacatgtcgaaggtgttcagaccaagatgcactgtagatgaggatatcatcaaaaaataccaatacacaacgacggaggtacgaccccaggacttcattcataagggcttggaaggttgctggcgcatttgaaagtccaaatggcatgaccaggaattcaaaatggccgtggtgtgtccgaaaggctgtcttatgaatatcctccgaatgaacccgtacctgatggtatcctgagcgcagatctagtttggtgaagaacttggccccgttgagttcatcaaggagctcatcaactactggtatagggtaattgtctttcactgtgcgctcattaagggctctgtagtcgatgcagaagcgccaagaattatctgccttcttaaccaataggactggagcggagaaggctgatgtactatgtcggattgttccctgtttcagcattgctgcacactgcgcctccagttcatctttctgcagctgagggtatctataaggacgtaccgccactggtgctgtgcctggcatcaggtggatgcggtggtcacatggtcgtgctggagggagacccgttg

SEQ ID NO: 193929 - DNA, 748 bp, Zea Mays
cttgttaagatgcctctcctgaagccagataggtaggatttttttgcattgttttgttctgtttttttaattcaacgatgagctgtgcttatgcagttacaggaaaaaattatggttattttccaagaaaatgacccccttcagtattgtgcaagaaaaataaaatcacgctgatgttactagtactgtttgctcctgatttcagagcgccattgcctgatgcggtgaaagccatcttagatgaggggattagcttgttcaagatgcatcggagcaggcatggaaggtatgaaactgaaatgcatattaatattaaaaccccctttttagcacgttgtgaacagtaaacaacactctggttgtatagggtcgaatgcctttgttcaatagcagattaacattcctcaaaaacaagcagactagcagtataacccttattttatacatagtattacttcatatttatgtcgtcgagggaatacttttgtccaatcttcaatcacacttgtatagagaagaatgttctccaaatccccttttctgtagaaacagttaaccacacttgtagcagtattacttcatctgatgatgttgacataactagtggttttcacatgtctatatacattgcctgatgttttgcaaaacgatgtcaaatcagagcagagccatcaaaaggttcatacgctaaagaatgggcacaatgggaacaaaggttgcgtgcgaccttgtttgggaatgctgatca

SEQ ID NO: 193930 - DNA, 449 bp, Zea Mays
caatactgctgtgtatcagtctaaattgggcacacaacctgtctatgttgtggcaactagggcaaattgttttgcttctggttcgatgcagacaaataacagtgataaagaacttgcatccagtgccatggaacggattgatagcgtgaagaacagaacaagtaaagaaacaggatttgtcactgaagcttataacaatgatgcctttagtggtggtattactgaaaagggttttgcgcagttcagtaacagttctactcacataaagcccaatgcttctggccattgttcactacctgaatcaaaaactccaacaaatggaagtgatatcaactgcatcaagggctcttcggttaatagaggtgatgttagcttcacaaatggctcgtttgtcaataggcccatcaacaacaatgaaccaaatgtagctaggcttgaggtgatggaga

SEQ ID NO: 193931 - DNA, 846 bp, Zea Mays
caccagttcaaatgccagcactgaaagtttactcaagaaaacgttcattaggttttcaacagcaacaagatgatcaagatgatggtctagctacggatgacgaattggcatctatggaccaacataattcagctccttcctcccccatcttgggctctggcgttgtagcagccttgactgtaccgccgaagcctattgatgcttctctgatttcaggacaccaggggactgataacgaagtgcctatccaacacctgaacatacacgagacgtagtagcagccttggctgttccgcctgtgtctgttgatgccattctgtttccagaccacctggagactgaggaagaagtgcccattcaacacctgaacacccaagtggaactatcctcacaaaatgagtcaacaaaggatgctttcttcagcaagatcagtacaagaccaactggactgctgcctgttccaaagaccaataagctggccaccagtaagcagtctaaaaactcaccatcttgccccactatgactgcgccaaggaagagacgacgagttgctggaataggagttattcaatatgcatgacatgagcagtagggccaccagaaaggccatgaaagcacttcggattatctcggattcggagggggttagtcaagaggctttggagtattatgtgaatctgcttaaacaccctctgtctcaatgccatgtggatgctctctctgccctgtttggctggaatactccagcagacttagtgcccagtagagctccttcccctcccccctattctggtaaccaccgtgtattatgttttaatggatccgtcaaaaatattgttctagaat

SEQ ID NO: 193932 - DNA, 847 bp, Zea Mays
cattgacccttcgagccacccccacatcaatgccttgaagatctctgcacaatcggcaaaggcacacagtaatgtacaaataatgacacaaaaattgcctagtgcagctcatgtgaatcatgaattcttgaccctctgtgaagttgcttgtaaacaccaggtcataatcacacacaatggagtacaggagatcatgaagtagcacaatagatcccaagataccaggggcgaccagattagcgatattggggtacaccaaagcaatgaagtgagcctacttggggtacacaaacatcattttgaatattcactacaaaacaatggaaggtgccctcccagaccccaacttgatttcaaggagaaggccaatttgatctagttttgttggcagaaggttgtggaggcgcctctagagataatagaggcatagtcacaaaaaatctaggtgtactgggtgcaagtcagggtcaaaggtagctaaaaatgagggtcaaagggggcagttaggattgagtgaccaagctaatctaggtcgatgataactttcctagaagataagattgatcacaattcacaaagacaaaaaagaagaagaggggaaaggataaaagaaaggtcacatgcatggttcaccggttgtgtgctggctcatatgacccacaattgtaactctaaacctcctaccacctcacgccctctcatgaatcatgactaataaacaagtagctgctgcctctcgtccaaacttgctgacttgcttttttttctctttgttttcctgcagaagccacaaatcaatcacccattgccacacaccatgactaacaaaacataaagctcatggatc

SEQ ID NO: 193933 - DNA, 288 bp, Zea Mays
ttcccacaataactctcaagaggagaaggatgtcaagtgtgctagatgctatcttggagtcggcaagggcaccaactcctgcctctgcaaaagaggctgccgaagctgctacatctcgtgttgaagtcgaagctgggccctcagtgcccatccaaatagagcctgttgaagctattggatagagtactgagcaaggaccttcggatgccactctgatcttggaaagagaaggcgcatctaagaaggttaaatctcctactctcggagtgtctactgaagatttagact

SEQ ID NO: 193934 - DNA, 313 bp, Zea Mays
gaagaatcgacactttggtggagcccatgatctccaaactcttttgtaatgcccaaaggagcttgaccctaaaaagatgcctttgtaagctgaacttgcagaatatttgcctttcagttgccaagtaaaaaatgtgcctgtcttcaatagtacgctgcagcacaaagacagagaatcccagagaaataacaagtaatctatcaatatctgcaatccgtcttctgttcaacaaggcttcttgcacaatccatttgcttgttatgctttctgggattataccgaacaatctcggagcaatatgtgaaacccttct

SEQ ID NO: 193935 - DNA, 360 bp, Zea Mays
tacagagatagactgaacagctaggagttgttccactgcatcaggacgaattgtagcttctaactgcaaaataaacaaacagagccccttggcttttctataagatttgagagcggccatccttccatcctcatccttggtactgaatgtccctagagtttggtgttcctcattcagtcccgtggccttgccaccagacaaaggagatggaggtaagggcataagtcctggcctaggtgaaacttgggcagatactccaggatcccacattctgtcctccatttgtcccgtgttcaacatcacctccgcttgtaacatggtcagtgagttgtgttggtcactactaacgcgggtattcag

SEQ ID NO: 193936 - DNA, 443 bp, Zea Mays
cagtgtttggtgattattctgaagtcattggctgattgggagcaacttcgaagagattcctcaaagcaagggagcattgttgaatctcatgaagaggatgcttcaaggagattgacaactgatgagatgaagaaccaagaggatggtcggaatcagtttgagagagccaaagctcataagtcgacaatggaggctgcaatctctgaggtgggggtgtctgcaggtttcataaccacttcggaactgaaatatcagattatttcttgaatgttttagtttgtaaatgtcacttctcctaaaccttttgcagtttaatcgtaaaccaagtaaagggattgaatatttgttgtcaaataaattggtagaaaataaggcatcatctgtagctcagtttctcaagagcaatcccagcttggataaggtgatttcaagattccattgag

SEQ ID NO: 193937 - DNA, 274 bp, Zea Mays
atgggagaggtggggtgtttggagaaaataaatgggcacgagaaaagggcacagggcgcaatggccaccggatttggcgctgcggagatcctcccctaggttgagtccgcaatgcccgtggcgaaacggcaaccgcgctagtccccaatcttcggctcatccagcggcgagcacaagtaggaaggggttgactggtttcccccgggtccgacggcttgagggacggatccgtcaacgcggtgggagcgacgaacgtagaagcgagcatcacgac

SEQ ID NO: 193938 - DNA, 552 bp, Zea Mays
ccctctgtccagcaaccactcttgcgcctgcacatcaaactggcatggacgaccaaggccatcgaagcttggaggagagtaaaagtagaagacacaaaacttcaactggccatagtcaaggaagtgattcttcgcttagaaactgctcaggaagtgtgcactctctctctcttgtcaaactgaacctcctcagaagattgaaagctaaatccttgggtctagcactcattgagaaatcacgaatcagataaaggtcccgcttgactgccatccgccttgaggatgccaactcaagatttttccatctccgggcatgctctagggcaaggaagaacttcattcaagccttgcaaactgagattggcttggtcgtcacataggaagaaaaggagaaggtcatcactgaccacttcaagcaacatttgggcacaacggcccctagagcaaggacgttcgactagaatttgctaggctaccaccacattgatctttcctccctggaagcacctttctcccacgaagaaatcaaagagactatcctctcaatgcctc

SEQ ID NO: 193939 - DNA, 401 bp, Zea Mays
acaacaaaccttcaacctgcaacggggtggacagttttgtttgaatgagtgcccttcagtgcatgagtgccctggctgcgggcagttgatcgagtgtcataaggatctaagtcagattggaagtcagcaggttattgcttcaattggagatttgggcgtaggggctgccagtgagggtttgcctcccagggtgtctcctattgctgccacctccccttctatgctcctctgcccaaagcctattcaagtttatttttgccggcgtcgagaagcaaggagggttgaggaagcaaccttgggggacttaccgtctcaactgcaggcctctgatgtacatgcatctccgtccctggcggctttgtcaccttcaagggtgtccgagttcttatccaaaatttcca

SEQ ID NO: 193940 - DNA, 320 bp, Zea Mays
gttttcacgttaatttgtgtgtcatactctgtgatttgttggttgatctactttgtttttcctacggttttctgctaacatctcacattgtgtagacaagtttccctccgtgcattatttcttgccttatttacctccgtgcaacaaacaaatgcgagtgcgagtgatgtacaaccaccaaattttaggcgagatggatccctcctatattttactctgctctgtttccttgaacgtgtgaatctctttccttcccaaatttctccattgataaaaggtggaaatcggcagtgccctcaccagctataaatggagccaca

SEQ ID NO: 193941 - DNA, 348 bp, Zea Mays
ctgcttctgatggcaatgatttgtcttctaggagatatgaagatgctcttcaagagcctcagacagtgcaaactaatgctattaatgaggcctccagcgctaatgaaattgatcccacatttcttgaagcattgcctgaggatcttcgggcagaagtccttgcttctcagcagaaccgttctgccccagctgcttcctatactcccccagctgcagaagaaatagatcctgagtttttggctgctcttccaccagacatacaggctgaggttctagcccagcagcgagcacagaggattgcccactctcaaccagctggacagccagtagatatggataatgcttcaa

SEQ ID NO: 193942 - DNA, 600 bp, Zea Mays
aaggtgtcaactttgtttccatttgattggatattgtctttacgatcattgctagtgtattatgattttatgaaagatgatggtactatgtgaggtcaaatgaaagttatgatatgccttccttctgatggccagaatatgttaattgatcagtttggataccattgcgataagtagctgtctagatacaccagtacccacaaattctctcacacccaatatgccgacatggtggggtaaatcatcgtcaaaagatgttaagaaaaccaccaaggaaaacctgatcgatacatttcatcgcttgataagtccaaatgagcaaaagggaagcacaaaatcaaaacggaattgcaggcgtggcaataatacagctgctgagaaagtttgcaaatcaacaacagtgtcacgtccaacttctccatcgaaagaagtttctcgctgccaaagtttttcggctgataggctgcatgcccagccacttcctattcctggagtacgccctcgagtaactcgtgcagttgctgatgtcaatgtttcaaagcccatattggaaaaacgtggcaaacctccactgcttttgccacttcctaaacccaatcc

SEQ ID NO: 193943 - DNA, 377 bp, Zea Mays
ctcagaagactgatgtggagaggccgtgggctggactctcaatttctattccctataaagctcgggccctctttgatatggctgtgaatgccgtggttgggaatggtgagaaaattattttctggactgaccgttggttggatgggcttactatggctgagatggcacccaatcttttcagaactgtccctatgcgaactgctaagcgaaagactgtggctcaggctttgtttgggcggagttgggttcgtgatatcaagggtgctcttactgttcaggttttaattgagtacctccaggtctgggattttgttgaggaggtcgttctgcaagctgatgttcctgatcaattcagatggaagttgacacaagatggc

SEQ ID NO: 193944 - DNA, 512 bp, Zea Mays
cgcaccgcttgtcaacttcactggcaggcgatgtgccgcctcagcattaaatgagccctgttcactccgatggcaggtgatgtgccgcctcagcattaaatgagccctgtccactctgctgatggacagcgaccaggccatcctgcaggcggcatgcctgtccattccggtggcaggcagtacgactgtgctgcggcatacactgtgctcatcatcactcgtacgttgccagggaagcatccattgcacgccaatgctacgcagaccgcggatatcagggagcaaggagattgcacaagtaacgggcattagttgctccaagtattacatctgctatgtccctgggcccgcatgtcggggctcagtatccttgtacgtgccccccttgagctataaaagggagggcacacggcgttacaaggcagactcagacacacttagacccaactcaggctcacaagttcatgcaatctctcaagctcaatacatcacacagtggagtagggtggtac

SEQ ID NO: 193945 - DNA, 553 bp, Zea Mays
gctaccgtagactcgtcgctccctgtcctttttcaccagcgacgtggcctcctggccgtcaccggagtcgccgtgtgttactgcgggtgtgccacgctccaagctttctactacgtcgtctctagccgcaccaactcaccgatggccgccgtagcttcttaaccggtgatcaccggaggaagcgccacgatgttcgccacctatcgcacgcaccagtgaactctctcccctccggccgccagcacaacctgctcgaattgaccgtcgtcgatccctataaattgaagcccccgccagccccacaaggtcatcacacacccagccaccaaaaatcactagcaatcgttcgtcagagagcttgaattttagttttcccccaaactggtctccgccgccgcgaagaacacctcgccgcggccaacgcaaatcaggtccaatcctgtcgttgttagtattgttcgtacattctcatatgtccgcaatgctcactgacccacttaattgaattatatcgccaccaatcaccgggaacaccttcacccatccgcaacat

SEQ ID NO: 193946 - DNA, 1512 bp, Zea Mays
gtttggctcgatccggaggcgcggcgactgtgggtgcgtgtctcgaccctgtcctggtccccgattgtctctctttggcgcgatctgggaaatgttctctgtaaagtattttttgggtttatccgctgcatattgttcgatccaccgtatggacatagctccggtcttagaaaatttggattttaggcgcttgaatcgagtactcattttgattgatacgattttgagtttccccccttgtgagtaatattgtttcccgttcgaagctcaatagttgctggttgagctgtttttacttcaagttaccttcatccagtagaagcttgtggagtattaatcccgctttgagtgctcgtggaattgtgctccataacctgttagctattgtccttacatgactgcactgattgatgagactaaagcttttgctatatgttttgtttcaataggtgggagtaatctgtatttgtggagctttgcttggtgctgaaaattgtgcaaacatgagatggcttcagcatatagcgtgctggaagtgggcaccgtgcaactgagcccatccttcttgtagccagattccttattccaatgatgcagtggttggtaggttgcagtagatgactaccggtgatcccttgctcctgtcatcatcgggaagtgcagattcaccttcaaagccagctcggccttcggtaggctcattaggctgcctctgcgcaactgattcattctcttcttcactgtacgaggattgtgaaacggcttctgtcacactcacggatgaaagggaggctcaaccaagacatttacgcgagttgtctgatgtgagcagggtggcagagcgcttccagtctgctgattcacaattcttccatcgtctctcagtggaatgctctcagaaggagaggcagcggaaggtttcttggggtggcgcaatggagaggcagcattctccatcatccctagagattggaatggtatcttcttcacatgagaagccaaatcgctcccagagaatcaggaacaagagctcacagtttgaagatccatccgagcaagagccaagaaaaatatacattaatgatcctaacaagacaaatgatcgatatgaatttacagggaatgagatcaggacaagcaagtacactttgattacgttcttgcctaagaacctcttcatacagtttcatcggttggcatatgtatacttcctggttatagctgctcttaaccagctccctcctttagctgtatttggaagaactgcttctcttttcccactactctttgtgttgtttgtgactgctataaaagatggatatgaagactggcggcgtcacagatctgacagaaatgaaaataaccgagaggcactagtacttcaacatggtgattttcggtcgaaaaagtggaaaaacatttgtgcaggggaggttgtcaaaattcatgccaatgagaccatgccgtgtgacatggttcttttgggtacgagcgatccaaatggtatagctt

SEQ ID NO: 193947 - DNA, 600 bp, Zea Mays
gcagtttgaaaggaggttctacccggtcaccttcctggagaaaatgaagattgatttacagtctttcaagcaggagaagaagtcagtcatcgagtatgaagtgggctttaacaagatggtccgctttgttcctcatgtggcctactatgaattggagaaggcgagctagttccgtcagcgcctgaaaccctctatcaggcatgctctgggcgccttcccactggtggattttcgtactaaggtggagtaggcattgggcgtggagatgcagcatcagtacaccatggaatcccagaagccttcgggtgttgattagcctcgtggccaggacgcgaggaggggcaataatgggggttcagcccacaagaggggaaagtcacaacaccagcgccaccacccctattgtggcaaaccctctgaatcgggtacttcaggagggagtactcagaggtatcgggctgttcctaagactgggttggggatggtgtgtttccattgtggtgatgcgcatccccgtgtcgagtgtcagtggagtggcaggtgctctatctgcagccaggatcacaaggacgtggtgtgtagaaggaatcccaatgggag

SEQ ID NO: 193948 - DNA, 372 bp, Zea Mays
ccatgcgaagccgaaggcacgtgaaaacattactgctgagctgaagctgggttgtttgtcggttggcattcttgacagctcttgtggaatggtgtgtaggcttgctaaattatgtatctctttttaaaatctaaaagttttaacattgttttttctctcgtaaacacagtatttatagaattattacaaatcaaccaatattaccttttttcaggtcacaccactttttgacacaacaatcgctaatataaatcttgcaacacatggaagatttgagacattgaatgctgtattgatctgttcaattgctgcatccacattcaatagacacttggaggcatgggaaccctttgttgagccatttgatggaat

SEQ ID NO: 193949 - DNA, 330 bp, Zea Mays
agagatttggttttgtttttgatttgttgcagtattattgagcttagctatcaggatgtcctgggctttggatattgcatccctggaacgccccatcataatctttttcttggcagctagtctaatactggatctctttgtgaaggtaggagtctgattatacaatacagaaggagattcagtggattgtcccattaatgcactaaaactgtctggggtatcaataggaggtggatggattagcggttgttcttttggtaaagcaatatgtgcaacaaattcttgtagctgtgcatcagagcagtccccctgcttgtgcgcggatggctg

SEQ ID NO: 193950 - DNA, 463 bp, Zea Mays
ccgccacggcggtagacacgtagtcgcgaagccgataaccttcgtcacctccggccgccgcgcgtcctccgcaaaattcacggccaccgtctaagccgcctataaattgagccctcccctagctgcgtaacctaatcacccacgcagccaccgaatatcgtcctcaatcgttcacctgagaacacgaatttgggacttcccccaaagcgggtcgaacaccccgcaagaacacctcaccgcggccagcccctctccggtcagcccccgtcccctgctttcttgtttaagcacttgcatagcttcgtgatgcttaccaagtcatcaatttgaactatgtgatcacccatcaccgggaacgcgtagttcttgaattcatccgcacggttaccgtggccagacccaattagctcgtcaatcttgaaattaacttaggggaaatgatcagtggaggttcaatctggtg

SEQ ID NO: 193951 - DNA, 408 bp, Zea Mays
cgagtctcggccgttggatccgattccagtgcgcaggattatacctagcccattatgaaacggtacgcaaccataaccctaggatccaaaaccgacggtgccgatctcgatcgcgcagatccgtcagaccccgaaccgagcacgcagatttaatgaatcccgatctattccccgcccatccgatctgaatcgaacgattcacgttgctctgacctaaacccatgggcaccatctaatctggaccgcagattgtgccatcaacgatccagcacgatttggactgacccggccgacctccgcccaactccggccgccggggtacattccgcgcgcggcggcgccatgtccgggcaacacacgcccgacgaatcctaatgctactccctaatccgctatatggtatgcgta

SEQ ID NO: 193952 - DNA, 1135 bp, Zea Mays
gtgctttgagaatgtctgtaaagatgctcctaatgtggaactccagaatggaaattgatggcggtggagattcgatagttgcaacttctttgttagatgctagcaacctgatagttctgaaggtttcttgttggtccaatattaattactgtttttatctgcttgtctcagtatgcataagtatttctcatatgtttccaggaatcatctgtgatacactctaatgctaatcttggagtccgtggccaaggtgtcctgaatttgtctggggacggagacacaattgaggcacaacgccttattctatcgctgttctacagcatacaagtatgatacatatgcttttcagcatcagttccttttttagccataacctttctgatgtatttgtttattgctgcaaaatttcttagtgcatcacatagcaatttgcattttgaactctatggcgttgcgctgctctagtccaatcaaagatacagtacaggtcatttagcaatgttaattgtgatggttcatacagtcatatgtctccacttattttaagtgtatctaagcaataattatactgctgtggtgactgtcatactgttgtctcgtgtgctgtgtcacggtatatcgctgattttgtttttcctgtacttgcaataaaatttgtaactaccttgattgaatgttcaatgtgtggtcacatgaggtattatgttcttttttttttgcttctgtaactagtaaaagaaagaatagtgataaatattcattttgtaggttggacctggttctgttttacggggcccacttgtaaacagaagtagcgatgatgtgtaaatactttcaccttcagctaccacagagataattttttcctatttcctatattggaaacctgtttgctcattaatgagctcctgtttatctatcagggccccaaagctgaattgtgaagcagatagctgtcctgtggaaataatacatccaccagaagattgcaatctaaattcttcattgtcgtttacccttcaggtacactcaattttttaacactcccatgcagctcccaggtagattctgtcataagatgctgcttatggtatcttctatttaggtatgccgtgttgaagatattgatgtatgg

SEQ ID NO: 193953 - DNA, 445 bp, Zea Mays
cagtcttatggatgggtcaagaagtcatatgtgcgacgaaactcaagatcagtcttttgatccagacagaactcacatgtgctaggagacatctacagactaagagtatcaagctgacgctaggcgtcagacatctggctatagaattcatcaactgtagaatctccctgacgtaaagaccactcctgacgaatggcagcaagataagtagatgtccagcacacacaacaatcacgaagaagggtccacatctgatgagaactgtcactcaacaaactctgtagaaaagcgagcctccacactagcggtgagaatagaaccagctcaagcatcctcatccatccatatccgatatgcactctactgagcctcatatgatgccagctgatcatcataatctgcaagtagagtgcatcagctgctccctatactgctccattactcg

SEQ ID NO: 193954 - DNA, 275 bp, Zea Mays
gtcacaccgacttaagtcgtcaccgacttaagccgattactccattagtagggtatagtgatcaccctaagtcgagtaagcgcgagcatgtcgcaccgacttaagtcatcatcgacttaagccgattgctccattagtagggtatagtgatcatcctaagtcgagtaaacgcgagcatgtcgcatcgacttaagttgtcgccgacttaagccgattgctccgttagtagggtatagtggtcaccctaagtcgagtaagcgtgagcatgtcgcacc

SEQ ID NO: 193955 - DNA, 396 bp, Zea Mays
gtttggggcaccaaggctggtcttcgaaagcatagccgaagcagaagctaccaggctagaagatattgacgtgctggaggaagaacgattgaatacagtaattcagtcagctagataccagtagaccctgaggcgctatcatgataaggctatacgacatcgatcttttgtagtgggagacttggtccttcgccgaattctaacgggaaaaggacggcacaaattgtcaccgctatgggaagggccattcatggtatcagaggttactcggccaggatcatatcggcttactcaaatggatggcacggaagtggggaattcatggaatatagagcatttcaggaagttttatccttatcaagacttcaaaagctatcggagcaatgttgtactctg

SEQ ID NO: 193956 - DNA, 357 bp, Zea Mays
agcacaaacaatcaaggtataccatgtgcaagagaggatgtcacacgcaatcagttgatcaagttgagtgtgtgaggcagagacgacgctagtgaaggcaatgttgaaggcgaagcctctcggtggtggtgaggatgagctgtgataggttgatgtgcatacgaagaggtgtggcacacacgtgcgttcggggtacgttgcaggcaacacgatgtgccacggtcgaagaagatgaggccaatgttgtcgatgtcgaagacgcacgcggtcgacaggcggtgggcgacacaaatccgatgaccaatcgggaagaataaaagaactcacaacaacgcattttggaacatcaccaggtac

SEQ ID NO: 193957 - DNA, 338 bp, Zea Mays
tgtcggagaggatgttcccggggagggtaccatcggtgttggagtacgtggtgacggagagctcgctggagccggagtcgtggctggatggcgtggtggcgaagagctcgttgtagccggagctggagagcgtggcattgtagtcggtggagacttgggggctggagtaggcctactcgaagaagggtcgtctactccccggctccctcaaagtggacgtactcgatggtgaagtcgtcgtacgtcggaatcgtgtcgtcgtccaccgccttgtcccaggcccatcctcgcccttcgtcgaacactacgtcgcgcgccgtgcgcacacgcagtgttcc

SEQ ID NO: 193958 - DNA, 565 bp, Zea Mays
tggtgatggtgatttgatacttgcatgggagttagggtttagggttgtgtcgccggcaaagcgagcaagctagctactctacctgctttctgtgcgcttctggcccgtcgtgtccgtgtccgtcctgcctttcttgtttggaaattgtaacttggagatccctttttgcgcgcttgagattttattttctggaccatctatccatcctgacccgcccgaccggggaagagagatgtacagagacagaaaccgggtcaccacacacgtgaattgccggctacgtacgtccttggttctaaaataaatacaactaatattactactagtattatttctacaagcctatcttttcagtataagcagccagatcgatgtccggttgtctcgggacggacacccgtggcgcgcgcctcctggtcgttctgggagcacgagaagaagacaaaagccagtctccttttggcctcggaatccgcaccctgcagggctatgctatgctgccccagctcagctctcctctccgtctagtatctcgatccgtggatccccacctgttcacgtgatg

SEQ ID NO: 193959 - DNA, 501 bp, Zea Mays
acttgttccaatctcaaagcccttatttggaagccatgggggccatcgaaatgcaaactattcgcttggcttatcatccgcaaccgggtttggacctctgataggctcgcagctcgtgaatggccgcacagtccttcttgtccgctttgcaagcggcaccctgagacagctcatcacattattgctggttgccgctactcgaggagaatttgggacgccctagcatcttggctctccattggccctttagctccagctacctggccggactctacttccatcaagcagtggtggtttatggtcggctcagtcgctgtgcccaaaaagggaacgcgctccctgctcctactggtggtctggcacatttggctggaaaggaacaaccgcaccttccaaaggcaagagaggtcagtggcagatctgctagcagcaattaaggcagaggcaaggctgtggggtgtcgcaggtgctaagcaccttcttgcgcttttacctatgctg

SEQ ID NO: 193960 - DNA, 327 bp, Zea Mays
cttttatcaatgttgtgtttatcacattataaacctggtagttaggctctaatggtagttactcctttgattgaggactttagaacatcgataccctttttgaactcttctaaccaagaatcgctgcatgcaagagtaattgcattgatgttggtgttatatgtaggaagtttggattggacatggatgttagtggaaccccacatatttaatgcttaagaacttgctacctcacaagagtacttttagttaatttattgaggctcaataccctggcccaaaggtagagggggttctttcatttctatgaccactaaaatattggca

SEQ ID NO: 193961 - DNA, 276 bp, Zea Mays
cttggagctttttagtgttgagaggcaactcattagttcgcacagtgggaaggttaatctccagctaggtaacgactccttggtagctatgaaggctatgtctcatacaaccatgttacacaaggaattagcaaaccagttggcaatgtttgtgccattttcacttcttgctcctgctgtaatcaagccagttccatcttggacaatatcacagatagtgcaaggtgcatttccagctaacctgacttgccaaggggacacacacttggttaggga

SEQ ID NO: 193962 - DNA, 414 bp, Zea Mays
ctgtccgttatcgaccgccgtgaccggttggttaggaggaagaagacacggggaggtcgttgatcgtggaacgaacgaccaggatttgatctggtattctggttcgcccgtggtgtggttaaccgtagatcttcgatcgtggggccgtgggtggtctgaagttctttaaatccggttcgtcggatcttgatccgatggcggtcctcgcataccgcttcagtgtcagagtgatttaatcctggcccttgaatctgatcgggtggctgagatcgactcgtaccccttcgtcgtgcctagtttgcaaaagagaccctgtattaatagtttatcaacccgcagtcctgtctgtgggaatcctgagtctcatgaatttttgcgtaataacccctgtgtctctctgttatttgcgcccag

SEQ ID NO: 193963 - DNA, 323 bp, Zea Mays
cgggagatcgccttgggagaaggagcggaattcttggtcggcataaagagcacgtgtggtgcggtttcccaggaactgggactctatagagagccagagggtgcgggcagaggcgctgcgctgagagatgatgtcagcgagggcatcggaaagggtgccaagaagccaagtgcggacgacggcattcatgcgaatccaatcaggtgactcgggaaaaacagaatcagagaggacgtggcattccagggaaaatttggtgagggtgagaaggaaagattcggaccagcgggcgtaaaagttggagttggtgtcaaggagtagag

SEQ ID NO: 193964 - DNA, 504 bp, Zea Mays
gaagaactgggagaagtttcctcaaagcgtatgtcaccaacatgcttaggcgaaagtgtcgaatcttcacaatcaccaacatcagctgcagaggcagcaccattgccctctctgaatttagcttcagatccatcagtcggcttcctacagcgttgcctgtgtttcttgcttttctttttgctcttccttcttgatggccttgcattatcactcggcttggtaaagctgttgactaagaaatctgaatcagacatgctattggatgttgtgggcttatcttccagtagccttgatgaattatcctgccatcttctgtgagatacatcttgagcattaaggtgcaggaacaaaatcgatggtgaggacgatgtttcagggttctcttctggagatgtaggtcgagatgaaggatcctcacttgcactctcggtgagcgatagtgatttgaagtcgtaacagaaattgaagggaataactgtcacaataacacacctggcaagtaag

SEQ ID NO: 193965 - DNA, 364 bp, Zea Mays
catggccgacattgtgatagaaacaatgaaacatctaccggaagcttcatttcatttagcaacaaataacggtgtccagcaactgaattttaaatattcctctggtctcgtaacacaaaaccttccagccaattcagactccacactattcactgcacaatctacacccacagcagatggagtcagcatctcaccatctgatgcctttgttatgactagcgttcatgatgctaagcgtgatccaagaagggtatgatctatcttttggtgactttcaggttgtgttttatgaagtcaacagaaaaatgcttattctgaggatgctgatgtgttgcaggaccctcgtcgcctcgatccgcgtcgg

SEQ ID NO: 193966 - DNA, 325 bp, Zea Mays
tgctaagttcttactgaccgaatctaagccatatgtactttgtcgaatgaaaatctcctcgaagggtagtggcgccaggaaggggacaatgttaggtgacctctcgctcgtcaaccatcgaggatgggtcgcattgttgcgacgagcgagatcggccagcatcgcaacgacgatgagcagggtgagggcgtcgggaaggggttgggcttgagcagcgttgtgtgtcgggaaggaggcggtggcgagcgacatcggagcaaactggatcgaatggcatcagatagcataaggttgaacaaatagatgcgaggattggaccaagaag

SEQ ID NO: 193967 - DNA, 1248 bp, Zea Mays
gcaactattgcgtgaaactgagaaatatcttcagaaacttgggaacaaattacagagtgcaaagtccacagatggccgctcatcttttgttactgataagagtgacactgcaaacgacattgaagatgagagctaccagccacaggttacatagttttctggtatatagatttctgattctttcatgtttgatatttactcaagtgtaatttcctcttcgcagcattatctggaaagtaatgaaaagtactatcaactggcacacaggtacttatgaattggatgaaatccatcttcctttgtcaatgggaaatacaagcatgtccttagttttagacatccccctattgtaatgttcataatttgctaattaaattcttaacccttttctatttctgacattgttacttacttttttctagtgtaaaggaaactgtaaatgatcagccatcttatcttcagggcggcaaattgcgagagtaagctgcactagtcattctgctattatcttgtttccttaaattttttgtgtgtgatcagatattgttgtcatttatttttttgttgctgtcatgtatttgatcattcatacatttttattggtttgctacttgcttgctattgtacaggtaccaaatgaatggcttgcgttggctggtttcattgtacaataataatttgaatggtattttagcagatgagatgggccttggtaaaacagtacaagtaagacctagtgcaatatgttcaacacttattttcatctgttttctagatgtttaaaatagcacatgaatccttatttgcctccctgctgtggtaggtaatctctttgatatgctaccttatggaaacaaaaaatgaccgtgggccttttctcgtggttgtaccatcatctgttcttcctggatgggaatctgaactcagcttctgggcacctagtataaataaaattgcttatgctggtcctcctgaagaaaggcgcaggatgttcaagtaaattttaaccttttcaattcatcttgcactagtctatgtggagatttattcacttcagctattttctttcagagagatgattgttcatcagaagttcaatgttcttctgacaacatatgagtacttgatgaacaagcatgataggccaaaactaagcaaaatacaatggcactatataataatcgatgaagggcatcgtattaaaaatgcttcttgtaaacttaatgctgatttgaagctttatcggag

SEQ ID NO: 193968 - DNA, 394 bp, Zea Mays
agatttcaaggagatgagcataccaataccaagagtaaagaaattgccgaaagatagcgacttaacaacagaaaaggaaaaggtctcaaaagacagaaaggtcatgaacatataaactgaaatgtttaagtagacaatagaagtttagaggcaagtatttgaaacaagagtattaaagggatacaagcatgtcaataccaaaggactagagttcaccagatggtagcaatttaatgacgaaagaggaaagaatcccaaaaagataagaaggttatggtcagggggcatctacaaagatgtcgcaagcacaagagtaagattagatctagtggattgagaaaggttagaccataataggataaaatacttttagcaagggggcatatagaagcac

SEQ ID NO: 193969 - DNA, 550 bp, Zea Mays
ggggagttcccgctcattgttcgtccggccttcactctcggtggcacgggcggaggcatcgcctacaacagggccgagtttgaggacatatgcagggccggccttaccgcgtcgcacactcagcaggtgctcgtcgagaagtcgctgctcggctggaaggagtacgagctggaagtcatgcgcgacatggctgacaatgtcgtcatcatctgctccatcgagaacattgatcccatgggcgtgcacacgggggactccatcaccgtcgcgcctgcgcagacactcacggacaaggagtaccagaggcttagggactactcggtggccatcatccgtgagattggtgtggagtgtggtggttccaatgtgcaattcgcggtcaatcctgcagatggggaggtgatggtcatcgagatgaatcccagggtgtccaggtcgtccgcacttgcctcaaaggcgacagggtttcccatagccaagatggctgcaaagctgtcagtaggctacactctggaccagattcccaatgatattaccaagaagactcctg

SEQ ID NO: 193970 - DNA, 674 bp, Zea Mays
aacaccgtgattccttgaagcaggccttggctgaaaagacgggtgagcttcagagttgcatgacagaattgcaaaagaagtctgatgccctgcaagcagctgagagcagggttgatgagctacagatttttttagatgaaaagacaagtgagcatgaaaagtgcttggatgagcttcgagacacatatagtgcatgggaagctgctaagaccagcatggagcaattaaatgaatcaaaaagtgccctgcatgcttccctttcactaaaggatggggtttttgaacgcattgaagatatcatgtcagaggcaacatttccagaagatcttctttccttggagatgacagataggttgggatggttagttgagcagaagaaaattgcagatatgatcttctcagagcatcagaaagttaaagaaatcttgagctctgttgacattccacattctgtcttaacctctgaacttgattcccagatcagttggcttgccagctcactgaaccaggccaaagatgatgcggtccggttgcgtgatgagtctgctgaaatgttggctaaaatggctgcacatgaatcaaagctggtgtcaatgcatgaggaaattgaccgtttgacaattattctactggaagagaaacaggaaaaggatattcttttaaatgaacattct

SEQ ID NO: 193971 - DNA, 284 bp, Zea Mays
gaggtattgagcatgtttgctgaaatggccaacatgaattttctttgaagtatggtattgagcaaaacaaagagtaaaaaatcacacgatactcgctgagttagatagcttactttaaatatgtttctatgttggaatagttgaaaaggacatatctatgtgcttgaagccatgtcttgtgatctaaattgacaacacactttccagccaatgctcgaccaattttgtgaaagaatggagttgtaacacaaatttgtgttggtaagcgatttctaactctatgg

SEQ ID NO: 193972 - DNA, 284 bp, Zea Mays
ccgacaaatacatatatgatatatgcaatgacattctacatatatgcacgaccgtatgagcatctgtctgagtcatggtactcacgaaatcatcacttgtgggacccttaaacttcgacttgacattatatcgtctcgtatctttgatctcgcattcccgttcttccatctgtatgtgtaccacatcacgttccaaggcctaaaaccccaagtccaatcaatctatacaacgctctatcccctttcgttgcgttcatccctgacccatgagggctgaggaccgc

SEQ ID NO: 193973 - DNA, 334 bp, Zea Mays
gggtgcggtggggtggagttcggcaattggcatgatgggtgtggtgcagtgtgattccgcaatggttgggatcgaggaaggtgtggaagggaatgaggtggattggtggggtgtagtaggggtggtgcggctcaagtaggaggggcgaggctggtggtaggagatggcatcgagggtggcggcaggatggtagtagatgggatcagaggtggaggcgtggtggcggtcaagggaagtgtgggcgcggcttgcgttatggtggaggtcgtcataccccaacacccatagggaaagccagctatgtagacagcggaagaggcgacgaactatcggg

SEQ ID NO: 193974 - DNA, 1281 bp, Zea Mays
gcagtgcatctctcgcttcaaagttatttgccttatctcaaggctggggtggaaaagaaggtggtcttggattagtagcatgttctctacccagtgtatctgatccagtttccactgaggttggatccacactccattttgagttctatcgtgctgctgataaatcagagaaatcccagtgtctagagaaagagaacaagttggaagtaattcatttatcgaatgtcaattcgtgcaaggaggcagatcttgaaatattggacaggttggtcaaggattacagtgtgccacaagctttaaggtttcttcttcttacaagactgagatttgcaagggcttttgactctttaacatgtcgacaccagtatatctgtatccgcttgtatgcttttattgttcttgtccaagcaggccatgatctggaagttgtatcaacatttttgaacaatgaaccagaattcattgatgagctgttatcactacttagctatgaggatgagatacccgaaaagattcggatactgggagtcctttcattagtcgcactgtgccaagatcgacctcaccagcctactgtattgtcctcggtaacttctggtggtcatcggggtatccttcctattctcatgcagaatacagtggattctatcatcaatggttctatgaaatggtccataatatttgctgaagcacttctttcgcttgtatctatgctggtatcatcaacaccaggttctctagctctacaagaagcaggttttataccaactattttgcctcttctcaaagacacaaacacgcaacatttacatctagttagtaaggcagtgcatgttattgagagcttcctggattatcacaatccttcttcagcagtgttcagagatctaggtggactagatgacactattgctcgtcttaagctagaagtatctcaagttgaggttgattcaaaactaattgaccattctaccaatgaaggaaacgaggttgaaagttatccacctgtgcaagatatacaaccttcatgttctgaatccttgattttgtatcataggaagaacttaataaaagttttattacgtacaatatctctggcaacatatgtgcctggtagttctgctcgtgttgatggttcagaagagaatgtgttacctccatgtttatgtgcgatttttaagagaggcaaggacttcggtggtggtgttttctcacttgctgcaaatgttatgagtgatctcatacataaagatccaacatgctatactgttcttgattcag

SEQ ID NO: 193975 - DNA, 324 bp, Zea Mays
taaagagctacgtggataccaccaagattaggaacacattcgagcgaagcgtttgcgacaatatttcttcctctttttttgttctctacagccatacctcatttttaccttgcgctcgccactgatccttagtgtggtaatgtgacaaggaaggtgaccatattctgttcatccttcattcatccctcatcatgaaaccaaataagagatggtgcagcttcaatccacttctaccgtgtaatcaaacaagaaattaggtttaacccgtcacttaaaccaaacaaggaacgggtccgacccaacctaaaaaatagatcggttttg

SEQ ID NO: 193976 - DNA, 476 bp, Zea Mays
tgagagccgcaagttccgctgtggacttcgcgcaggatctggacgccttcggtctcggtgacgcatttaagcatgggttgaatgaccccctttttgtaaagttgtccctcaatgagtgtgaagtcccggcttcggtgtttgaggcgcttggcctcgttgatatcgctcggatggtagtatccctgcagaaacagggtcattggtgcccgcaagtcttcggtcatgatgaggttgactatgcggtggccctcggtgtcgttggtaatttggaggccctctgggatgtggacggttggcgtgccgatgacatggtagaacacgtcggagggcagggcctcgcctctggcggctaccttggccaatgcgtcggcctcctcattcttggctcgatccacgtgctgcaaggtgaagctcttgaattgtctctcgaggctgcggacagccgcgagatactgcataagtgtggggtcctttgc

SEQ ID NO: 193977 - DNA, 472 bp, Zea Mays
tgaatctgtcctgcatattgccgtggccaggagatatactgattgtgctattgctatacttgaaaatggaggctgcagatcgatgggaatatcaaattctcaacataaaacgtaagaaatattcacctagtgcctagtggaagcgaagccagtgcatcagcttctattatcatgttctacaacttgaaaaagttttggaaatttatttagttgtggctgcattaaatcttcttcctttgcatgttttatctgtctatttatttccttctagtgacatttcgctctcacggtgagtaggccattgcatttatgtgttgagacatggaacacgactgtggtaagaagatgggttgatgttgcatctctagaggatatagcagaagcaattgatgtacccagccctgttggtacagctttatgcatggcagcagctcttaaaaaggagcacgagaaaggtaatgtttggttttgc

SEQ ID NO: 193978 - DNA, 337 bp, Zea Mays
cttccataatcataaccaacagttaatattctgtgcagattctatacaagagacacccaagagcctataaaaaatcacaaacactaacgttaactcatggcactattagtatttaaccagtacaaaaaaataattgcaattcaataatatgataggcaacatttgcataaaaccagagtgcaaaatcatagctgaagaggtggtttacccagatatctactttctcactgataacctccaccaggccatcgtcaggcacgcccccaccaggccggcgtcgggggagcccaggcacgtggacagcgcctccaggaacggtctcctgatcccgctacgg

SEQ ID NO: 193979 - DNA, 591 bp, Zea Mays
gcttactactgagctaagaagttttttaggttcctcagaattttgggccctgtgtaatcgcacttgtcgcacgtgcataaggtccgaccctggctctgtgaacaactcatacgagaccattagaggatgttgagggtaaccatacgttcgtgtgcgtccatgtcccaacgattgggtggcatttttcgtcggccgtaaaagagagagataaaaacatgcacggtggattggacgcgacctatcattttacatgagcaaagaaagacggggaaaagatgagggccgctacgccggtgtgggggaaaaaagtgcttttgcccgcgtacgcatgcacgaacttcagagcacgtcgcacgcatgctgtagcaaaagcccgccatcagcgcagttggatctctttgcaaggcgcacggcaacggcatgcataatgcatgctatcgttcttggacgacactaacgcatgcctatccatgcattgttccatcagtggctgcctctatacattattgagcttcaccagcagcagcagccagctatagctctgcgccgatcgtacgtggcttttcgctcttgtttttggtttgagggatc

SEQ ID NO: 193980 - DNA, 305 bp, Zea Mays
cgacaaggattgcccatggagccacctgccataccaaaacgtgctgctagcaccatctcccaccgcagttacaagcgaagcagtgaacatagcaagaccagaacatactgaaaagaaagaccaaaagcaacatgaccaaaactaccacactattgcctgtgcccctcctaaaggtctcccaataagcttcaggaggccctttgctctagctgagtaccaaaggatgcactcataagttacagcttgcaacaccgttgtaaggcttggagtagagccgttaaaaacacagttgtcctgtcccaagc

SEQ ID NO: 193981 - DNA, 371 bp, Zea Mays
ggcagccaaagggaaactttctgaaaagcctgtttctgacgagtcaccacaggtatacatctaagatgttcagtatctaatgttctatagagtgaggtagataccataagtttatattttcttatttttcaggaaacttcaaaggtagaccaaaatgtcaattgcctaggccaagaaggtagtagtccaaacagtactccgacaaccgccattagcaatggtgctgctccagttgacaatgtcaaatctccagatggaccagattcttcaaaacagaagcaagaactgacttctggtgacgagcagacaccagattcttctaaacagaagcaagaactgacttctggtgatgagcagacaccagattcttc

SEQ ID NO: 193982 - DNA, 444 bp, Zea Mays
gggctgtaaaggggtgagacaaagccagaaagtgtccatacttggaaaaacgatccaccaccaccaggatacaatccactgcaccagacttcggaagtccctcaatgaagtccatggagatggaatgccaagcatggggaggcactggtagaggtgccagcaatcctggataacgagatctatccggtttggcctgttgacatgtgctgcacgactgaacatacacacgcactgcctatttcattcctttccaatagaacagttgcttaattcggctgtaggttactggaaaaccagagtggccgccaataggtgaatcatgaagggccgaaatgatttggcgttgtatatcctccgaactcccaagccacactcgtcctttatgtcgaatgactccctgagatagagtgtatggggtagcaacatccgtagagacgaccagtt

SEQ ID NO: 193983 - DNA, 325 bp, Zea Mays
gttattttactgttgagttgataaaattattttactgttaagttgataaaatttggcttgacgaaccatttgacatccaaagcatactcaatccaaaacatactcaatttagtccttaccgagaggccgagcggtgaccagggcatggtggaccccgagccggaacgcgacaacctccaattcatgaatgtagccggcgataggcgtcatccgggaagtctaggcagacatctccctcaaccacaaaactccgagatgactgcacacgaggtctatggccgcaaacagaccacggtgctcagcgtcaagagctcagaggcggtca

SEQ ID NO: 193984 - DNA, 373 bp, Zea Mays
gcttaatgaaattctccatgaagttaaaaggaaaaatcaaagtggagtagttttaaaaattgattttgaaaaagcttatgacaaagtgaattggcatttcctttactatatgatggagaaaaaaggttttggtagtaagtggtgtgattgggtcatgaggatcgtgagaggtggtaaagttgccatcaagactaatgatattctgggcccttatttcacaactcacaaaggggtgaggcaaggagatcctttttctcccctattattcaatttggttgctgatggtttagcttgtatgattaagaaggctcgggaggaaggtctgattgaaggtctgattcctcacattattcagaatggttgctgttgtttg

SEQ ID NO: 193985 - DNA, 348 bp, Zea Mays
gttatttttgatgaaggtacataatggaaatggggagaagagcaggccatgaatgatgatttctatatagagttcatggaatcaggaggggttgggacacagcagcagatggatgctccactgtctggtccaacggcaagtccgcagtgcagaggaggcactggaacattccctgcagcatcaccacctgcacaccatcagaattcaggaagtccttcacattcagctccaccgggtggaactcacgggatgtctggttcagggtcaggtaactcagtctcatcaccagcatcgccggaacgattcacatccccatcaccgccacaaattgcagaagaggacctcgac

SEQ ID NO: 193986 - DNA, 719 bp, Zea Mays
tcaagagcgcctgacagaccaatctaccttgttggagagtcagtaggagcgtgcgtcgctctagccgtggctgcgcgaaacccaggcatagacctggtactgatcctagtaaacccaggtcagcattgtgtttctctggactttcgagtgaatgatatgactcctcgtttctgactcctgctggagtcttgggccggcctcgtcttgcaggaacgtcgttccacaggtcgcagttgcaaactctctcggccttcttggatctggtccctgaacccttccatttgaccactccacagctgctaaattttctgacaggttttcttttcctttttttttacttctctacattactttcttagggtttgtacaccaaaaactattttttgaggaattcttctttgatttacttgggaggcaagtacttttgcccaaaaaaaaagatggatgagactcaggcattgtctgtttcttcagtgtataagacgcattcgtccctttgctgtcagatatgcttcttataattcttcgcttcctttcaaaaaaaacatatacaattgtttactttacgtagcacaatgtctagggatagtgttgaaaatagcatcaaaagtgtaatcctttgatatgcatcttccgagttagttcttaccatagtttaacaactttattagggaacttgatgaagatgccagaagcttttgttggacgtggcctctctc

SEQ ID NO: 193987 - DNA, 290 bp, Zea Mays
gttctattgaattgtgtgtgttctgaatctgtcgtaccccttcatatttataggggcggaggtatatacccattcctaggcggatcccaatagtttcccataggttatttagataaccacataagggattaggattcaggcctgaattaatctaaccgcagacagtccatgttactcttgtagactatccggggcacgcaccgtctaggccaagatgccggaccgtttgtccatccaagttccatattgtgtgttcaacagggggctcctaatactctctttggccttgc

SEQ ID NO: 193988 - DNA, 651 bp, Zea Mays
gcaactgttacaaaaactgcaacagcagcagcagtcgttgctatcacaaccagctgttactcttgcacaattacccctaatccaagagcagcaaaagttgattattgatatgcagcagcagttgtcaaattctcaaccactttcccagcaacaaacaatgccccaacaaagtattcaagttccatcacgggcaacaccaccaccaacaacaaccgtgcaacaagagtcacagcaaaagcttccacaaaagcatgttgggttcactgacacatcacataccaccattcctccgactacatcagtcaacaccatttcagttgtaggaagtcctctgatggcaactggtgccacacattctgtagttactgatgaaattccttcctgctcaacatcaccttcaacagctaatggcaaccatattgtgcaaccagtcctcggaaggaaccaactatgcagcatgatcaactatgagaaggtgcctcagtctactcctatgtcgatcccaagctccctggaagctgtcacagcaacgccaagatcaatcaaggaattgcctaagttgaattctaatgtcaagcaaagtgtaatggcttcaaagctaccaaatgcagggcatgtagctcaaaatttgactaacaatgcacccccgac

SEQ ID NO: 193989 - DNA, 1441 bp, Zea Mays
ctgtaacagtggtgctgatataagggcttgcttgagttgaagaaatgcctcctctgccctttccgaccaacggaacgcctcacgcttgagaagagccgtgaggggtgcagctatggtcccataatccactataaacttgcggtaatagcagtgagacccaagaaacctcgaagtgcccgaatagaccgagggcgcggccaaacttctactgctgccaccttatccaaatccatagaaacgccctgagctgaaataacatgacccaagtaagcgactgatgttttgccaaacgaacacttagattgtttgactgataacttgtttgctcggagtgctgtaaatacttccctgacatgttgtaagtgcgctgcccaggaagagctgaataccagaatatcatcgaagaagaccaggacaaacttccggatgaagggtttcaggacatcattcatgagggcctgaaatgtggacggtgcgttggtgaggccgaagggcatgactagaaactcgaagtgacctcgatgagtgcggaacgctgtcttctcaatatcatctgggtgcatgcgtacttggtgatatccactgcagaggtccaactttgtgaagaagcaggcaccgtgtaactcatccaagagttcgtcgaccaccggaatgggaaacttgtccttgactgttttggtattgagggcccgatagtcaatgcagaaacgccaggctttatcagctttcttcacaagtaacactggagaagagtaggctgatgtgcactcccgaatgatgccttgctgcaacatgtcttcgcactggcgctcgatctcgtctttcaacaattgggggtatctgtagggccgaactgcaactggtggcgtccctggcagcagcctgatgtgatggtcgtgacgtcgaggtggcggaaggccacgtggttcagcgaagatgtcggcgtaggactgcagtaatgcctgtagtagttcgcggggttcggacagggctgcgcactgagtatgtggcgcacccagtcctacccaacgcaccttgcgtcccaggcgccagaactccatggataaggcgttgaagttccacaatatgggtcccgatgaccgaagccactggacccccaggacaatgtcgaagccggccagaggaagaccgtagcaggtgatgtggaaggtctcctcggcaatagtaattcggagcttggaatatatcccgctgctggcgacgttgtccccgtttgctaccttgacggagagacccggtcttggtgtgacttggaggcccagctgggtggccacagcttcccggatgaatgtgtgggtagagcctgtgtccaccagcgccaccaatgtccgatccttgaccctgacctggagcttcctggtgctgctgatgtcaatgcctgtgagggcatgaagagaaatgcccaggtcttctgctgctg

SEQ ID NO: 193990 - DNA, 409 bp, Zea Mays
taagattcttaataagcctaggtgagactagaacgttattaagagatggagaattggtgagggaagtgttccttgctgtagtaacagggagtaaggagccatcaccaacaataatggaagaaggaacatgatatcgcgaagtagctggatgagtaagtgaatgaggatcagaggtcatgtgagaggtagcacctaagttgaagtaccagttggtagactgaggctgctggagagttatggtgctgaacgtcaaggtgagcgactgttgatcctaggaagtagaaaatccagacggcggagtggtcggcggagtgtagaagcctggtggtgcaaaaacaccaagtgagggtaggggtgccccttgaagatgaccaccatagtaggctaaagggaggggaccttgtggctg

SEQ ID NO: 193991 - DNA, 529 bp, Zea Mays
ctaaagcatagtccagaggccgacaatgttgattgggttgtaatcttggacgcagatcagattattcgagggcccattattccttgggaactcggagcagagaaagggaagccttttgctgcttattatgggtatgtttttacttgttcagctattaactctgtattatccttttctgtaccaaggcagttttaactaattggaaagggtggcactccaaccaatcattgaattatccattggttccaatattctgtaggggcattgagtacctatccatctacttgggacttaactttgtttggaatagtggttttctaactagggacattgaagaacaatatgatctcggtggcagcagcggtggcagatccttagctggtcgcctaaacccgaccattgatgtgttggtggcacatgttgtgtcatggctccaactctacgacaatggaagcttgggtggcaatcggacgtcactgggcatgagtcgtgggctggtgacaggcgcaacaaagactggcagcttgag

SEQ ID NO: 193992 - DNA, 339 bp, Zea Mays
aaacgatgcatgtgggcttacctgcaagaagctgcgcatgctgctgtcgcccacagtcaaaagttgcgatcaatgtcctctaccgaccgtcgcaatgtgttaccctgtacaacacaatttgcatcaaacatacaatttatacatgtcgagtattaaaatcgagtaaaacttaccactcgatctaatatgggtgccgcctccacttgggttcccagtcttgtggacaggtcgtactctgtttcttcatcgtcagaagaatcaatgtcggcgtagtcttccgctgtccactgctggcgaagcttacaacgagtcgcaccctggtacgaagcttggtaccgc

SEQ ID NO: 193993 - DNA, 429 bp, Zea Mays
atttgaagaggtagagagtataggcttgcaaagacctgttgaagcaaacttgcctctcccatcagatactgcagtgattatgtatacgagtggaagcacaggaatgcctaaggtttgttcaaatcctagtatttcaacattttcattttgattctgcagcagatatgaaataagctctctttagtagtgttcatgttcgaacacttcagaatgcgtacacttatcaatggttatttttgagataatctactctacagatccttctgattgatgcaacattcttgtttgtataaaatttcacagggagtcatgatgagccaccaaaatgtcttggctgtagtttcagctgttatgacgattgtgcctggtcttggcaagaaggatgtgtacctggcatatcttcccctagcacatatccttgaattggca

SEQ ID NO: 193994 - DNA, 341 bp, Zea Mays
gttcatcaatccatcatacacaagaacatagggtattacatatagcgtgacccgaacctctacaaactgcatgtgttctagtaaccaggctacacttagcatcaacatacatctaacctacgcccctacctctacccacaaactttttcctcttcttttggtatgtgcggtacgccggtgtcatatcgtgacaacaataagcaacaataacttgaagctgagcactaactgcttggcagcaataatccgaagctgagcactaactgcttggtgagttaaagtttacattactagcaacacaaactttttatctttatcatcatcatatataagtacagcac

SEQ ID NO: 193995 - DNA, 468 bp, Zea Mays
aacgagctagccaaggtgaagactctttcacggtggcggaaaatagatttggggaaactgagcaattcgtgggctcaggtgagtaattggaggcacgagcgggtggattggatgctggaatacctaatggagctgagggggctcaatttataggacacttgatcagtggctcatgaatttgaaggagacgtgcagcggccggagagggggaagagtactggcgcaagcgattggtggcatttatcgtggcgggctcaccagcgatgaccgggcgtgctagagcaaatcactacgacgaagtacagcgtctaggcacgtgtcatccgagcggcaaacacctaactccggtgaacttatccacaacggctgtgacccaggcgggtacggcggtcggagtaaaataatggccgaagttcattcacgacgcgatatttccttacccatctgcattatctaactgcgctgagc

SEQ ID NO: 193996 - DNA, 641 bp, Zea Mays
ggggacggagggtcgggcgcaggctcgtacgctggctcgcacgccgactcaaacggaggaggcgcaggctcgtacgcgggctccgacgccggctcgtacgctggatccaacggtggaggttcaggttcgtacgcgggctccaacgccggctcgtacgctggatctaacggcggaggttcaggttcgtacgcgggctccaacgctggctcgtacgccggctctaacggcggaggcgcgggttcgtacgcgggctccaatgccggctcgtacgcagggtccggcgctgggcctcactggggttctggtgccggctcgtacgctggctctgaggctggctcgtacgctggctctggcactggtccatatgggggttctggcgctggctcgtatgctggggctcgtgctggctcttacgctggcagtgggcacggcaagtgagccgtgaagcgaccttgggttggaggatgcggtgcacatgttagttcttctgtagtcgtgtgtttcggctagcgctaccaatatttgtgtttgtgagtataatccattatgtgcgcatgcatgtactgtactataaaataatagagacctcaagaaggagaataaggtgattgtcaatgtataaaatacctattaatgcaaac

SEQ ID NO: 193997 - DNA, 425 bp, Zea Mays
aaaggatgtgacatctggtaaacatttgaatgctgagagttctctagaacagaatcaaccaagtacgttggaagtggctgcagtttcagtgaaatcatcccctatgacggaacaaaccaacactagcatttcacatttggcattggaaaccaccattatgggtgatgcatccatgcattctgtctcaactgttatcagctttgccccaggctcgtatgaaatgcagagtgaaggagtgctggctgaactagaagctggaaagactttgcagaaatcacaatcttctgcctccaatctttctgatagaattgacttagcatggactggttctggtcagcttgttaacgattcatcaagtagcatggaggcagtttcattcatacctgctagtctgaaggataatcctgcataccagaaggttatag

SEQ ID NO: 193998 - DNA, 603 bp, Zea Mays
aaaatgggcatacttcgagaagcggtccaccacaaccaagatagtatcatagccactggacttgggcagtttttcgatgaaatccattgcaatatcctgccaggcgccttgaggaaccggaagtggttgcaataaaccagctgggtgaactctctctcctttggccttttgacaaatttgacactgtttgacaaaatcttccacatcggtcttcatgcccttccaaacaaacaatttcttcaatcgatgataagtggcgtgcacccccgaatgaccacccatggcactgtcatgcaatgctgccaccaacttcgtccggagagctgaattgtggccaacccaaattaaattgcccttcctgatgactccctgagaaagagaatatccatactcatccgggctgtggacacacaaccgagtcagcagtgactgcgcatcagaatcagtcacataagaattggtaacttcttgaatccagcgaggttgaacttcactgactgctgtcaacgccatcacacagcccacccgagaaagagcatcagcgactttgttctccttgcccggcttgtagaccactttaaactgcatccccataagctttgc

SEQ ID NO: 193999 - DNA, 463 bp, Zea Mays
agcttcagggatgggtaccaccaccaatgtttcagcaggagcagcatcagaagaatccccagccaacatatccagcatggcacctatctccgcatcactgggatccaagggcacttcaaagtggacctgccattcgtcatcaggaatttctccaagcaaagcaaccaaagcactaacttcttcggcagagggtcgcactctaaggcccaaaccgccatcagcagaaggaggactcgacacgaaataagtaaaggctttggaaggaggcaggttccaggtcgagtatgcaacaggggcgccaacgtttgataccttgcctctaagtatcatttcaagccggttcaccaagtccagagcagggattcttctattggtgacccgggttgagtcagctagacctcgatacagataggccgggtatgccctgtccttcagtggctgaatattcttgaagacaaagtca

SEQ ID NO: 194000 - DNA, 416 bp, Zea Mays
gctccattgaatttgatccctttggcctttctgtgaaggatttgcaaaccaggaacgtgatcgccaagtgcaatagctccggtgacctctacccgttccatgcaccctacaccagcacctctgcattactcgttgtacccacctccctgtggcatcgtcgtctcggtcaccttgggcatcaagccttgtccaaactcattacctccagtgtcatttcctgcaataaagatgatgtcaaccacatatgtcatgcataccaacttggtcgtcatacacgtttgccgttcaattcatctagctctcgagcttctcacaattttgatttaatacactgtgatttatggacctccccaattgttagtgtgtcgggctataaatattatttggtaattcttgatgattgctcccactacatt

SEQ ID NO: 194001 - DNA, 511 bp, Zea Mays
ctttaccatttttgccagggccgaaaggggatcctcgttcctgatcgcccgatcgcctatcgaccgccaggattagatgcctactcgaccgaatcggtattcaataccgattgacggatcgaaatccaacgacccatatttcctaatacactgacaccctctgatcgaccgatcgcgatcctacggttgagatgattcttgcgaaggggtacgcgcggcttctaatctaaaccgtcagcatcccatccgacggcgcaagagtgtcttctaccctggttcacctgggacacggcggtgcctgctccattcacggcggcggatcgtcggagccacatgcccttccttccaaccgcgccctaaaatgacacccgccaagtgctacgcaaagccacggtaaatccgaatggtagggaggggtagttacccaagttgccgcggcgaggtagactaatccgcggcgagggcggatctctggaatcacgcgacgtccgatgagcaatctcgtcgctcc

SEQ ID NO: 194002 - DNA, 533 bp, Zea Mays
agctagccttgacgatcttctcagggaatttggggacaccttagaaagggagtttggaagcaccttagaaaatgctcgctcgtagcgtgatctaggaccattgtatgcttgtaatgaacttgagtgatgaataaaataatgtgtttgaaaaaaatatggcatgtgcatagtagtaatcctttccccctggcagatggcttcggataaaaccatgcctaccgcctcaggtattggagcaaggtctcccctagatgctaaaggagaagtcagtggagaagggagtgaaacccacctccccggacctccgaagctgccattagacttagcccaagttctggccaaccaaacccgactcattgaggtcctcaccagaagccttgagaaccagcgcccgaatggtggaaggcctcaggacaggatgggagattttctaaggctcaagcccccccacattcgctagatccagcaacccgctcgacgctgatgactgactgcgcacagtaaaaaggaagttagaggccatcggatgccct

SEQ ID NO: 194003 - DNA, 927 bp, Zea Mays
gcagggtctggatgctgctagtgcaactgtagatgatatggatgagtggctacggattttcaatctgaagctgaggcacatgagagaagatattgcatcggtatgtttgaggagttttttagctgtctgatttgaagcggatatatatttcttctctagtttatttgttttactgttagaagcatagctatgaaaagttgaaaacagagactaccagtttgacatgaaaagccaggattagtgattggccctatctggtatatggagtttactgataagtggaaatcagtgggatatagatgttaattgaaaatattcctctgcgcctctgtagatcaaaccccattatttgccattcaaaacccaaaggatcttagcacccgtatgctgaatacacatgcatccagaattatagcccttctgacctgattgtctgactcttctgacgacatatctgtctggcttttggggtttcagaaaaacttaagaaaaagacaacctatcaagctgagtaatactgacaacctgtactagtttggtagttgtaactagcacctgagctacaaggtctgttgaatcaactcaatactcacttggaatctgaaggtcctgaattcttgcttgcttgttatcatcggtttcagaattttggtagaatccttcctttggcatcagcctggcctcttggacttgtcattttgaaaaattaaatattgtgcctgtttttgtggtccactggtcctgctgcagtcatttgttagcagaagacacaattttctagatgctgataagaaagaacttcactaattggtcccctactatctaattttgcagattgaatcacgtaacaatggcttggagatgcagtctgtaaataacaaagggcttatggaagagctagataaattgcttgagcgtctgcggatt

SEQ ID NO: 194004 - DNA, 456 bp, Zea Mays
actcagccgcaaagagggagagagggcacaggggtcaccggagtgatcgccagcgcatgggcggtgaagatcttttaccccgcaaggttatccattagctatgagcgcgaacccggacggcggcagcacgaatcacggcggagggagccgtcggcggtgaggacagccacgctggtggtctgatccctattgagcactgtaccatggcagtcaccaattcagagcgactgacagagcacattggagcatcattttctctgattttcagatggcaacacacccagtgatctatagcaaagttgtagtgctataatccatctatatcttttctataatgtgtactcacaaaaggtcactagatccccttcaaaatcgagctcaaagttcatgtcataacactgttaatctgcatttcagacttcaggcagcctgacagtccatctttgattgggtttt

SEQ ID NO: 194005 - DNA, 276 bp, Zea Mays
aaatgctgaatggtggttgtgttatgtggctgttgggatgtgttctgcgcagtgagctgttgggaacatgggatggtggctgactggttgtgttctgtctgtggctgctggagtgctggtgcagagtgcttgtgtagttctgcgtgaatggtgcttgtgcttgtgtagtgtagcagtgagtcagtgacctggtggctgctggctggtgagcagtgagctgcgtgaatggtgagaagtgagcactggcaagttgtgtagttgtgtcttgtgtttgtg

SEQ ID NO: 194006 - DNA, 311 bp, Zea Mays
cttctctacacttggccttgtatgaagtatccatgatatatagcagagcctaattgggctggaaggtaagtttcttttaatgtttgagttctcatctttagatgaaagacaaatgggacaccgttgcgttttcaagattataaggatgtaaaacttttaaatccgatttactagctcaatgaatatttcactttctttcccttgtcaaaatctcttatcctgggtgttaagcactgcgaactttggcttattttgccttcttgtttttactggatcatacacgcttccattttgtacctgttcgttggagc

SEQ ID NO: 194007 - DNA, 644 bp, Zea Mays
actttcgccttccaaattggtaatagattgcacttggcataccctccaatgaattgggccaaataggcactcctggttgaataggcaccatcattggtccagcgccagtaaatggcgtcctcaatcactggatttaattgcacctcgcgtagagcttcccagagagccacaaactctctaatttccttggccccaacaactggagaaatgtggaagatccatctgttatttgttgtggcttttagaactgaaatattcttccgtgaggacttggcaaagagcgtgggagctatcaatcgtgccgacgtgccatcgatccaacacgaatgccaaaaagaggctttaaccccattgcccactgtcaccactgtagacgcatgaaagagatcccgatcaaccttgctacagggaatgtccaaaccgacccaagctctttcttgatttttccactcaaaccaaagccaacgaagtcgtaaagctcttgcaaaacgctccagatcgacgattcccaaaccacctaggttcaaagggcgcttcactaacggccacctgactaggcagtgtcccccagaaatattttctggttcctctcccttccacaagaaactacgacgaattttgtcaatttgcttgaaaatccacct

SEQ ID NO: 194008 - DNA, 399 bp, Zea Mays
gtaatcgctagtcctttacctgagggctataaataccaatccatgtcatccatttgtttagtacaagaaaccctttgaagagaaagagagagcctttgtctagtgacgtgtttgagctttgataatcgcgagactagggacctcattagtgcatagagagtgacaagtgtgcatttatgattctcattaggtttgttcaggtcaagtgagattttgttcttattactcttcgagatcgacatcacctacacagtttggtggcgatcgagagtttggtgatcactcgatggagagtgtgggtggcccaactcatggtgtaaatggtagttggttattgactatgctagagtgtttaataatcgacatgtagagagcacttgatatttgagcgtattaatg

SEQ ID NO: 194009 - DNA, 1889 bp, Zea Mays
gcaagccgtacccaactgtgtccacagcccactcgacgcccacctcatctcgagtcgcctctagctcgatctctcttgcggcctgccgttttcgtctctcggtctctccttctgagtcgacaactcgacaccaatcccccaatcacaaaccctaggccgacaggcgcaacgacgcgacggtgcaacaagcggacaacggcgaccgcgcggccaccgcttagtgtgcgaactctgcagcgcgccagcggaagcagaggaggcgtgcagcatctggcgtcccggcctcccggggtcgagttcgagcgccgcgcgcacacgtccgccagatggtgtgtagtagcggtggttgggaatatctaatcacccaaatcctggtctgacactgttccactgatagaatcagtatgtccgacgctgagccacctcctgcaatggaggaggccacgctgacaacgccggatgttgtgctaggcgagggatacaaagatatcgagggtcagaaggatggccgaacttgttatggtgaaggtggcgatgttatagtggctgatgagttcgcgggtattgttgaagaccccaaccaacccgatgtttttaaggctaaagagccagaggagggtgttgatgtaggggggcaaactaatgtcattagtgctgctgtgcatgttctcacagaggtggatgctgctgtgtcatcctccacactggtggatgatcccatggaggttggcatgcaaaccaaagaggttagtgctgctgcggatgatctcatagaggtgggtgctgccctggtaccatctgcacaggatcacacagcagtggctgcttgcctggttaatgatgactgcaatatagttatcactggtggtgtgcataggtcggatgaccaaactgttcaggagtttgggggtgactcccttgacgctgatgaggttgctcccttggtaaatgatgtacaagatgacagtgcaaggattgatatggatgttgcagctaatgatcatgtgcatgctcaggatcaggaaagctcacagttggatgtggctacagctctgttaaatgaggtggaaacagagattgccgaagctggagaccatgttgtacaggactgcacaaatatggatatgcagatccaaactggagatgacaaacatgttggcactattgcggacactgccacagatgaggagggcaagcacatgggtgaagataccatgggcagagatggtagtgagaaacatgatggggcagtcggtgttgatgtgtctgatgagagggtagaaatgggtaggggtggactgtctggagatgataacgagcaaaaggaagttgcaacagctgatgaagatcgtgtggaagaggaagacatgcaggtggatgccgtaagcattactggagacatggttgaggaaggcagaattgctgttgaatacattgcaggcgaagctgtaaatggcaaggatggtattgatgtccctgaagaaaagactcctcagatagacaaggctggtaatgatatccctgaagaagagggtctccaaatggggggagctggcttgattggcaataaaaatgggccgaaagaggctgtgatagctgattaccatggagtggaagaaaataccatactgatggaggcagctaccacgactaacaatgatgatgatgatgacaacaaaattgttggtgaagatgttgcagaagctgtcaatgacataactggtgatggtgtccctgaacaagaggctgcacatatggatgacgatgatgacgatgagccacctcctttagtggcaaagaaaggtggagggcgtcgtaagaggggccgtccatcttccaaggtccaggctgtggtgaaaccatctgtaaaggggaaagatgaagaggag

SEQ ID NO: 194010 - DNA, 530 bp, Zea Mays
gcaccaattttcttaagtaaggtaggcctgttcttatggaaagaggggaggaacttggctcagtagtgaactgaagaagttcagaacagtccaaatccctgaaaatatctccatccactaactactccaggctcggtttgaactaaaggaactcgttgcctggaaggggggtcacttgctacaactccaccatgcctgggataaacatggagatataaaaatcatcccctagctgactcagctgcttggatgcctctttgctgtcccacatgcagaaaaaggagttggccacagctgctgtcttccctgtgctttctccatacgtggtgctcatgcagaaggattgggagacatattagtgtcgttggactcttgttaaactctagtaaagaccccagcagctccagctctctaaactatttaccttggtgagttatggcaccaaactgaacaccctgtgtttccatcggtttcccgcctctctcaccgtgccataccatgacaggagggtacaactccctcattctttg

SEQ ID NO: 194011 - DNA, 585 bp, Zea Mays
gctgctaaaacaaggcttgaattggacagggacttaccagagagggttggtcacggacgaactgttcttggcggcgcggcggactgaattggggagaaacggcgtcgcggtgtactcgggtgaaattgagggcggggattgaggctatacaacgacaagagactctagttttaccgtgctcaaccaatttggaaagagggggcagagatagtgcgaatttaggcatcaatcaactcacggtgtgtgcgaagttcataccccgccgtggaccaccgtgctatttatagccacggcgacccggcagacgatctctggccccggatagctttgctagtgcatgcctaccacgtcggtagaagacacagtaagggaggtcgcggcatgggtgacaccgcggcaaagttactgggtcacggtggccgtcggtgaggtcttcggctggactcagggaacggtgccacgtttgcgccgtttaactctggcgttatctattccctaccgcccacgaacccggacggcggcggcgcgaattttggcgtagaaaggtcgccggcggtgaggacagccgtactggcgatctcatcc

SEQ ID NO: 194012 - DNA, 767 bp, Zea Mays
caagcgtgcagtgccaatttaaattagcgtcgatttaaaccgactgctccgctagtagggcgtagtggtcaccccgagtttagataagcgtgagcatgtcgcactgtcttaagtcatcgccgacttaagccgattgctccgttagtagggcatagtggtcaccccgagttaagtaagcgtgagcatgtcgcaccgtcttaagtcattgccgacttaagccgattgctccgttagtagggcatagtggtcaccccgagttaagtatgcatgagcatgtcacaccgccttaagtcattgccgacttaagccaattgctccgttagtagggcatagtggtcaccccgagttaagtatgcgtgagcatgtcgcaccaccttaagtcattgctgacttaagccgattgctccgttagtagggcatagtggtcaccccgagttaagtatgcgtgagcatgtcgcaccgccttaagtcattgccgacttaagccgattgctccgttagtagggcatagtggtcaccctgagttaagtatgcgtgagcatgtcgcaccgccttaagtcattgccgacttaagccgattgctccgttagtagggcatagtggtcaccccgagttaagtatgtgtgagcatgttgcaccgccttaagtcattgccgacttaagtcgattgctccgttagtagggcatagtggtcaccctgagttaagtatgcgtgagcatgtcgcaccgccttaagtcattgccgacttaagtcgattgctccgtta

SEQ ID NO: 194013 - DNA, 304 bp, Zea Mays
gtaattgtttgtaatagaacaatgacatcaacttctattgcatgagtgcattatataatgtcatcatttgagttatgcaaattgtagttataaataatgcttgaatgtaatgaaaaagcatgtcaaataaaaataatatggcgtgattagatgtaaaacaaggacaaacacatattacatataagatgtgatcatcataataagtagactggatgtgcataacagtaccatataggtaacagtcatacttccaatgtcatacattgaagatagagcaaactgaacatgattgtctggaatgtct

SEQ ID NO: 194014 - DNA, 776 bp, Zea Mays
tcgaaaggaaataagtacatcaattcgtgcttgaggtgatcagcttgaccacaatgttcttcatctctcatcttggcatgctttagtgtgctagtacagtatgtagacagcttatattctaacactgaattgtaataattctggaattaacagcaaactgcagatttcaatattggttaaaaatcttgctgattacatgattattgtgattcttaaagtaaaagaagatgttggatgaaaaatgtgtatgtctttgtcagaataatgttctttttatatatttgcaatggttagcccattttatgtcttgactcttgctagcattctctgataatatgggggcaatttttttccgttgcaaaattgtgcaatcgcttattgtccatcacgggtacatggagcctacctatcactgattatgacaaataagggactgagaaaattcaatgatagggaagaaatttatataatgtatttttacaggttgaatgaggaaatgagaggcttggaaagcttagctatgcaactgtatccttttgttcgctgctgacaaaattagttctattatattctgtggaattggtgagtggccatcttaatatgattctcccaatttgtgtactttccatatctagctgaacactgttcatttcggagctacttgttgaatcttaatattttgaaaggaagattctacggaagaatgttgattcactagatttggctgtcagtcaattgcttcgccttccctagtcaatggatactatcaatgaagg

SEQ ID NO: 194015 - DNA, 511 bp, Zea Mays
accaacttgattttagctttcactaacactcattataaaccaaatttgtgttgtttagagttgatttttgtaggatcacctattcaccccccttctaggtgctctcactaggcaacctcaacagcccacgggccagctcggcccggcacgatggtctaaccgtgtcgtgcctgggcacgccattgttaggccgggccaatgcgtgctcggggccaggctatcccgacacgcctagttggacacgtatactcatgagaaatctacttagacaaagttgtaggtatatgttcttagtgagtcataacatatggtgatgtccaagaaatatatttaaccacacacacacaaagtataaggatcactgaaacgccaaaagcaagtgaaatcgagagaagagacgagcgaaaaacttgtcgaccacggatttcaaaacaaagatttatttattaccatttcgagtgaggcacgttgcacactttgccaaattgcattgatgaaagattataacaac

SEQ ID NO: 194016 - DNA, 600 bp, Zea Mays
gagctaataggcaatccagctccaataaccagacattcatgatctggtggagttccctcatccatatctgcaccgatgccagaaacatgtgccctgaagtcatcttccgctccatacatactggagtaatttaaagacatgctatctgcaagaggatgtgaaataattggttctgccagagcattggcgttttgcgtgttagcttgtgaccacagtatgtctgtttgcatctctaccttctgagggatctcagcaacaccactatcctggtcttcagctataaggtcattaaccaattttgtcttggcttcagcttttggtgaagctacttttggtgtttttgacagtatgtccctcttgccagtacgtggagaaacagcagtaaggacagatgaaaacctgtcttttctaccttcagttggggagagaggctttggatgtgttgaactgaatagtttactggcagctcttggagagaaaggatctgaaaacaatgggctaatctgtctgtcaggagtgattgaaataggcccaggaaatgatggatccaaatccattctgccatcaggaggaatcgcaggagcattctgtggtagaaat

SEQ ID NO: 194017 - DNA, 555 bp, Zea Mays
ggatgatcggagtcgtgggcatctcttgatgctgtttgacgtgtctctggacctggcgtaccactggggtgcttccaattgctcgccgcagctccatggccgccgcagatccgcatgccccgtgggcagccagctctgctgcgcgacgaccggtaaggatccatccattgagttcgtcatctcctcctcttggtgttgcgctagttcaatgcttcggttggacaccatggcactggttcgtcttgcgccggcgaagttgccgccgtggggaggatcctgtgcgccgtcgtaggtgtccgtcagagaggaggatgatgatacatccttggtcgttggatcgggattcaacggtggcgattaggtagagcgtaaccattcgcgagattaaatccgagccgtacgttatccatccgatggccatgggtaggtgcttggcgtggtcggctttgaaccgtaggatagagatctgacagcctctgtttagtaccggttggtggtctgatccgggccgttggatctaatctgggtggctcgtagcaatagataccccttcag

SEQ ID NO: 194018 - DNA, 421 bp, Zea Mays
tatgcaagagtgggaacatggaggcggcatgcgaactgcctcatgtagcaagcagcaagagccatgtgggcttatatcgctatgagtcaacatacaagaacctgattcgagcattggtattgactaagagggtggacgcgctgccaaggcttatactgcaaatgcaagaaatggggcacatcccaagccggagcctctatgtgtcagttgtctgttctttgtgtgaaatgaataggtatgccgaggttcttgatctgttagacaaccagttaatgcggaatgagatccatcccgttgtgtgctacaaccacttcatttctggtgctggtcatgctaagagggcagacatggccaaggcgatatatgaccgaatggaggcttcagggattgaaccatcaataacaagcaacgtgcttcttct

SEQ ID NO: 194019 - DNA, 392 bp, Zea Mays
cacatattgtgctatctctttcttcattcctctccaccagtatctggttttgaggtctaggtacatcttggtggtccctgggtggatggagtaggctgagttgtgagcttcctcgagcaggacttctcatgcctctccttttggtacacacagacggttcttgaaccaaaggactccttcctcatctgtcctgaagtccagaagtggttccttgcgagcttttccataagacctgttgtctcagtgtccaggctttgagccttgcatatgaggtcttctagcattggcttgacatctaggttgccattgtctcccagacatacattcagttgagctgattctttcttccaatcttccaagaagttggttcctttcttcccgaaaggttttcg

SEQ ID NO: 194020 - DNA, 281 bp, Zea Mays
acgaagtggaatatgaggcaaatgtaatcttgaagcaaaaccttggtgaggactgtgtgattggttctgataggacatgtaccaacgcatcattttctgggagggtgtcagtatctgttgctgatgagggagaaactgcccttgttgtatcaatggtgggtgcacattctgaaactaggggtggtctatcagaagcttcactaggacttgagacagcacatgaaacatttaactgcagtccatacccaagccattcaaaagatgtccttgttgcagatgct

SEQ ID NO: 194021 - DNA, 370 bp, Zea Mays
ccaagaggcaaagagtaggtctgtgagaagaggggggcttaagttgtttttagctctatgatgaaatggacactagaagttgtagtttattgagagttaggacagggaatgtgttactcagccaaatatgttggaaaataataaagtcagattaggttatcatatgctagcttggatgatgtggagctatttgaatagatttgaattgcaaccaaaaccccatttgcagccttgtttgtttagtccctgattttgtttctaccccatggctcatgtcctaatttttttaattcaatttgattaacctcttatccttgaatccagaatattgtctagtgccatgtaattttgtagatttctttggtagaat

SEQ ID NO: 194022 - DNA, 929 bp, Zea Mays
actgaatcaataggaaatgggcagaaagtggaagaagataagctggtaaatcaagttggctgaagcaaatagaaaacgaaggttattacctctgaggctgtaatgttgtcctgtcttgttctcatgacatatcgctaaatttgctaggagtttgtgatgacaggaccttgcttttcgacctagggaagtacacatttggcgtggcatcgttaatataatttatatcttatatgcgagttggtatatttcaagtgcctaaatttagatagagaattattagcacatttataagtaagagagtttacttctttctgtactcaaataatgacaaaataatatggtgtctaaacaaatttggacaatcgattattagtataattaaaaggacaacttataagagagaatttacatggtttactgcactcaaacaatgacaggatctatggtgcctaaccaagaacagtaaattaggcataccttataagtaatgcaacaaccgatttaccgaagaacaatatagaacagagctctaaagtaggagaagaaattcataacactatcatcctcaatggagccacagttccctttccctgtccccccacttagataacatcttacaagtaattcacctcacaaatcctctccgccatgttaatcagagcatatactatggagacaacacatgttaaagctgaaactgaggaactaaggttaaagcgctgccttattccaattaaccaaaatccttgccctaacctaatgtctgcatcagcagttcttaagcacaacttaacacacgaaaagagatctagggattggagttcttactggggcctgagagcacaacaagaagcccctaaattggatgggtgtgcgctggacgatgctgtgattggaatatgctagaaatattgaaactaacttgcaag

SEQ ID NO: 194023 - DNA, 295 bp, Zea Mays
atcttctttgcccctctcagtccttcatattctcttctgagtgcatccctctcctccctgaggctactcatctccttggagagatcttgcccacgccgactctccttcacaatttgctttcggagagtctgcaactccatatctgagacatccaatttcctggttaaagtggctatttcacttcttagcttctccacgtcgtcatcctcccctcttaaccctgcctcaccagaattgctcgttgacccatctgtactagcatcaggagctgagcttcctgaccagtcacccgaac

SEQ ID NO: 194024 - DNA, 433 bp, Zea Mays
cgccaactattggacagaggccttgaacactactacccatctcctcaactatcttccctccagggcagtgagccaccccacccccagttcgtcttgtatggcacaaccccctcctatgcccaccttcgtgtctttggttgtacatgctatcccaatacctctgtcactgctcatcataagctctccccccgctccactcgctgcattttcctcggtaactcctctgaccacaagggataccgatgcgttgacctcctcacccatcgcatcatcatctctcgtcatgttgtctttgatgaggaggttttcccccttgctgactagtgactcctccccacccccgacctcgattccctcctcgatgtcgattgcgtcgatgttcctcttttgctgccctgtttcacgtcatcccacgcggccctgtcgaccccgc

SEQ ID NO: 194025 - DNA, 755 bp, Zea Mays
cggattttagtgattcatctggtgtgaagcctctaaattctacaatttattcttgcggcgacccttctttgggttgttcatgtggtgattgcccttcttcttctgtttgcgcgggatccttgctgcctcagctgaatacagaaaccgcctgttcagttaaaatgggatctttaaaggtaggcaatatcttgttacctgaatctatatgtatgatgaaattatagaaggattgggtctagtgtactaagttctatatttatcgtaacagtttagagataccgtaataataaatgcattagaaaatggcacagatcatgtgctgtcatagttgaacaacatattagattcagatgagctattctccatgcatgtgcgcatatgcttggatcatgtacttgatatacaactaagtttacctgtgacaaacaaatgtcttcattaaatctctatgaagtatgtatcacttatataggtgctaagaaactttcccaacatataaattaaaacatcaattctatgggttcacaattttgtccattatttagcaatcttttggatgctttcttaactgtgtggtgtgtcccttaacttatattcatttcttatctacaggccaaatgcttggacttctcactagtggttatttaccttgcactattatgcgcttttctgctatggggtttgttatacagaacacgaggaagaactgcttcccccttgcaagcaaagccattgaggaattcagataataagtc

SEQ ID NO: 194026 - DNA, 381 bp, Zea Mays
attgatggtaatcgcttctggactctccatgttgatttctataattcagttatccttccaaagaagcaccagtctatcctccatcagcgttttattaactagagcgggtgtgaagctattggagatcctgagatgacacaggcattgagggcctgtgagcaaaagaggatgaagactatcatgacattccaatatgattggaatgatgaaatcattgctcagttttattctactctatggattaaacatgctgatgaggaaagtccatacaactttccttatctaaatttcttcattgaagggagctggtataaagtgagctacagaagatttgctcacattctgggatttactgatgaggatatctctgacgataagatt

SEQ ID NO: 194027 - DNA, 376 bp, Zea Mays
tctaacttgaaggtagtagacttgctcggagtgagtagttcagacagaggcaccatgagcgtcgggtagagctccaagttgacgacgaagactcgatcaagaggatgaagaccttgtgtcgacatatggcgcaacaaagatggggacacatgggagcaacaatccagtgtctcaaagatgtgtgtagtgcttggtgacaggtgtcacatgagctgagtggatcgcacgtagtcggttgtactatctgagtacgtcgaggctgagcgaaggcggaagaagttggcggaggcctgttgatctgtggtggtggtgtgagccagctatggagacatgtgaacaagatgaccaagaagtgacgcgggaaggcaccccctcg

SEQ ID NO: 194028 - DNA, 427 bp, Zea Mays
catatcacttgtcggtctttcccctcgcgacatggacccgtaaacgcatcgataggatacgccgctccttcctctggaaaggaaaggctgaatcaaatggaggccattgtctcgtggcttggccactagtcagcaagcccaaaaccctaggcggtctgggcatcctcaacctcgacaaattcagttgcgccctccggctaagatggctttggaagaggtggacgggagaggatcacccttggaaagggtttgatgtgccttgtaaccttgcggacaggctcctctttagcgcctccaccatcgtcaccgttggagatggcaagacagccaaattctggcacgacagttggcttgatggcatggcgccaagaaacctagtaccacacctcttcgagctagtctcaagaaagaacaagttagttgccat

SEQ ID NO: 194029 - DNA, 299 bp, Zea Mays
cttgaccttgttagattttacttcactttgttagttgccttgctgctcgactccattttctagaggataggcaccacaatgtaaattttcttactttcttcattttggtcgctggtgccaaccttccgaatctgaaagtgttggtgacttggtgtattctattgcaagggagatgcaaccactctcagaatggttattggattaatgtacacaattgtgatgtttgtcggcatcaacaattgttcaaatgcgcagccaattgtttcaattgagaggatggtcttctacagagagagggc

SEQ ID NO: 194030 - DNA, 508 bp, Zea Mays
agttgatgatgatctcctctgcgttgagcagaacgtgaaccttgagccaccccctggttcggtcactgttccgtcgcctgtgagtgctcagacagtccggctagataccaaagttgaaggcaggaaaaccctggctgaaaatctgctaaagtctacttcaacgttgcccgctgggacttatggtattagggctggtttacaagcatccaacacggtaactaaggtttactacagaagacggctgtgtgggaagcaggaaggttctctaatttcagagcagctgcctacgatggagcttgatggtgcaccaatggctgttacatctccttgcttggtggatgcttctccctcccatgttccttcttcggatgtggttgagctcactgcgactgtggtagacactcaggtgactccagttgcggtggctcctgcgtccatatgtgggggggactctcgttgttgagcacgaggtgcttcattcacaccaaagacaagccttccttgcgtc

SEQ ID NO: 194031 - DNA, 462 bp, Zea Mays
tttagtttagaaaatactatgagttgtagtagtaccaaattataccgatggccggcacaggcccttgtagatggtgttgttcgggaacaaggccttgaatcctatggtagcgaagtccagtggccactttgaacctgcaggatgacaccagatggggtggattgatcaggagttggaggcgattcatatccatgggaagagcagagtttactcacacttggggacgaaggtgaggatgaccttggagggagctcggggatggaggcaagatgggagtcgaatgaaggggtaagaggagatgtaactgcttgctctgttttttcgctaactgaacagctcgggccattttggtgggaagccattgactcagtcaaactacaccatacggcccccatgatgtagtcccatctagccgtcctgactctatcgtgttgtacctccccaaaggcagctaaggtttag

SEQ ID NO: 194032 - DNA, 288 bp, Zea Mays
ttgcacgcatcggctaccgaaatttaggcatttctcctgaagctcctttaatgacttttgcagatttgaattcttttcgatctcagtcttgagacttgtttcgaggttgttcttttcctgctcagatttttctgactttttgagtaattcattgtttaacctatcattttcggcctggacctcggccagtgagccttccatagaatgaataacgaagtctttcttttctaaggcagcttcgtgttctttagctatgatttcaaggtcttgaatgacgaagtccttctt

SEQ ID NO: 194033 - DNA, 292 bp, Zea Mays
agccaacaggatcctctttgctgtcgaatgtgggaaagggaaggttgtggtggtgctggttgggagggttttgctgcggtgggtaagctgtatggtggggttcggaaaagcctggattggtgatggggagtggaaagggtgtctgatggatgggtataggcatggtagatgtgggtggcagcaaggctgaggttggcggtggaaggttggttgaggtggatgggagtggagcggctgtggtggtgattggcgatgatggtatgggtggcgcggcggggtttgacaagggagg

SEQ ID NO: 194034 - DNA, 420 bp, Zea Mays
gagagctccggtttgtgcctgaaggctccggtttcatgattttcattgacagtaaggaaccgatggcagtgcggagagagctctcaaatcatgattttcattagcagtaaggaaccgatggcagtgcggagtaagctgatttagaagtgcggagagagatatctcctaactaatgaaaaagttagctccaccgatggcagtaaggatataattttttcattggttgagtttgtgcctgaaggctgacagtggatctatttggcatatttgtgctgccatggtgctttcatcagtctaatattatttttccctttacttcagggttgttatgttcaaaatggagctaacttttctttaagcatatgcagttatgcacatgtaaaatgagagcaatggatgattaggagataactacggaac

SEQ ID NO: 194035 - DNA, 369 bp, Zea Mays
cgcgttcgagagacttgaattactctaacgttttactatttgttcgagttaagacaatcaaattagaacgaataatttgacttgcaaattttattcaagtcatttagtgcactaaaattactacaacctattaacaacgcattcttcacgacaatcactcaacaatttgcgttttaaattagacatcacatgagcactactacttttcatccgcgaccataaacatacacatttagactacaataagcaaatcatcgtgactacgagcttaaccaagtcatctattaattcggctaactagctcaacaacataggccgctatacatcctacacgtcggcttgcctcttattatcgcaatccgagacaac

SEQ ID NO: 194036 - DNA, 472 bp, Zea Mays
ggggactaatagggggagcaggaagcgaaggagcaagaggaggaaccacaaagttagcctcgaggagggtgtcctactcagaggaggaggcagtggaagaggaggcggagacggggaagttggactcgttgaagacgacgtgatgggagacgatgactctgtgggtggattgtggagagtcaaggcacatgtaccatttgtgatcaggagagtatctaagaaagagaatgagtggagcgaggcgcaagcttgtggatggaagtggtagagagattaggatagcaggcgcacttgaaccctcgaaggtggttgtaggagggagaggtgccaaagagagcaaagaagggggtggggtgacgaaccgccttggtagggaaacagttgagcagataggtggcagtggccagcccctcggtcgagtagcgagtggaaagggaggcctgaaataacagggagcacatgaacgccgttc

SEQ ID NO: 194037 - DNA, 527 bp, Zea Mays
tcagaaatagagctccttctgggatagacgcaccttgtgatcacaattgatcagccatcccgtcgaccaaagcctgatattgaaaacaaatgagtataaagacagtaacttgccaggagtattgccagaacaagaaaagctgaattacctgaagattagagaagaatgacggaaatcccaagtcacgagaagctaggtggtggctcgatgaaggaatatcaactggggcaatttgaagaacatcaccagggatcaattcaacaccactaacaggcatcagaactccagcatccggtgcgccgacctctaaggcgactccctcacttgaagcaggcgctgctagtacaccactagagtgtggtggagaagacccaacgtggacatccatggaggtatgagaaggggagcccgctcggacacccttgggggctgggttgcagcccgtactgcccatcagagccggatcaccaccggcaacaccctcgggggctgggttgcagcttgtgctacccactcgagccggatca

SEQ ID NO: 194038 - DNA, 298 bp, Zea Mays
gcagcggggtttggggaagaaccgcggcgagcttgtcgctgtgtggcgtgtcgcgccaccgcgatgctgtgccaaggaagaagatgaatgtgtggtcgtggatctcgcgatgaatggtgtggattagaggaaagggtggaagaagccgggactgtaggatggtaaacgaatggcttagatcagattccgcgtaccccttcgcaccgcaggatctagacggttggatcgtaaacatgtggtccagatctgagcgggatttcataaagcgcgtacctaatctaggccgatgggcagagat

SEQ ID NO: 194039 - DNA, 452 bp, Zea Mays
ggaaatgatcaaacagaaggaggataaatacaaatgcttccgtcaggacagcaaagggattctatggtttggagaccgattggttgttcccaagaacctcgatcttagaaagaaaatattggatgaagctcacctttccaaattctccatgcacccgggcagtaacaagatgtatcatgacctcaaatccttgtactggtggaccagaatgaagagggaaattgcgaagtatatatctgaatgcgacacttgccagagagtcaaggccagtcatttaaaggtagcaggcaccttacagccccttcccataccatcctggaaatgggaggatatttgcatggatttcattgtgggattgcccaatacctcccgacaccacgattctatttgggccattgtggataggttgaccaagacaactcatttcttgccagtacataccacccacatga

SEQ ID NO: 194040 - DNA, 1046 bp, Zea Mays
caaccaatgttctaactatgtgcatgtgccacttacctgagaatgatcctatgcgcagtgaggtagtttcacttgcatttattcatatttgaagttaaaaaaacatctgaaaatcctctgtctgattgaaccatgattatacatgccagctaaagatgttccaatacatatagctgaaatggcttatctagctaattatagtatttcacattacaatctgtggttgagtgctgtaaagatctgtcacgccatagggaagctattttatttctttataattttgtttgcatcattttgtaacaggtgttgcacatgaagcaatctttacagaggtatggccatatcatgagtgctgatgagcactacactagatggcaagaggtaacccgatgatatgttctttagctgcatcattgggaatataaatttgttttcttatcataaaggcattttttttctgaacaggtctttctcatcataaattattcttttaactcaaaaatgttgaatgttgttaggtggaagctgattgtgaagatgacccagagggcttggcactccgtcttgctgccaaaggagctgtttccgctgctttggaggttgctgaaagtgcctctttatcaattgatttgcggagggagttgcaaggccgtcagcttgtcaaactgctaatcactgatccacttaatggcggaggcccagctgcagcttcaagatttctgtcaactttaagggattccaatgatgctcttcctgtagccattggtgctatgaatttattacctgacctgcgttcaaagcagcttcttgtatgttgccagacctggtcacatttgtaaatgcactaaaacatgtcctgagatgacactggtgaattctgtttcaggtgcatttcttcctcaagcgtacagttgggaatctatcagatgctgagattgcacggcttaatttgtgggcattaggtctccgtgttctttccttattgccattgccatcacaacagcgttgttcttctctgcacgaacaccctcagttgatcgtagaag

SEQ ID NO: 194041 - DNA, 393 bp, Zea Mays
aagctgagttcaacagccacagcccccgagaattaccttgatggaggcaatgatagccgcaagcagatcgtccttaatgatatgccagcatgacttatagaatctcccggtaaaaccatccggacccagagctctatctgaaggtaggcagaaaactgcagaccggacctcatcctctgagatggggaggtccaatacacctagatcgcccatgtccctgtggcaagatcccaagtttagtgtgaattctctatgtttagccacccccaacaggttggtatagaaatcattcaaagcttcatgcttctgctcatgagaggtgaccacccgatctccgactgtcaaactagagatgaagtttcttttcttgcggtagcaagcctgcaagtggaa

SEQ ID NO: 194042 - DNA, 421 bp, Zea Mays
ctgctacaacagaggcactcaccgatcacaggcacgcatgcatttctcctcctcctcatttgaccgcattactgtgcacgcaacgcatacgacgtgtacatgcatcagcgctgcgctgcgacacacaagataacgtatgcagatgacgaccgtccctgcatacttgcggtacatatacacaagacgacggatgatacaaaatggcggggccaaatatattaattaattgaaagctggctgacgctgcgaagtagtacgtgcaacgcagtatataccttgtactcacttccgctacagagtacatacatatataacacatacacaccgacgccgttacctgtcaggccggcacagctgcatagctagccagctagctagggcacgtacagatcgatgtgctgtgtatcgcatgtactaatgc

SEQ ID NO: 194043 - DNA, 442 bp, Zea Mays
gtaaataactggcccatggatgttatcaaggctgtatgccaggtcccacatgaaacataagcaacttgaagaccttccagtgctccagaaatcctcttaggtatccagtgtcctacatcattgccatgtccgagaaggccaacattgtaagttccatctccccatgtataaagctcacccgttgttgtaacagcacatgtatgaaattcaccacaggcaacaaaatctacattggaaactgtcaaagactcaaccagacgtggacgaacacaatcttctcgtgttccatggccaaggcggcctccagaatcttcaccccatgtaaaaacctcaccatttttcatgaccaatgcagcatgcttaaccccacaatctacatgatacacatcaagaactaaattggactccaatggcttcgggaggagaatgtcaatcctgccag

SEQ ID NO: 194044 - DNA, 728 bp, Zea Mays
aaaacaggaatactcgttacaagaaaagatgggattagaaatatttagatagcagatggggattggagggcacaacacgaaccttccctggtatcttcgtatctaagcaagccctgaagttccttctgctcggttgccaagcggcagcacagataggccagtagaccatctccagatcctgcagttcttgagaggtatcatttgctcaaattatctcttaatcactacttttggaacgcaggaactttgtaggatgatgatatatgaatttcacagaatatagttgaaaaatacaggattaaggaaattatcctttgatgtaaagaatgccttacaagttcaagtatttcccatttgctgtgacgttgaagaaagaaaacaccatatttgtgagacaaagaggtcaatcaaatattaaatacacaacttagttggctggctatatatgacatgagaataactgaaattaaagatcaagcattcgaatgtctagacaacattgtaaatttgaacccatttaaactcaagaataactgaaagatcaagcattcgaatgtctaataaaaccactcattaaagttcagatccataaatacaagtgaacgtgatcaaactaacccttatgaatgattatataaagtgttcccttggtagaacatgcctgtcgaaatcatatccagaccgagacggttacacccttcatcatcaaggaaaaagacagacctcac

SEQ ID NO: 194045 - DNA, 553 bp, Zea Mays
gcctggaaatccttaaatgactcgtcttcttccagcggcagcgttacctcaagtgacctcttcaccttaaggttcgtctcaccatcgaggttcattgtctcaacatagcaaataccatcctcatagctcgaggacagtagcagtaaatcagcagggaagaactggtccttctcaactctgaccacatcaccgacacaaaggtcctcccagtgccggtagtcgaattcgccatcacccttgtgcgtgctgacatagcggttgttcaccttcatgtcctggatgaagcggcgccagtcctccaacccctccttcatcatgctgaggccaacaacaaaggccagcggagcaatcatgctgacgggagagaaggggcacactggggtgagcgagaggatggcggtgaggaggaagtagaggttggcaacgcgtcggaactgctcgaagatggccttggggaagaaggtgatgatgttgtacttggtggtggtgatgtagttggtgatgtacttgagcggcttctgcagggcggcgttgttgcagtacacgacgcgcg

SEQ ID NO: 194046 - DNA, 397 bp, Zea Mays
cagggaacttttcattccagagctgcaagagactataccagcacaccctaattttatgctcttcgctacacaaaacccacctatgctttatggggggcgtaaaatgctgtcccgggcgttccgcaatcgttttgttgaagtgcatgttgatgaaataccagaagatgagctagccacaattttggagcagcgatgtagaattgctcccagttatgcgaaaaggatggttgaggttatgaaagaattgcaaacacatagacaaaatagtagagtgtttgctggcaaacatggtttcataacacctagggatctatttcgttgggccaatcggtacaggacatttgaagggaagtcatacgaagatctggcgaaagatggttatttactgctggcagag

SEQ ID NO: 194047 - DNA, 394 bp, Zea Mays
aaaattttcagtaccatggcgagtggaggttttgtggactggagaggaaacctcgtcaacagacaggtgcatggaggggttaaagcagcatggtttctgcactgtaagtctacacgctaagttccttgtatgatctgtcttccaggcttccagctgaaccatgtttagagtcaattgcacatgggtcctggatgagataattccttattttcaaacttcctctgctccattttttcccctttacagtcctgacatttgtaacaaacatggtgaatgtcccaattttgctgaatctggtcacctacctctgagggacaatgcatatgggagtgtcggactctgcaactacagtcactaattttgttggtgctacatccggatttactttgatagg

SEQ ID NO: 194048 - DNA, 767 bp, Zea Mays
aaccaccatataggtgctggctatataaaagagaggctggatcgtgctgtggcttgcggagattggaagagagtccatcctctatctcaggtagtaaatggagatcctcgccattctgaccacatgcctttgatcattgacacaggaggaagggggaagagtctgaatggaagatcatatgaatcataccttaagtttgaggcaaagtggctggaggaggaagactgtttggaaagggtaaagaaagcatgggttggtgcaatggattcaggagctgatagagttgtggaggcccaaaaaattctgctgagggagctccatgactgggataggaatgttttggggatgctggagaagaggatctgtaaggtaaaaaaggagctagagatgtgtaggaggcagcaaatctgtcaagagagtgtatcccgggaacatcttttgaggtataagatggagcgtttacaggatcaactaaatatttattggaagcagcgatctcataccgcgtggctcacaaagggggaccggaatacacaatattttcatgctgcagcctcagaaagaaggagaagaaatgcaattaagaagttgagaaaggaagatggagcagaagtagaagggagtaggctgaaggagttcattgctaaccattatcaaaatctctttctttcttctgcaggtcattctacggctgaagtgttgcgttctatctcaccacgcattacggatgagatgaatgaagcacttattaagcctttctctcagga

SEQ ID NO: 194049 - DNA, 740 bp, Zea Mays
ccgtccttgcctcgatctaccgggacctccgcgagatcaaggccttcctcatcgccacgggcgccgccgccaccaccggcaacgccgatatgatctcctccttatccgtctactcgccactctacattcttcagctctggatgtgggagcgcttccctgccctcaggccagcaaaggtgaacccactcgttgatggcgatccgcttgccgctcggtggcatgatctgagcaggaagctgaacccggcgcagatacgtgaggccctcagcacaggatgcaactttgtgtggcagccttatgtcagctccatggagcacactgggtgggttcacagcagtgatctagccgaggatgatgaactggcatcgctcgcacaatttttgcacccctgtgagctcgtagggatggattgcattgagcagtacctcccgcaccgtgttgccagacagtttggactggaccaagatgtgcctgcagatgttcaccgtgccaaccaggattgggcgattgcttggcagacctaccagctggaaggtaagaatgtggctttcttcatccctcactctgagcctgggatcacaacacggtatgcacagtggtggaggcagcaacttctgccttctggcattgatgctgctacagcaagtgctccagtagagtggaagacttccaagcgcaaggtgaaaaagacaccagcggccatggaagctgaagctgagaaggagcgtaagatgaagaag

SEQ ID NO: 194050 - DNA, 1498 bp, Zea Mays
ctaagctgtggtggacaatttctcttcctgaatttgcaagtcgcaagaagtatgacttgccacatgttccatatcatgtgtagcagacaaccaaaaaaggctcttagtttttcatttaatttttacacttatttacatgctctcttatcttggggatcgggtatatattctgcaaatttttatgtaagttcactgaaaacatgattgtcatcttttcaggtaaacctggcagaaacttctgctggtaaagaggccaggatacaagaggtcgaagcaaagtttacccattgtcaagcaatttgcaatcgcatgactcaggtatgatatgaacataaaatggatgaattaacacctagatgcagagttgttattttagtctattcactcctttactatctgatacattaatactgttaatacggagcctacccatatgtttgcagggtgtacctgttggttcttatgtggtttgcttttctttatcaggagaaggagctgcttgaaaagcacaatgtctggcttgatgaagaactgaaagcaaaagtgaagaacttggctgaactaagaaaaacaaatatggatgaggaggctcggttgtcagcaagtattgctgaggcgagtctttgtgatctaactcatgatggatagtcattgtgatctatctcatgatggataaatatgatttagaacacatgcgctgacttaatcttcgtgtttcagcttgaaagagagatatctgaatcctctagctccttgaggcgaagcaaagaacgcatctctgaactggagcaaagggtatcctacatggaaaaggtaatttctcatgcagatgattgcagtattactgtttccatctaatcttttctcttcatgttttggtgattgaaggagttgcgctcaacaaaggatactgcagctgctaatgaacaacgtctgggtgctgagctttcaactgtatggtttaatatctcttaattctctctctttgtcgctgatatgtttgcacccttggtgctgctgtatgtcggtacttgactggcgcttagcgcctagagattctacgctcgcctcctgttatctcgttatgcctgttcaccattcttatagttgagtggggctttttgtcacatattaattgctaatatctgatggtcctgttacttgactgaaactcattataaatgcatgtgggaacatctggagtactttaatcatttgttcactctagtgagatgatttaccgagctcatggtgcttaggtcaagaaacttgctgagcttcaccaagaaagttctgaggaatggtcgaaaaaggctggggagctcgaaggtgttattaaagcattagaggtaatggctttgcttgtatatcatggttacatgtttttgtcccccagtcccagttagaaacagtaaataactcatgataaatttcttctacaaactagacacatctgacccaagttgaagatgaatacaaggaaaagcttgagaaggag

SEQ ID NO: 194051 - DNA, 417 bp, Zea Mays
cctggtcttgccctgcaactgtccttgtcactgggaaggacagagcggttgcagaaggtatgtgcttgtcatagtacagttaaaacacactttgaaatgcttacactttggtgactatgttcgtaatccttgagtaaatgttttcgaaatgtcagctatatcaagagggctgtttcctgtcctttctccgtctttgaatgcaacagatttactggatctcttctccaagatagtcgctgtgagctccctcaattaccaaccaagtaacccgcctgtaaattttgctgcttcatgttttggtttatgtggttatcgttggcttcattttgtcctagggctcagatacacagccatggtacacacagttgctagagcctgcatttttctctggtcgtacattgtatgtgatccagcctg

SEQ ID NO: 194052 - DNA, 533 bp, Zea Mays
cggcgacgtcgttgatcatctcggtgatgcagtagggcccgaaatagagaggctttagctttcccgtcgaggcctgaggaagcgaggaggctgcacgctgacgcaggcggaggaggacccagtcgcctacttggtagaccgcctggcaatgtccggcgtcgtagtggcgcttctgaacctgctgcgcctgctctagccaagagcgaatgtcggcgaggaactcgtcacgctctgctatgctccgggcgacaacagcgaccctcgtgtcgcctggctcgtacgatcggattgacggtggatcgcgaccgtacacgacacgaaatggcgtgtcgtgcagggatgtttggtacgccgtattgaagatgaactccgcccatgaaagtcaacgcagccattgtcgcggcctgtcccctgtaaggcagcggagatacataatgatgacccggttagccgcctcggactgtccatccgactgagggtggaatgccgtagtcatgtggagcttggtccctgtcaggcgcatgagctcgcgc

SEQ ID NO: 194053 - DNA, 304 bp, Zea Mays
tcggttgggcctctggccatataaaactgtaaccgcacaggagataaggaatcaagtattattagcctatcatctctctcttcctctctagatcggcaaccagggggtataacccggttgacaaaagtcggcgacggcgtgggggaataaccctgccggcgacgacggatcgcgactacgaactacgtagccggggtcccgctgccttgggtaccactgcccttgacaacctggtatcacggtcacgtcgatcctctcccacccgctccagccgctcctccaccgcagctgctgccatcgctag

SEQ ID NO: 194054 - DNA, 756 bp, Zea Mays
aggaagactctcctggtgacaaaaggccgctctcctgctctcaaactcagaatccagattctttagaaagtgggtcactctcctatcctctacccacttatgaaccatttgtgcatcctgtgggcaaaccatttggagaggagcataatgatccggctctccccataagtgctggagctcactagcatattgttccactagtctccccatctgctttactgcatctgccttgctctgaatttccatcatcaccatcacattcccctatcgagagtatatattactcaaggtcttccagatttgtgatgcagtacgcatggcttccaccctcttgctaacagtgggagacatggatgccaataaccatgcaactatcacagagtttgtcgcatgccagattctccattctgcgtcgagcttatcaatcggctcaacacatgtctcctccaaataatgctccactcccttgcctcctaggagtacacgcactcttctggaccagcttagataattcttactaccttctagcttcacatcattaggcacaagttccaacttcaactcggatgtacttgtatttgccctagaaccaatcaaccctaaccccatgagctcctggatcatacttctcatttcactcatcatctcactctttgtaatccctcctgagccactaccatcaatttctgtcttcttcgcagcgtcctctgcactcattttcacagaagcacagagtcacacactcgactactttct

SEQ ID NO: 194055 - DNA, 588 bp, Zea Mays
gatataagggcatctgcaattaagtgtattgaggggttatctttggtgtggcagcgcttgagcacttctgtaccaagaaatggtctgttagccttattttcattttttttccaactggaccagttcggtgttgatatttattatctgatctaacatatacaggaaacaacaccaaattacctcaatgtttgtcatctccaacttttggtagtttccttgaattgttggttaaccaaaagaccatgatctgctcggacgcaaaatttcttcctgcatatatttcatctatgctgagcccatgtaaagatattctggttcccgagaatctccatgaaaggttgtcctggtttcattcttctacagatacatttctcttgtgtacttattattaattggggtgtaacactctcttgtttctatcatcagatttgatccgcatacaaaggatactattcttactttcatcttgcgctctgctttgaggctccctccttacggaaaggttggttgatctgcaatctcgagtcaaatcactaagtcagtctaccctactaacgtactcccactatcccacacattataattcag

SEQ ID NO: 194056 - DNA, 462 bp, Zea Mays
gcaaactgtggcgcgcgtaaacaggagcaatagctaaccgcgaacgggtccttgacatgcaaatgatttctctttgttacgaggggatctgaggtaggacggagtagctacgactaggctggtggtggtggactggtggtggacggacgccatgcgacatgcgcgcgccgctagattcgatagggcagtagctggtgacgtgggagggacacagccctaggacgtgtgggcccaactctggatgttgttgtaagctgcggcgcgtgtaaacaggagcaatagctaatcgcgaacgggtccttgacatgcaaatgacttctctccgttatgaggggatctgaggtaggacggagtagctacgactaggctggtggtggtggactggcggtggacggacgccatgtgacatgcgcgcgtcgctggagttgatagggcagtacctagtgacgtgggagggacatg

SEQ ID NO: 194057 - DNA, 610 bp, Zea Mays
tttgaagtgagttctaactagcttatgaaactgtgagctatgcattgagagtgattatttcattcatccattataacttgtaagttgatgtgccactcttggaaataatgcaacgaaacacaccacctagatacgaccttggatccaggcttgagtcctatagggctgcactggtacctgctattacccctgtatggccacgctgtaatacgttatggcacactgccattattattatttttgggttgccaatgcggggcctttatttttcgttcactagggttcggagtttgaactgtgtctgatagtgacagctccctaacttggcgtctgaggagctaactgttacggtatgaaaacattgggcatgacctaagttttataaagtaggaagtgagtctagctcaactggttgtgtgggagatgtggtaatgcacccaacaacataggttgatatttctttctcagcttaaatttatgtgcatatttccttagttaaatcatctcatttctcgtgggttggtcacatttatttatgttctataatgcgatgattcaaattatggacaacatgccattttctataatgctaataggatgggcattgttt

SEQ ID NO: 194058 - DNA, 373 bp, Zea Mays
cacctactctcccgtgaatctcgcagaagaccatgccaagcactatttcaactactccaactcgacacttttgtgcccatgtacacgctagggatcaagcacatgcccatgcttccgagcctagcgtcggctctctaccccatcaagagaaatggctatagggatcgagtgtccttctcctaaccaaaagacaacacaagaatgagagccatcccgtgcagctatgccgctacatggcttggacacatcttctctgatcacaacaacagcataaccacccctatactcctggacctcctccttgtcactataaaaggaggagcatggggccttctattggggggcgacaggacttcactgctcacaactcacc

SEQ ID NO: 194059 - DNA, 447 bp, Zea Mays
cgttaatgcagcaataataaactctcccctttggtctcatgtacgcatcctacatcttactcggaatatgaggctttcaggaacaaccttgacacatgaagaacaagaaaaactatcccaattcagtaaatggatgcttgatgtcggagaaggcaaaataaatgctacaacacaagaaggcgaggatgaaccaacatggatagaaataccccatgaactactcttgttgccacaaggtgacaaaatcacttgcatagtttataaaatttatgatgatctaaataaaagttatatgcagcttgagtatttgaaagatcgtgccatattgactcctactaatgatatagttgattccataaatgaatacattgtgtctcttatccctgaagagacaaaagagtatttaagctgtgacaaagtcatcaaagctcccaatactcatgaatc

SEQ ID NO: 194060 - DNA, 742 bp, Zea Mays
tgatattttgacaccatacttggatgtaatagttgggaaacttctattgttactccaggtggatctcacatctagtctttaaaccttaactttaacagtatagacattagacataagcataatgtttattctgttattttaaacttgtatgcttatgatgtagactgggaaccaaatggtgcaagaagctgctttaactgctttagcatcagcagcagattcttctcaggtagatcaggaaatacagttcaatccttcttgttaacatagtaatctaacataaattttcaatcttatttattcaggaacacttccaaaaatattatgatgcagtaatgccatacctcaaggctattctcatgaatgcaactgataaatccaacagaatgttgcgtgccaaatccatggaatgcatcagtttagttggtatggcagttgggaaacaaaagtttaaggatgatgctaagcaggtaatggtttgctagttccccttatattacagtatacagtcgagtccataactctttccgtctataaaagtgttaaaacattattttttgtggcctttgtactcaataaacgaaatcaaattgggttgtaggatgttatatgctatctgttctgtatctgttaatgctattgataattcattttggtgttaggtgatggaggtccttatgacactgcaaggatctcagatggaggctgatgaccctataacaagctacatgctgcaagtatg

SEQ ID NO: 194061 - DNA, 340 bp, Zea Mays
tgatattatttttcactctttttatagcttcatcggccatctcacaatcgcccctcatccagatatcggaatagaacttcccacccatcaaagtagcttcggttgaaggttccttcgtatcgtctgcagagaagatagcttctgtctaggctgcagccttaacatgttcacagccagttttctccaaaactgctgcaacccctcgggcacaggcgaaggcacaaaaatctccatggtcactgagtatttcttcaaaagcttcgacctcttcgccgatccattgaataactccttcggtatcgcctcggataaatctttgctccgatgagtatgcacccac

SEQ ID NO: 194062 - DNA, 628 bp, Zea Mays
ttcaggtgctaggtgcactgtggtatttgctatctgttgatcgccagacattctgctggaagacgaactgcctgaatgaaactggttgtgatcttaagtacctagattgtgacacgacaccaaatgctacatgggcgaatacgactgctgtcttcagtaattgtaatgctagcgataccaatataagttttgattttggcatgttcgagcctgcattgtctaatcaagcccctgctcaaagttttgcgatgaagtatttctattccctctggtggggattgcagaatttaaggtatgtccatagcaggcatttttgtaactatagttcaaattagagtgctatatggaaacttatcttgtgtgttcctttcataaaccagctgttgtttacactgtatgggttagggaccttgacaagaacaacatactgcatcttactcttgattttgcaatcgcactttcacatttaagctttgaaagtttaacctaattcagtatttctttagtgtgttcctctctttttaacttttacagttctaagctaataactttatatatgtggatttgctaatgtcctatatattctttcattctgaaacagctgctacggtcagactcttactgtgag

SEQ ID NO: 194063 - DNA, 391 bp, Zea Mays
tacatggcccggaactttcgctatgccttcaatagctttgcgtggtcgcaggccgtgcggaataagccgctggggctacaaccgcctgccccagacgacgacgaggtggagcacgccgtggacgtctccgacggagagaaggaagagggcgagattgaggagggggaggctgtggaggccttggcctcgcctgctcctgcgcagcctgagaccatcgatttggactccgacgccccggagaagtcagagtcggtggctatcgatggaagtgccagtgttgtgcctgtcccagctgctgaggaagaggaggtgaaccttgatcagcgtgtggggagtatactggaggagctcgagatggtctccattgaggaagctgagaagtatatgggca

SEQ ID NO: 194064 - DNA, 361 bp, Zea Mays
atttggcatttgtgtggaggtggaaggtccagaaaatggaactatttttgtcagctgatcttggagggttgtggttggttctgagactgatcccagaatatgcaaaggattgtacccatttgttccatgtacatgaggttgtggtaaggctggttcaacagcaatatcagagggtatatggttcaagctgtctgtagggatatgatgggtagcagagtgattgctttcatgagaaaaccggttcagaccagttctatcagggtttgtgtgaggtgtttgtgcaatcaggggaggggaaactgttcttgttatcgaactgatgaaatccactaggcatggagaaggttgtacctcagaagga

SEQ ID NO: 194065 - DNA, 361 bp, Zea Mays
atatgacatgattagagaagagcaaggtgcttcagctgcagattctgttcaaaaggctgatactgtttcatctgcgttactgtccattgatgcacaggaagcagaggatatgcggcgcttgtttgcaagtgcagagactgccatggaggcatgggctatgcttgccacttcactgggacgtaacagtttcatcaagtcggactttgaaaagatatgttttcttgacaatatttcaacagacacacaagtgagttttgttgcggtatcaatgagtttccagtctcctttgttttggtagcttatattaatatgttcaggttgccatatggtgcgattcttctcgaagaaggttggttgttgc

SEQ ID NO: 194066 - DNA, 489 bp, Zea Mays
atttaggacaatacaacaaaacacagtgaaagacaagcttctaggcagagatcactcaaaataaatggaaatattttatcaggggcattctcctactgccaagccttcataagccttatgtccacataaggattccccagagctcacttagccagcttggttgtggccaacgagacaagacagacagacagacagatgagccccaagaaagcagtagtactggtactagcagtagcagcaggccatcaaccagagcggccaagcagacttcaatgggagaaatacactcggatttccattcttgatgcaaaaaacatcataatcatcaggctggtataccagaattcatgcccccataacaaaaccaaaagactactagtactagcctcaagaaatcagaacttttttcaaggacttctgcatttctggaaacgtaataatgaaagacttttttttctgaaagcacaatgcaacataattatatttgtc

SEQ ID NO: 194067 - DNA, 712 bp, Zea Mays
agctgcctccacactggtagcaagtgattgcatgcatgggggataggacatggcagcagccacatgcgcaggcttcttccccagacgcagggaccaaggtccaagcttcatcatcgtccgtccatggcaacatcatgtaaaccctaacacacatggatatatagctggattcggatcttgctctattttcttgcgaatatatagatatatagatggatcggaattgaaggtttgctttttttttttttgcttgcttttgactcctttcttctgatttctgaagcatatggtggattatatatactgtggcgtcaatctcttctctggttttcatcagatttttaattttccacggtggatttaatttaactgttcaacatagaatttgctcgatcggaaattttgtctttacataaacttattttttttattggtagcatttccagtatatcattttagtaactgaccaaactaaaatgatgattgataccagcctaatttataattttgcgtgtattgatttgtgcaagtgcagcagaaaggagccagctggaggcggcggatacgacgacatggccgagttcgatcaagcgctcttcctctatcttaacagcagccaggatcaagcatcagttattcaagatcaacctcgtaagccacacacttaactcccttagcttatgcatgcatatacatgcacgggctgtatata

SEQ ID NO: 194068 - DNA, 466 bp, Zea Mays
ccttccgtaatcgccttcaatttcctactactagagagagacggcctcccttcctctcgcttcgcttacacttctcccctccccccaacccaaacccaacacaattcccccgtgttgcctacacgcactggccacgaccaaaccctaggcgccgccgcctccggggccctcaggtacgcctctcgcttacccgccgccgggatttcgccgctgcgccgccgtccgtggctttgaacgactgacagcttcgcactagggttcgttgcgatttcgttgttaggagtgatttatgttttacttttctgtttgtgtgcgtgattggatcagggctgtcatacggggaaggaggaggatatcggtgaggagagaaggggatttatgtcccagcgaggtgacaggggcgaggggcacgccaggagacccggccggtccagcagcttcggcggccaccgcggaggcggagtcg

SEQ ID NO: 194069 - DNA, 286 bp, Zea Mays
tgattatagagtacataggactaacaccctatgtggacgaacaatgttttactacacctatttactctaacatgcccctgtagtcacagtgggagcatcgtaggcggtgaaactggagaagttgataagctaacatcctcttgtagtcataacgattgatgcatcacttatggagtggctggagaagctgatgagtcatcatgcaagatagtaaccctttgtgccaacgtcaaagtagttgagcgtgagagcgcatgagccgtggttgtggatatcatgatagaga

SEQ ID NO: 194070 - DNA, 299 bp, Zea Mays
ctgaaacaacatgctccaaacatgctaccaacattcaacagagaatggaaaaaacacttatttacaccagaagagagatggtaggtcgacatcaggccatctctgaccgctcagcagctaacagagactcaagctcctctctcctcttctctagctcctgaaataccatggttcagcaaatgagaaatgaacaacaatgttcagtatcgacggagcacagaaactgagaagaacaggtttggaaatacactggtcaagagataattacctagctctaaccaacataaaacaatggtttg

SEQ ID NO: 194071 - DNA, 341 bp, Zea Mays
cactgatggtgagttggaaagaaggattatgtcgggaatgtcatttccgtgccccatacattggtgtttcaaatgtggccacatggagaacaaagctcaaagagcacttcagcttgcagtgtgtagacgctgtccaagagcatatcacagggaatgccttccaaggtactgttcatccagattggttgcttagattgtttagtttgtctagttgtgctgttcttatgccgtctaatgtatattctagggacttatccttgttcatccagattggttgcttagattgtttagtttgtctagttgtgctgttcttatgccgtctaatgtatattctagggact

SEQ ID NO: 194072 - DNA, 288 bp, Zea Mays
ggttagggcaagaatatcctggtgtaagaaagtttatggtgaggaagaactcctcgttgggtggtaatgcatctgatgatcgagtttgacttctctccttccttgacgaggttgatcttgtccttttccagtcttgctctttggtgtctccatccgggtttgggacaagaggctaagatagatctgttatgtaggtcaagttgttgggtatggccgagttgatctaggtcactagtttaagcttaagtggatttggagtatggcttaatcctttgtaccagcattaag

SEQ ID NO: 194073 - DNA, 356 bp, Zea Mays
aatgtgctctcagttcagaacttcaaatattgttagctacacaaatttcatcacatattggttttgcaggttttgcaggtttgatctgttcttggtttcatgtaggaatcaaggaactagctgaggtctccttccctcaagatgacaaacaaacagaaaaaactaccctcaaggtgacctaaacacaaagggagctacataataccctacaagactagaccaggttagacactaattgtgattactaatatgtgtatttgccccgctgaccgtaattgactgctcacattgatggttctgctcattggttcaaaacatattagacgagcaagtatggatggtggattgaagtgttt

SEQ ID NO: 194074 - DNA, 496 bp, Zea Mays
gcaacaccaagcccgaagcctgaaggatgaaaaatctcttttcagggaagtatccgggtgtacatctgtgatccaacaggaattactaagtagctgttcagcagtggaccgcccccaagcgtgcaacggaatcccttgtatctcgatgtcgaccagcgacggcaatgcagctgccgttgcatgagccagccttgtccagcgcttgaactgaatatgaaactgaggccctctgagaactcttcctccattgagcacctttgttgcagcatcctcatccgaaagaatcaggatgaagtcctccgggaaggtctgatgaatggacatggaatctgcctcgatctcaaaacttcgtgccacttcttcaatgacttcagagcctaacacctctggccttgtaccaatgatcgtgacaaacaaagcgcggcgaagcgccgcctcttctcgtgccatgtcggggggaaaattcaatacacaagaaggcctggcaaccatgttg

SEQ ID NO: 194075 - DNA, 541 bp, Zea Mays
cggattctgagtcacgaaatgaatgatcatctgatcttgtagttttgggggacttcgtctctcgtaggagggattctttggctgaggtagtgaggttgccctcggattggtccaaaaacgaaaaagttagccctcttcctcaggtccaatttggcatttttttcagaacacatacgatttctgccagtctgaagttttggactttatgtgagctgttgccaattcaactgcttctgctacacgatccattaactgctttccgatccgtgttctgtgatgtttgccctcttcctcagggccaatttggcaatttgtcagaacacacacaggtatggattttatatgagctgttgctaattcaactgcttctgctacgcaatccattaactgctttctgatccgtgttctgtgctaactcttgtcgattaagcgttgctttgtgcgagatatttgaaataatgtacacgccagccaacacgtggcttcgccaaatggtcatggagccgtagaacttgccaaaatgcctataaatacattgata

SEQ ID NO: 194076 - DNA, 391 bp, Zea Mays
atggaattggcgatggcgatggcggcatggagatgaggtaatggggcaagtctccctgagggatgactgcgcatgatgtcgcaatctgtgtttgcggcaaagacatggtgtactggggtccccccatagccatggtgtatgatggaataggggaaggcgaaggtggcatgggcaatagattaatgggcaggcatgatgccgccggggcgctggtacatgacatggcataatatgtcggcggcagtggatgctgctgcggaggaagaagggtggctaccaatgttgtctgtatggttgccacggatcgcgtgagctcatggacgactgctgccaaggactcgagcgtgaggggaggtggaggtgttgtggatgaggatgtggcgggtctggg

SEQ ID NO: 194077 - DNA, 374 bp, Zea Mays
ctcaaagctatgggattcacgaggacatcatcagctgctctaaagcttcttataaatgttggatacttccctgtgcatgtcaatctcgaccttttcaggtacgatgtccgtataaggtacacagatgaagttttgtcagctgcagaggagcttctggtggacagccctgacacagacatggtatagttagttactactcaatgcttccattctatatatgcacatataaattaccccattttgatttttttatcttttcagcatatcaggaaggatctttcaactttgaaagtgtacgccattgatgtagatgaggctgatgaagtacattcttatttcttttaccagcatctttccacagaatgaattgttag

SEQ ID NO: 194078 - DNA, 612 bp, Zea Mays
gaacactaggcaacctgaggcactaattgagccgtgagttgataggtggatcggaggctgacaagggattgcctgcctccgcccccacgctcacctcgcgtcgtggccaccaaggttgcgtccaccaccgcctcaacctccacgctcccgtgagcaacgtggccaccaagcccgtgcctgccacaacatcctcgtttgcctccccgtgggcgtggctgctaggcgacctgctcccgccgttggcaaggcccgactccagtcatcgagatcagtcaccctcatcatcgcacttgcctcatgtttgtcatcctcgacgacgtcggcttgaccaacgtgtcgtcgtactgaggcgcctcgctcgcctccacgttcatcgtccttcgatgccatggcgtggcctcctccaccgatggatgaggtgatgcaggtgaattcatggtgagcatggacttccccctccgccgattggacaaccgaaaatttcatctgtgccttcaacaagggtttcggggtgtccctattcagcacatacatacagggaattccgtcctcccctcacgtccggtgcccgcatatggggatgcattggagacgttgttcccaccttccggt

SEQ ID NO: 194079 - DNA, 371 bp, Zea Mays
cagggagctccgtcgccgtggtctcgcgcccgttctacgatcgccgtcgatccctcgccgtgtctgttgcctcggtgagcttcgtcttgtcacccgcgacccgggacacctctcggttcgccccctccccctctgtttctctcggtccacgctcaccggttctctctctgccccgccgcagctgcgccgtcgtcaacctgtgtcctcgccgtgccccagacgctattcgagagtccccgagcctcctctcaaggtaactgatctaaccccgcccctaatttccccaggtatgcccttaatcgcatgcgattgctcactggagtattccccggtccgccaaggactccccctccgtcgtctggccgcctcag

SEQ ID NO: 194080 - DNA, 386 bp, Zea Mays
aaagtttcgtgttatggtcagttccatgcaagttctttattgtcaaatgtttttagttatgaaatcaggtactccctccgtcctagagtagttaacgttatatgattaaattttgtctctaaatagttgtcattctcacttttccggtgcatatttctcttctaacaatacatcttttttagcaacacatttctatctctatttctctcttgttttttccgcaccacacatctttacttctaaattcccacgtttgaaatctaaaacctaaactaatttaggatgggtggatttggtacagagtgatcacttctttttaatttttttccttgtcaacaaagggcctatacatattctcttttcagatgaattggagttcccactga

SEQ ID NO: 194081 - DNA, 299 bp, Zea Mays
tgccctcgcttgcctgtgcctgcggaggcgttgtgtactttgtctggtatggatggttatgctgtgctggtgtgattatagtcggtcttagcgcggatggtttgatgctgtcgtttctgcttttgttgtactagttcggctgcgcccttaggcggcttctgcgtggatagtcttcgcggtaaacttcgggttttttcgcacttgttgtgctagtccggctgcacccttaggcgacttctgcgcggatagtcttcgcgatagacttcgtgttttttcgcacttgttgtgctagtccggct

SEQ ID NO: 194082 - DNA, 409 bp, Zea Mays
gccatctccaatttcagtacccatggccatctccaatttcagtacccatggccatggagaataagcttccagaacagttcttttgcttgtctggcagtttttttcaaccaaagccatctaacacacagggaccagtttaggctttgaagatctgagatgccgagccccccaagctcctttggcctagcaacttttggccaagcaatgagacaatggccccccttcacatcctttcttcctttccataatttaattcagagatttggtagtttgaaggcaattcttttttcccttttgcccagagattgcatttgccaatcctttattggtctagctagctgctcatcatgtagaagggtctaatacaatgaatatatagagcactgtgttaagataatcagaacaaaat

SEQ ID NO: 194083 - DNA, 606 bp, Zea Mays
cagggccccaacaagacttcgatagctggtcggatcagccaccagagagccgtcatcggaggagaccttgccttgagtgtccactgaagtcgtgcagggcttataatcagccatgccagcgtgctcaaggatgtcaacggtgtattggcgcaggtggagaaacaggccctagggccgacgctcgacggtgatcctcaggaagtggtgtagctcacctaggtccttcatctcctgttggagggaggggatgatgtgctgcaggaggtaggggaaggaggccgtgaggacgacattgtcgacttagaggaggtacgcagtatccaggtcgtgatggaagacgaacatggaggtatccgccttggccttgacaaatccctgtgagagcgagaaggcagcaaagcgactgtaccaagcttggggcaccttcttgagggcgtagagaggaccggttgagcttgcagaccatgtcgacgtgagcagggtccacgaagatgaccgactgagtgcaatatactgttttcgtccaagtgccatgcatgctcgtgagagaggcccgtgagagagccagagtttgaactgtctggatggtactagactttaccatgg

SEQ ID NO: 194084 - DNA, 462 bp, Zea Mays
cgacacagccagccagtagaaatggaacggtcctaaaatttgggcatgaggtaccattttgcgagtcaatggtgtcggcgctgaacattgatgagcagaacggcaacagccctggaggaccaacagcaagaggtgaaaacagggaagataataataaccctggatccggcacaccaccatacaacggtgtgcctgaaaccatggcccccgtcgtcggcaagaacggggcaccagttcattgtaacggggttgccccagtgcctcagtattaccttggaacccctttcatgtacccttggaatgtaggatggagcaacgtgcctgtgatggtgccaggtaaaagcatgcccgaacctgctcctgctccagagagctgcagtactagctcagctgtatggatgaaccctcccatgatgccaggctcaagacctcctcctagtccagcgtttccataccctctcg

SEQ ID NO: 194085 - DNA, 424 bp, Zea Mays
ccaggaaggtggtccaacagtaaagcatcagagggctggggcgattcccgccagctggatccagcgacccagttgccgggtattaggcatatatctatagccggctgtcttaccttgtaggcatatatctatagccgtctgtcttaccttgtataggtgacagccttcctagtttagccttaccttgtataggtgacagccttcctagtttaggagattgtatccttgtacaccaggccacttggctatatatatgagaagtcacccacctgattgggtgtgcggtgctttcccctaaaccaactctctacatggtatcggaggaccaggatcaattcgatccaggccttccttccgctgccctctgcttcctctcctctcctccatgtctgagccgaccttaggcgccagcgccgaccttgac

SEQ ID NO: 194086 - DNA, 696 bp, Zea Mays
gaaaaggtctctgaacagactatagatgagtgcaaatcaattgctgttctttacaagcacaagaagacgggtgctgaagtaatgtctgtgtcaaatgatgatgagaataaagtttttggcattgttttccgtacccctccgtaagtgcagttaatccttgtttctttgttttgtctatggtaaatcagtattccgatctccattagacgtaggatttgctgtacaaaaaatgagctgggcagccctaggcacatatagtgaaagaatgaatcattgcatgtaagcttattttcgtgttgtaaagaagattttgtttattaccaggaaaaattcaactggcataccccacatccttgaacatagtgttctctgcggatcaagaaaatatcctttaaaagaaccgtttgtggagctcctaaagggtagtttgcatacattcctgaatgcgttcacatatcccgatcggacatgttatccggttgcatcaacaaacactaaggtaagacctaatggccacaaatgtgcttgcatcatttgttcagaaactctttgtttaacattatcattgtatacttggttgctttccaggatttctacaacttggtagatgtatatcttgatgccgtctttttccctaaatgtgttgacgacttccaaacatttcaacaagaaggttggcactatgagcttgacaac

SEQ ID NO: 194087 - DNA, 452 bp, Zea Mays
tcgcagtcagacacgatggactggggcacgctgtggagccacacaatgtcggtgaagaaggcttgtgtgatggactcaatggagtacaggtgcaccaggggaatgaagtgacaatacttgatgaatcgatccaccaccgtcaagaggatggacttgctgtggaggcgtggtagtgcttccacgaagtcgagcgcgatgtccgtccagacgccctggggtacaggtagaggaaggagaagacccgccaggtggaagtgctctgatttgtacctctcgactcttcgccacctcgaccatctcttgcccccgcgacaacgttacttctctttgtcatgcttgtcagcttgggcgtcacacacgcttacccttttcctcttccctgttccgcgctacttgccacttcgaccttatccactgtgacctctagacatcccccattcctagcatctctg

SEQ ID NO: 194088 - DNA, 304 bp, Zea Mays
tgagccagtggatccagaggaggtaagagcccatattcatttcccatgcttcctggatttgccaatttgtttggtacggagctgttgagtattaatatcgtggttattgattgacacagctgcctgattatcatgatgtgattgagcacccaatggacttcggcaccgtcaggaagaagcttgccaggaatgcatatcgctcgtttgagcaatttgaggtcagattgataggctttggtcatatatttaggtagcgaatggataatgaaatatcatgttgtgatttgttggccatggaatagtt

SEQ ID NO: 194089 - DNA, 305 bp, Zea Mays
ctgtagttgattgtgatataggagtctatcgacattgatgcataggtcctttgttaaacttgtgttgagatgcttttgtgtgattaatataagaactaatgaaaagtcgtagcaactaaataaatgcttgcacttgtgatgtcgtgttgcgttggttaattataggtattaatcgtcgtccttccagtggtgtgatgttgtgcgctcgatgaagtatagataactaaagctaacatgtggttgtctgcggtgttttctcatttaatgtttagttcgccattgtgtctttgtatatctcgtgcttt

SEQ ID NO: 194090 - DNA, 304 bp, Zea Mays
cagatgttgccttaatgcatgaaaggcatcttcgcacttctgaccccaaacaaacatggcttctttcttcaatagctcagttatgggcttcgcaattcgagagaaatccggaatgaatcttcggtaataaccagctaatcccagaaaactccgaatctgacggacagtcattggtggcttccagttcatcacttcttgcaccttatcaggatcaacaactatacctgcctaagagatagtgtgacccaagaattcgatctcctttagccaaaaatcacattttgacaacttggcataaagatgg

SEQ ID NO: 194091 - DNA, 655 bp, Zea Mays
aaaaactgttataaaattggaagaaaggtgaaaataaatacaattcatccacctttgatgattttctctatcggccactacctccttcattggtcaccatctgcatcgtctctttcaagctcgggattggattaggggtttgggttttgggtagaactctctaatggctacgaccttagaaggggagggtgacagtggtggcaattggagggacgatgaactaggtggctgaggtggactatggcagtgggttggtgttggtcaacaaagaaggggagggagaggcgatgtattcataccagggcttcatgtcagctgaggtcgtcgtcatccacgatggcgtgctggagcatgactggtggtgaggatggtggtggcacctgaccatagcatgagaaggggaagtgcttgtggtctgtgatgcggatgcgaggagataatgtttggagtcagatggtcgactaggggccttgcatcatagttacctcctttaaattttgagacactgatgcatgatactttcgggtatgcttctttacattcatttagcatacttttttttgctatttagttggtatcatttgaacttacaataaaactattgatgcactttgattagcgcacacatgattcattgcatttctttcacgccccg

SEQ ID NO: 194092 - DNA, 312 bp, Zea Mays
cggagagtgagtgaattgtcgcgaagtggtaggcgttattgaagcgaggtggagaggggtcgtcttcgcgtggatgggactggtaagcgagaattgttgtcctcgccgattggggtgagtgtgggtgagggggagctgcaaaatctgtttgagggtgaggaactgaggataatgctgttcaactacagggagatgggtatcatcccgaaggttgagccgatgtaatatgtgatgccctcgctgtgtgtatgtaaccataattttgtgtgatgaagctgcgcgctttcgttgatcaggccgctcccgtacgcg

SEQ ID NO: 194093 - DNA, 897 bp, Zea Mays
ctgaactgaatagtcacactataatgatccaccctagaagcgcttgccggaccaatctcattactccaggccacgagaatccccccgctagacccaaccgagggaagggctagcttgtgcacaaaattactcccaagggtggtcaaaattgtatgcaaagaaattacagccattttagtttcctgaatacaaaccacattagctttgaaggagtttatcagattgcgaacagtatcctgacgtgccttggaatttaaacctcggacattccagcttacaattttggacggattcatgggtaactatggtgaaaacaaccagagccaaaacaaagcaacaggcatgaacagcggctcaacacataaccagcccagggtctgtccagccgaagagagcagcaagcgcctggacatgagacgggggaaggggctgatcaaaaagtctgctgtattttgcaaggcctcctgactgatgccttcattcacatcgatcacctgcagtgctctcatcaccttcttcctgaatctgttctgaccatcaccaaaggcagactgatattccaccccaataccagcaatgcgcctactacggcgtggaggtgcagcagaagaattatcgttccccggtctggcaggaagaggagccggtaaaatgcgatccgcagtctttataaccatggaactgaaggaagacccaggatgaataggagtagccagttcaggtgtctgcgaaggttcaacagccagaccaatgtccgagatgcagcaagaaacagtccgaggaccagacaaggtatccatccgatgctgttgcgacttccggccccttctaaaataaaccttcagaggcatgtagtaccgcggttgagggggagctggtgaaaactgggacaccgcg

SEQ ID NO: 194094 - DNA, 430 bp, Zea Mays
caacaagtgcgcaaaaaccgaagtccaccgcgaggactatccgcgcagaagtcgcctaagggtgcagccggactagcacaacaagtgcgcaaaaaccgaagtccaccgcgaggactatccgcgcagaagtcgcctaagggtgcagccggactagcacaacaagtgcgcaaaaaccgaagtccaccgcgaggactatccgcgcagaagtcgcccaagggtgcagccggactagcacaacaagcgcgcaaaaaccgaagtccaccgcaaggactatccgcgcagaagtcgcctaaaggtgcagccggactagcacaacaaatacggaaaagccgaagtctaccgcgaagactgtcgcaccagcatagcatagcaaaatataccagacaaagcacacaacgccttcgcaggcacaggcaagcgagggcacaca

SEQ ID NO: 194095 - DNA, 563 bp, Zea Mays
cccccgccatgcgcggcaagcgacggatgcggcggatagttggtgaccttcaactcctgcccgacgcacggtcaaggaagagcaagccccaccactgctgagaaggaggaccaagccccgccaccgccagtgaagacagaagaggaagccctaccgccgccggtgaagacaaaagaggccatcctgcccccgcccgtcccatccccaccttgcgcgatgcccggtgcctcggtcttgtgcccttccccatcacatcactgaggaccgccatatcctccactgtcgccgctcccgccaacaacacattctccccgttgtgattgtcacccagcatcgccccaactttggcgttgccccaccgccctcgtcgtcggttcccccaccatccgtgcccaccttccaagttccaacctcctccccacgccaccatctgcggcccttccatcctcgagcccacacccacgatccacaggtgttgtgcctgccatccatgctgccaaacaaactttgcatgtcgcacccatcgccggcgccccctttccatccacgcccccgccgtccgg

SEQ ID NO: 194096 - DNA, 401 bp, Zea Mays
cggcgggatgtctggtgcatagccggcttgtagcagctcgggccactacaccggcggggttcctctaccccctgtggatccaattggggaacaaaggaaggaagatgaccgattcgatgggacggacctgcatttggatctgcgtctcgccgtgagagcaacaacaggtcggaggcacacagatccaatcggggaatagaggcctccgttgctccgcctgctcatccgcctccgtcgcaatacgcacagatacaatgaagcatggttatgggtatatacgcgagcgaggcggggataatgacaccgtgcggagagggcgggcgggtggaggggcgacgatcgcgggcaggggataacggcaccgtgcgggacaggccgggggagggaggcggtgttggcta

SEQ ID NO: 194097 - DNA, 326 bp, Zea Mays
gacaacttgtgctgatgagttgctaattctttgtcccatgtacctcatgccaatagtctataccaacactaaaaatgaaaattaaaccttctgaacttgctaggcggtgcagacacagacaacagaacaacatttcatatatgctaaacacataccttctatagcgaggagggtgagcttcttcagtgggcgatctacttggagttggcaaacagcagcagaaaatagggcttcttcataggctctgttgctgcattaaaataaacaaacaacagtagaaagcaatggcaaggagttcatctgtctagcgctaggaggcagaaaat

SEQ ID NO: 194098 - DNA, 400 bp, Zea Mays
aagaaggaggagggggtgatctgaactcgaaattcagaccagcagaaaggcgctaataaaatttggttgatttctgggcaccgtaactttggaactgtgaagtttgagtcccagaaccctatagtgactttgaagatctttgattagtgctgcactaaccttggagaaaattgggtcaaaattcgtgctgtcagatggggaggttagtttgttattcagttagctgaattggagttctgtgttttcacccattttttgggttgtttggtgttgaatccaggaagtataaggctatggtttctatagcaatttgatagagggttgattggagaacatatatattcagcataacctctctgttattactgcaaattgagagatcaagggggagaagggtgga

SEQ ID NO: 194099 - DNA, 553 bp, Zea Mays
cgatctgtagctgtgaagaaactatccatgagttcgagatgttaacacgcgatgctgggcgtgtacagaaggatacactgaaaaagatcctcgagttgaatgctgatgctgaatatctgaacaagttcggcctcaatggcaggactgatgtagagagctacaaatcctgcatcccgctgtgtgtgcacagtgatcttgagccatacatccataagattgctgatggtgatagctccccactcctcactgggaagcccgtcacctccctttccctcaggtaattacactgcttgaaaaatgtgtcgtcttatcgtttatattagtgtgtggatgtcggtgttttgtaacttgatgttttttttcttcctttggacgcagttctggtacaacgcagggaaggcctaagttcttgccgtttactgatgaattgcttgagaccacacttcaaatattccagacttcatatgcatttaggaaccggtaagcatcatcattatgtttcatttttcacaagtatcccttctacttgtgaatgagcagggtttcatctcac

SEQ ID NO: 194100 - DNA, 292 bp, Zea Mays
tgaagaatgttcttccagtgtttcaatctctccgtaagttcagcaagggttgcaggaaaagtagtagcgctctctgggtcaagatcacgttcaaaatcttgcttgtactccttcacaaaatcaacatgcttgttaacagcatcttgtgagaagcaagctctacatacaccagagagttccttcttgagagactgtggaacctcgccagtggttgcagttggatatttgtagcagcgatgaagcagagcattaaccacagctagaagtctttcctcaggcagagtaacaaacc

SEQ ID NO: 194101 - DNA, 282 bp, Zea Mays
ctttcttcgagtttagagttaaggtccgggttgaaggtgttccaattcactgctggggggaggatgtggtcgcaagggttctggggaagagttgtgccatccactttgttcaagagcgcgctaggcgtagagagcgcacgaggtcctttgatctctgggcctggtgctctgatccttgtgaaatccctaaggaagtttggcttacagttactgaacctgatagggagccccctccggtttccaccccactgccgcttgctggtgttagctatgatgttccat

SEQ ID NO: 194102 - DNA, 361 bp, Zea Mays
ctctgaactgaaccaagttttcggcaaccaagggggaaaaaaaggcttttcgtcatgatggagacgtgtcttaataatcccttaattcttcctactactagtaatctactaacacggcacaaacgagtacgtatttcgaaacgcgaaaggaaaccacctggcacctgctgccttgctggagtggacttgcttgttctgatgaagcactcgatcggacttgctgtcagcaactctcagcatacaggactctcaagacaggccaaacactgccaaatacacacaaacattccggtagttagtaactacgcgataaataattggcagaatattgtctaaaaaggtacattaattacctttctta

SEQ ID NO: 194103 - DNA, 294 bp, Zea Mays
accttctccgcgctcgagagcgacgcagatgttcgcacgatgcctccctgcacccctctttccgacgaacacggcgacacgaacggaagctagaacttggcgtttgcatggaagggctatggcagctaccggataggagatgcctctgttcctatttataacccaaagaaggtgggctggcgtctggctggcaagcccgacggttacggaggtgagtctgttacgatcttgacggcacgattttgttaagtcatccccacaagcagcgtcacgggagataccaggatgactccg

SEQ ID NO: 194104 - DNA, 388 bp, Zea Mays
ccaaatcgccggttccttgcctccaaacttggggaaaagcatcttaggtacatgttgttgcaactcccttcctcccggatcctggttcggcatggctcctcttctacctcctgtatccgatgactctggtcccgtgccaacatcctccatctctctcgccatagcttccaacctcatcctggccaacgccttcccattctcctccacgcgcctggatagaagtgtcctctcatctgcagcctgtttcaccgagtcggcagtcaattctgactgtcccaatagttggtgatgcaccttctccatagcctcaactttccctgtcaacctctccatcatcaccatcatcttgtcccaccttgcttccccttgtttagcttctgtcgccatg

SEQ ID NO: 194105 - DNA, 475 bp, Zea Mays
tttgttgctctaagctttccacccgggagtttaggtgggtgcagtgggagaaaaggtcgtcatagtggttatcaagtgtgtggagatatccgaccatgtagactatggtggggtcatcttcagtaggatctcttcctgacagggcctgaagtcttttcctccaggtaggggtatttttgttgctaggtggaaagtaacgaagggggtctcaaagacttccttgctgtagttttggcatagctggcggagggctttttgggcaacattttggcaagtgtctgggaagattgtccagtgaaggtgacttggaaaggagggcgatttgggtagcttcggctttctcccaggtagactgccatagagcatttctcagtcccattctcgcggtattttttccagacgtattccagcttcttgcggatcctcatgcgaagcgcgcaactccataaaaggtgagggaattcttccacctctg

SEQ ID NO: 194106 - DNA, 271 bp, Zea Mays
tttatttaattatgacagcaaacgtgacatgccattacaatttcgtttatgcaaaaaagtaagttgcttatagtttagcctttggtttcaatttgcactttatagaattatactggcagagctcctgacggagcacctgacggagctcgccacaggtaccaaacggcgcagcagcagttgatgtgcaacccgagtgtactgccgctcgaggaggccagtaagtgccaacaacatgaatagccaaagcagggaaatagggctggcgggggca

SEQ ID NO: 194107 - DNA, 450 bp, Zea Mays
cggacatcaggggtacatgatgaacggaggtctatggcaacagtgggtgctaaaggtgaaatgagtaaaatggaagctctcaaggcatatcggaaggctaagggactgtgttttaagtgtggagaaagatggggccaacttcacacgtgctcgaacacagtgcctttacatctggttgaagaaatgtgggctctaacaatgggtgcatctgaactggagatggagtctgcagagcctgcaactgagactagcctagagagtgtgcttgctatttctgttgcagcagtatcaggcagcgaagggagcaaaactatcagactgtgggcatccatttattgtcaacaggttttggtgttagtggattcgggtagctccgcgagttttatggataatcatctcacaggagtaatgtccgcagtgcagccattatcaatgcctttgcaagtgaag

SEQ ID NO: 194108 - DNA, 321 bp, Zea Mays
aggtgtccgaaggcgggaacagatgccccaagtggcggaacaggtgcctcgacggagggaacacgtgttcgaggccaggacaggtgccctggcggtgggaaccagtgccctaggggtcgagacaggtgctgcggaggcgggaattggtgccccgagggctggcagaaggagtgccctaggggccagatcaactagtgctccgaggggtggagcacacagtgcactaagttctaggggacgtggttgtcaagagtctaaggccaccatacgtgcctagagagatggggcgaagtcgatcaacgtcttggagattggatccgg

SEQ ID NO: 194109 - DNA, 452 bp, Zea Mays
gactgactgcgagcttgcaatgccatttgaagctttgttgatattttcatttgagttccaggggtgcctacatcttgtggagttggtcgtggtcctaagcctaaaccacgaatacgacctcttggttctttctctccaaaaacatgtgcatataaatcaccatcttcaatacttctgtccttcagttctgggttctcagcaacagcttcttcaaatttattcttaagaggaccacacatatattatattttgttcacttatattttaattattacataaatcaaaaatatgtgtgtactcacaatgaatatttctgctccaggtagaggcacaatatccccttctttgttcttacgcgtgtgtgttctaacatatatttcatctcttctcgcagggcgtccttgttgctcggcctacaagaaaacatgatttggtccagtaattgactagaa

SEQ ID NO: 194110 - DNA, 363 bp, Zea Mays
caggagggggcggcggccctggaggagaagaagaagaggaacatggccaaactccgcggcggtgcctaggcccagcagagcagatggatcggagcaggtgcctaggcccagtctgccaggccgcgctgcgctcccgtcatcatctattcatctcctcacccagattttgcttccctcgctcgctctctcattcgtttgtgcagctgattacgctaggtctatttacgcaactgtcgtgtgtcgaattttaacagcgacggccatgcaccaaacccccaccccacacatcattttctttcttcctttcttttgattcgacgacgcctgtgattcatgcatgctctcgatcgaggcaaagctgtt

SEQ ID NO: 194111 - DNA, 601 bp, Zea Mays
tgtaggcgtctggccatgacgaggtgttcacgggtgcggaaaactgatttgggggaagaaagaaattggagctctctggtggctaattggaggcagtagtggatgctttggcttcgtgatgacttaacggtgctaggggtgtgctcaatttatagtatcccagagcgatggctcccaatttggtcatggcgtgttggcggcggaaaagagggaagagcattggcgcaatagctgcgtgtctttcactgtggcaggcttaccggcgacgagccagcaatatagagcggcttgctgcgacgtggtgaagcttcaaggcacgtggcacccgatcggtaggcggccaactccggtgagcttatctgagccggccataaagcaagggggtacgacggccagcccctggtgtcatccgcggcgaatatctttttaccctaaagcgttatccgggcaccagtgagcacgaatcacctcgccgacacgaatccaggcgcgggggtcgtcagcggcaaggtgcactacaccagtgatctacttcagtttactgtactatcagaacaccattcagatcatctgatagagaggtttgcagcgcccagatctc

SEQ ID NO: 194112 - DNA, 339 bp, Zea Mays
gtatcccgaacctgaatattatatcttgtatgaattccactgccttagctaaagttaaagaagcgatgggcttgaactctatccatttagtgaatttgtcgatagccaccagtacatgagtgtatcctccttgggctttcttgaaaggtccgatcatatctaatccccagcacgcgaacgaccaggttatgggtatagtctgcagctgttgtgctggtagatgctgctgttttgacaggtactagcaagctttgcacttcaggactaactcggctgcgtcactcttcgctgttggccagtagaaacctgacctgaaaaccttcccaactagggtcctgg

SEQ ID NO: 194113 - DNA, 316 bp, Zea Mays
gtcggagacaagattcgattctactcttcccccgatgaagaggacatcggggtagaacggaaccgttgtagtgacgagcttctttccgttctcctttgagggtggagttaccagaagagcagtttgatgatccttgaccttgttcgcctcttttctcctagtgaaatgtgtccacgtttctgtggaagaggtggacagcggagttctccgggttgacggaccctctgcccttggcttgcaggagggggtctttgttcggggcgccggaggttgcgctttttcctgctttactctagtttttctggagtttgttgag

SEQ ID NO: 194114 - DNA, 297 bp, Zea Mays
gagcgaattgtcgagaccaacatctcctcgtttaacatcaactacaccactcacatggctactacagcggtggtggccttgaaggcgaagtcacacaaagcgatcaaattcgagtgtcccatctgttttagagtgtttggctcgggtcaggcgctcggtggacacaagcggtcacactccattgccggtgagctctatgaacgcgcacatgctgacggagacgaagacattgatgactacgatgaccaacctctcatctctaatagatttcttgatctcaatctgccagcaccagga

SEQ ID NO: 194115 - DNA, 379 bp, Zea Mays
ctccttggcatacaaaatttgctgcttaacatttcctgtttttttctgactccatgattgtaaatgaccagccaacctcttcagcttgtcagcgaaacattggaaagggcactgcatatcaagaggtatggaccaagagcgttccacctcatccatgaagccagggagcttaggccagaaattttcaaagacaaaacgtcgcctaccttgagtgaattcctgcagtcccagaataagcgggctatgatcagacaacatagaggccgagctttgcaacatacagtctgggaacaaatcctcccaatccaccatgaagaaaaccatgtccagccgcaccggcatcggagcagcctgctcatttgactaagtgtatttcctt

SEQ ID NO: 194116 - DNA, 382 bp, Zea Mays
ctcccatattcttatagatcgatatcaatatacttcttcactcgacatgcatcttgtttgaccgaaagatatggttgaacaacttggttaaccatactatagttatgttcctgaggcatctatgtcttaattgagatacctttaggacccatcaccttaccccctttcatctttttcagtgtctttctaactttaaattcttggatcctatgcacaaagcccctatcggtgtcatcagaaaagtcatctaactaaaaagttgtccctattctccccattgaataatttgtcaatattttctccatctatgtatgatctcgtcctccttcaccaagagatgccatgtttcatccttaacacacttaacttagttgaagtcctt

SEQ ID NO: 194117 - DNA, 744 bp, Zea Mays
caggtgcaaagcccatcacatagtatgtgagaacaacccatactactgattccacgagcgagataggaacttttaagagtatgtttgccactccaaaggtccatgcagggaagaataagaaatccctatgtttgtagaaaactggtagcttctttatggtcaattgtagctcagcgaacccattgaacatgatcgttattaaaccaaaagtcagggccccaaagaatttggtgccatcagcaatttgcccatggggcatctttgttctgagaaacacagtcatggacacgaatgcaaggatgatcaacactgtgaccttgaaaatatagatgaaagagttgcgcttcatcaatagctgctcccttgacatcactgccttgagtgattcccagctagaaagcccatattttttggtggtcaacgcagcaggatgggttttggacttttcaaaaggtatttgcaactccttctgcatctgttggcatgcatggaatgatttgaaacgttctgcaaagtcgggtacagatacataatgatattgctcctgatcaagataccaatattgttgctggtctttcttggaagtaacctcttgaagaaagtctgcgacacctttcctgtcagggcaccggaaaccgacagactcaaagaattccaggatattctcgcgtggcccatggtacactatgtatccttctgatagcaggattatgtcatcaaaaagattgtaggtctctggcggtg

SEQ ID NO: 194118 - DNA, 450 bp, Zea Mays
ctcccgttgcgctgaggaaaagtgatccaagcgtagtgggagtttctttgggccagagaatgaaacaacaaaattcaaagcaacaactgaagaactattctctgagcttgaaagatgatagcactaaatcaagtgaacagaagaatctgaaaaaaagattgcttgagcataaagggtcatcagagagtttgtcaaagaaggcacaactgaaagctgttgatcagcaagccacatctggccctgtgctcaacaagcttgaaaagaagccaagaggaggacccctcaacaaacataagcaggatctcaggaacaagataaaacatgtgcttttagataatgggtggaaaattgacctaaggcagaggaaaaacaaagattatgaagactcagtctatgtttctcctaccgggactggctattggtcaatcactaaggcttatgcagttttcc

SEQ ID NO: 194119 - DNA, 614 bp, Zea Mays
gtggaagccctcgcttagacaagcgatccactgttcaacatctgttcttgacagccaatcaaatgaagaatttgcactggagcggagctcaagatttccaaatcctttttcatggggcaaacttctctaatcccaagaagaaagcattgtatgcagattttctagtataatgctctgaacgagtgagcttccaagtgtgttgatcattgatgtctggctgtagagtgaagtcatctactaattcccataaattcagatttcagatattgaactatcacctgggtggttagagctccttgaatgtccgttacccacctactgctcaaagcctatgacaccatgagctgcaattttgctctttgggagatctgttaataagattaggagctagttcagcaacagagctaccgttcaaccaccggtatgtccagaactcggtcggtgtcttctcctttcctgacgtgcagcagcagcaaagagagcctgggcgttgtgaggcacctgtattggtagaccttcccatgagagataggaatctgttttattcagccaaaaccacctgatgcacaaggcccaacccatttttcaagattgagaatcagcaagtcaccata

SEQ ID NO: 194120 - DNA, 1660 bp, Zea Mays
tgtcaacctgatattgaaggctttggatagcctcactaggactgcttacaccaccgatcaagtcctcaattcagatcgatttaccaagaacagattaccagggtcacatgaacaaacacatgaagctgatgacattgtaatccctgaacaaactacatacgattcacatcatcatactaatgacatcgaatctgcaagtcagcaagctcaagaactgtctcatgttggtggaaataataacgaaaaccttgaccaacctgctgaacaagaaatgggagttgatctagcagacaatagtacttctaatggcaatcctccaacaagagctgtgcagttcatgcgggaagaacctattgaaggtaatgtaatggctcctagtactgatattggtttggctttctcaatgcaacatcaagttgatggaatgggtgtggaagacgaggatcttggggaggaaagtgaggacgaagaagatgaggaaatagcagctgagggagctggtttgatgtccatagctgacacagatatcgaggaccaggagaacaatgcaattggtgatgattacaatgatgaccttatggatgaagaagatgacgactttcttgagaaccatgttatagaagtaagatggagggagagcttaactcgaatggattatgatcatcatctgagattttccaggggtcgtgcagactccagtggttttattgatatatcttctgagtcatttcatggtgtggggacagttgattcatttaatctgcatcgttcgtttggtcttgaacggcggcgccaaatcggaagtaggtcgcttcttgatcgaccaaggaccgatgtgaatgcctttcttcatccactgcttgtcaggccagcacagtctagggagggaactaattcagcgtggccctctggaggaacttcctcaagagattttcacatgctgtcttttgacatcccctcgtacatgttagatgctggcttttcaccagaaactgctcccccagtgtttggtgaacgtgttgtcagtactgctccaccacctttgatagatttctcacttggtatggattcccttagaattaggcggggccctggagataatttgtggaccgatgatggtcaaccacaggcaggtaatcatgcagctgctattgcccaggcagtggaggatcattttgtgtcacagttaactgtggctaataattcaaatagtgctcctcaggtgcggcctgaacagactggcaacggtgcgaatgcgcactcagagttaccagatacaggaaatgctgaacctgttacaaccgatccactttctcaacctgttggtcggcatcagctagtttgtactgttaaccaaggacctgtccctgctaatgatgtcctctgtcctacagatgtgcacgtaaatcagcaccttgttgattccatttatgatagccgcgttgtagaaccggtgcagcaaacagcagccggtgatcctaacactatacctcagagtgatgaaatgatgtgtattgctggtacacagcttggtggtcatcctgaaagagattccttgtctggtaatggaagttatggtaatattatgcaaaatgagattgaagcacctcaacaagttcacttgggtaatgatcctagggaacccccatctgatctggag

SEQ ID NO: 194121 - DNA, 482 bp, Zea Mays
gcagtgggtgcttggatacatggcggagctgggggtacggtcaatttatagagcccgcgagcggtggtgatcaatttagccgagccatgctggcggccggagatgaggaagaaggcggcgcggtgaattcgtggctaacgccgtggcaagctcaccagcgccgatttgacagcagtagcgggtcacggcgacacggtggaagagttgagccacgcggcacacagccgagaggcggcggtcgacggtgagcttatcggctacagccgcaaagcagaaaggcagtcacggtgagtcaccggagttatccccagggggtggcttttacctggcggtcttatcgggtcatcggcgacgtgaatcacacagcggtggcgcgaatcacggcgaagatcggtcgtcgacggtgaagacagccgcgctggcggtctgatccggtatttttactgtaccatggcgaacacctattcagagcagctgacaga

SEQ ID NO: 194122 - DNA, 349 bp, Zea Mays
taatcggactactcccgttgagtcggaccgccatcaccgggtcgcgtatttttcgcatgccctgtaggcactgtctgtctgtcgtgatcatcaaaccacaattgtgcctgttgcgcacgttgcgtggacttatcgtataccccgattatcgagccataattgtgcatgttgcgcttattacgaaggtttgatgtgttgtcgttgccctgatggccgcacacgcgttgacgccatatacgctagagcttgtactcgtgtggattgtggtgggttgttcaagcccctgaagtcacattatgcgcaaccttcgtaaacaattttatttggctttatattttatttgactgtg

SEQ ID NO: 194123 - DNA, 518 bp, Zea Mays
tgcctgctcagctttcttacttggccctttgcatttgctatgaacaccaggttataaatgttcaagtgcctttcttgtttaagctagctatcgactggcttgcagcccttggtggtgctgaagcttccctggcatcattcactgaaactaatgccaccctattggctctatttgcaagcccagcagctgttctgataggatatggaatcgcacgatcaggagtatcagcctgtacaggtaaacaccttttcttatatgtcatcagttgctccccaccatccccacaagatacatgcacaaaacacccacccccccactcacccaaaaaagacgctgaagctcatcagagcttgtaaataactaataagcattctaggtccccttctttgccccccacccccctcttgaaatgcacaggattgccttttgtttaatctttttttcccttgtgatggtttctgtgttcccagaactgcgaaacgctgtattttctaaagtgactttgagagcaatccgtt

SEQ ID NO: 194124 - DNA, 372 bp, Zea Mays
ttattcgcctgcaccgttgttcccagcaaacgcaagagctgagagcacgaattgtatcatctagaagcacatcgatcaatattcccgtaggctacacacagaattaacctacataacctaaattacacaaacttaaccataaactgcgataaaaaaatcccctctccacccagacacccacaagaacacactacacacggtaaaccctcaaatccacaaccccaggtctggtctctagcagatccaaggaatgatggaagaataaatccccacagatccaattacccaaacgaatcctgacaccaaaccaaatagcacgagatgtagcgcatgctgcgcataccacccccacgggtgattggcgaaacaggg

SEQ ID NO: 194125 - DNA, 337 bp, Zea Mays
caatgatgtaccacctgttaataatgaatctgaggtacaaagtggggcaggccagtgttcagattacattgacaaggatagaagttatgctgggatgcataacggggagagaaccggtggtgccttatgggatattttccgaagagaagattctgacaagatacaagattatcttaggaaacatgccacggaattccggcacatcttttgcaatcctgtgaagcaggtattattttccttgcacttatttgctctgtttttcttatgctgactaatggtcatgcaaatggtgcaggttattcacccaattcacgatcagactttctacttaaccgag

SEQ ID NO: 194126 - DNA, 574 bp, Zea Mays
ttcggaacacagagaaaacagagccgctagtcgatggatggcagttggtggaatccaagcagtcaaagcgacgccgattgaagatggagcggcaacgtcagagacggcccgtcccagaggacctggctggcaggtgctttaactgcctctctcatgatcactttgccttccagtgtacgcagaagacgaggtgttttcggtgccggaagcaggggcatcgctcctttgattgcaatctacttaaaaggccggtgaggcttgaggctgtgaaggtggcggtgaacaacagtgctgcctctcgacctgagactgagatctcggtttggaggaggatcaatcttccggagccaagtacgaccagtggagacagactaagggagcaacctcgacctgagacacggctctcggtctggaggaggctctcttcgtcttcagcaacctctgtgatcaaggtgaagaagaagagactggtgtggagaaggaaagacaatcagcatcctcctagagattcaggtattgctgttcgacaccaggaaccatcaacaatggagggcgacggcggaggcttgatttc

SEQ ID NO: 194127 - DNA, 440 bp, Zea Mays
gctgtgcgctgctgtaagcgcagccatacccaatcaccctcatggaactccacttcccgtcgatgcctgtcctggtagcttttcattgtcacctgtgactgaatcaatcggtcaggaatatccgccaagaattcgtcgcgtgcctgtagttgtttgtcaacagcagccacctgtgatgttcctggatgatagggcagaagagcaggaggttctcggccatataccaccttaaatggagagcatcagagagcagtctggtaggaggtgttgtagtagaatttggcccatggaagccatttaagccactctcttggtctatcccctgctaggcaccgaagatacatggtgataattcgatttaccacttctgattgtccatcagattgggggtggaaagctgaactcatgtgcagcttaactcctgatagctggaactattc

SEQ ID NO: 194128 - DNA, 427 bp, Zea Mays
cgcaaggatatatttgcagtgctgagatgcaagtgcttaaccgaactgtagccaaagtaaccctatgctagaagtaactggcaaccatgttgaattgttaatctcgttagttttttgtctggggtcttgaaaatgccctccagatctctcacgagaacgtgaacttcacctatcttctctatcgagctgcatcgccctctcttttggcgagcaggtctttggattcaccgtttgcttgtgtgatatctgcttagttgtgtggggatgatcaagtggttggaaagctttgctgtgactgttcgttgatcttctttctgccgctcattggatcggaggaccgtcttgtttttgtgtgaatgttcgaggaacgacactgttaacaactgacctttttatgttgacaaattacagagttgttcaccttggc

SEQ ID NO: 194129 - DNA, 1349 bp, Zea Mays
tacgagcttgccttgtcaaactacagactactcgctactgattataagcttgataaggcttggaagcgatttgctggtgtacaggtacaagaatttttttgactcgttttgctgaactttctctgtggatatacatattaatagtctgtttagcgtttttaattgtgttgtaaaagcaaaattatgattgctattctgaaggaatatcccggtatgtatgccaaacatgttggtcttgtttacactaaaagcaatgggcagttccattaccaacccagctttcctacaaatatggcgtttggcctagaaaacatcagatgatacatgtccactatgttgcagggtttctggattgtttttacttgagtctggaatcaccttaatgtgtttcacatattaacttcatgttgataattgatatacatatattctcttttgcaggagatgagtggactttgctatttcattttggatcagtcgaggaaggacgcggagtattgcatggaaaatgccttcagtacatatttggtatttatttagaaattcacatcttggtttcctggcacatgcaaataattatttcctttatattgcttattacttaatcttttggatattgttctgtggtcttgtgctgttaccccatgcttcttatacagaacaataaggagcccaaaacccattttgcatggaacatctttttcgtgtttatcagttcttaacttcttattgaatgctcaattcaagtcttatttaagcaacaatcataacaaacagctacaattctgggccacatcgccacatattcatttcattctagtttcttgttacaacctctgggccatgttgccacatattcatttgggaagggaaagggatgacattttagactggctacaagttctgggccacattgccacatattcatttcattctagtttctggtttctttcggaaacgtgtcctgagtcaagaaaagtcagaatgtacagggtccaccctgatttaaaactaccctcttcaatatcaaatggtttattatgcacattctgatactagctgtacaaatctgaatatcctgaggtatggtgcgtttagaagaatgcacaaataagtgaaatatgtgcccatgacaagatactacacttatgatatgtagatagtagactctttagttttcttgattgaacttcttgtagccttctttcattcaaagtgtaattcaccttttcatatatgcagagaattggatcttctggccagagaaatgctactagatgtggcctttggtgggctgaaatgcttaaaacaagaggacagtatagggaagcatctaatgtgtatttccg

SEQ ID NO: 194130 - DNA, 271 bp, Zea Mays
tgacaaactgtcgagcatgcataatccacccctcgttacaatgatggcaacaatgaattgaaccttagcatatttcgaggccaactcggaagcaaagtggctcgaccaccaagaccctgacacatgaagagtggcggcatatcatgctatatgtattgaccaaccttgaagaggtgacaccatacatggaacaatttcttcatgaattctggcgtcgatcaagggacccaaatccacaggaatatgacactcttcttagaaagggttcgag

SEQ ID NO: 194131 - DNA, 377 bp, Zea Mays
ctgttctcagagtctgtagacacttcagaatcagcgtgcttgcagcttgctcatcggttctattgccgctcttgctgccttttttctcgtagagacacaactgcgttaccttcccttccatacgaccacgaccctattagttttgtatccatgtttttgtgtgcactgctaatgatggatggggacactcgtgagagcatggcgtactgccgttaaagcccgagtgctcagcgttctgcgattttgtgaggtatgtactggtatagctaccttctttaggtttaatatggcccctggttatgccagtctagctctttccctttcgcctacacaaatatagaaccgtttcgtcttcgaacgactgctgtcgagcacat

SEQ ID NO: 194132 - DNA, 318 bp, Zea Mays
gtgagagttctagactaactggtctctagatcacctctggctaccttctgaatcgagagctgaaaatcccttttgaatcctccttctacgttgctctatccctcccttttatagcccaagtgaggagagagatacatgtctgttgggcagtgggacctgcctagcagagcctcaactactcctatcttatctcagacgtggggtcgttcatggtgcacgtcttggtcgggccacaatgttgagcccaccatgcttcaggggttgatacgccctgtcgtagtggcaagtactaaatcctgcgccatctagtacgacgta

SEQ ID NO: 194133 - DNA, 627 bp, Zea Mays
ctggctccgcgtccgttggccaacttcgcctggataatgttcttatttctcccaaacttattaccaaccttgtttccgttcgtcaattcaccatcgataattcttgctctgttgaatttgacccctttggtttttctgtgaaggacctcaggacccaacacgtgatcaccagatgcaatagctctggtcccctctacccgcttcgcccctcaacagctgccactgccttcctcaccactgcgtctccagagctctggcaccaacgccttggtcatcctggctctgaagccctctcccgcttagccagcactgcttccattacttgtaataaaaatatcaataatgctgacctctgccatgcatgtcagttaggtcgccatgtccgtcttcccttttcctcttcccagtctcgtgctcggcacccttttgatcttattcattgtgatctctggacctccccggttcccagtatgtctggttttaagtattatcttgcaatcctcgatgactgctcgcaccacctgtggacatttcctcttcgtctcaaatccgacacgttctccactattgctcactttttctcctacgttgccacgcaatttcgtactaccattaagagtgtgcaat

SEQ ID NO: 194134 - DNA, 490 bp, Zea Mays
ggccaaatttcttactagagtacctgtatgtgatgtgttgcattaaaaatctaggggggaagagctttggtagaagccttctagtcgccgaatactataaacttcctgttaccatgaagttgagggtgctgcaaatactctgtgatgatgtcattgaatcagaagaactcaaaactgaactggaaaatcgagtaggctacaatgaggagatggagtatgagatagaatctagtgcatttttggaggctggttcaagatcagtctcaactagagcagcaaaggcctcagcttgcaaaaacacgaatgatttccataatcttctcgaaagtgctccaaatgtaacaaatcccgaaactgctccagcagtcctgtctcaggatggcaatagtgatgattgccgaatatgtgggatggatggaactttggtatgctgtgatggctgcccgtgggcatatcattcaagatgtattggtcaaaacaaagctttcct

SEQ ID NO: 194135 - DNA, 458 bp, Zea Mays
gtaggtttgggtggtcattcttctcctgcgtcgttcaagaaaataaaatttagctagctttcatatgatatgcttcattgcttcaagacaacaggtcgtgctaccttttctagcaccttttgatgacataataacaggtggacatttagatctctctatactgatagctagtttcgttgttagagtatatttggtagttagaatattgtaatctcatactgctatatgtatctggtgagggtcaactaaaagggtcaatgcaaatatctcacatgttatacacaatctattactatgtagtttgtctaacataagtatataggtcatacataccaagtagtttaccaactcaacaaacttgaagtagagatctggcagggcccgcatgttcaaatctgcaataactttgtcctcagagatgcatttttcaacttctacaaatatcttatttatgaccc

SEQ ID NO: 194136 - DNA, 579 bp, Zea Mays
gtcgcatcaaatgatctttcgcaagggacattttcagaagtttgtggtacgtaagaattcatttcactgactgggcttattatatattccttgcataagcaattaagcagcgcagcctatgttgggactatttgttcaggaaggctagtttctctctgtaggatagagcagagagggcttacaggagatttgtaagggtaagactctccgtatctgagcggaatgggagatctagcatgtccaggtgtggtgtctgtggtgtaagagcttcctcatttcagctttaccgcaacaagttcatcgaggccaagaagtcagacctcactaatccggaagtagtggaagctcaaaaggttttcttgtaccttgtaattgcatataatgatttatgtgcatcagcatgaaccttgttttgctgctgatcgaacagaactgtcccggtgccttagtgttcttcaagactcgctacgcagccgtcgtcgcctcacgggtattccagtcatcaaaccctatgctatgggtgacagatctggctcctgagccacgcgatgtgtattggtcaaacctctggatccccta

SEQ ID NO: 194137 - DNA, 287 bp, Zea Mays
attatgtgatcaggagccagaaaatatccaacatctctagtgcacttgtatttttgctagacagttttggcattgcattcttacaccattggggcttgctaatctttctcgtgagactaatgagatatcttttgctgagtggtggaggaaggtgtgtaagcacaaaactaaaagaagaggcatcaacagtgtcatcatcatgggggcttggtgcttatggctccatctaaataaggctgtatttgatggtgacagcccttccataagcagaattcaaagagttttct

SEQ ID NO: 194138 - DNA, 376 bp, Zea Mays
cagagatgtcgggtgacgatgacttcgagaagcagctgccaattccaccaccaccggccattgatgctaccacgaatgccttggcagacatagcgttgttagtggccaatctccccatccgcatattgtcactagatcaccaacatgtttcctccactgtaggagccttgtctcaagattttccttacgatatgttggggtacggggcaacaatgttcccttccttctccaccataaccactatgctgccctccacaccctgctcgtcgtgctgcttgccacccttttgcacatcgcaatagccacccctaccctgtccgtaccccttcccatccgctagaacccgcaccaatgtttctgcagtggctgcttttct

SEQ ID NO: 194139 - DNA, 478 bp, Zea Mays
agtttacattcccttcgcgagaggattctgtggattacatagtgaatgcaatcaaacgtgtgaaagaggagagttcagtatcaggagagcgtgtgctatgtctaatcgccacctatgccgtcggcaaggagaagattttgcttgaggtcgcacagcgctgtgggtgttcaatccatgtggacagtaggaagatgaagattttgacactgttggggttcggtgggaagaatagcgtttttactgaggatgcaacagggacggatgtgcatgttcttgggtggaatttgttaggggagactttgccctacttccagccaaattttgtgaaattgaaggagatcatgatggagagagggtatgcgaaggctgttgggtttgtaccaactgggtggatgtatgaaaccaagaaggaaggttttgctgttagggtgaaagattcactcgaaatccatcttgttccttatagtgagcactcaag

SEQ ID NO: 194140 - DNA, 354 bp, Zea Mays
ttagatcctcctcgtcatcggtaagtactccatggacagccacatcctcgccgatagctccgcgcctcactgccacgactgggtgcacatggattgcgtcgtcaagtcttggatcttcggcttcatctccctcgaccttgctgaaacaaccatgcaacgtggcgccactgcccgcaccatctggctcgccctcgagaatcaatttctcaggaaccgggagactcatgctcttcacctcaacgctcagttccgccacttcgttcaaggtgatttatctatctctgactactgtcgacgcttccatggcagatgcactcggtgatcttggcgaacctgtctccgatcgcacgttgg

SEQ ID NO: 194141 - DNA, 695 bp, Zea Mays
cgggggctctttagcgaaatgacatggcgaaggggtacggtggattccccaccgcaggattagaaatcaagggccacgatcaacaccattgattcaatgaagcggtgcacatccagaaccgtcgatcgagcgatccacggccgagattcaatgcggacgatggggtatacacaatctaatctaaaccgttgcttcttggatctacggtctaaatcctaccgccatcccgatctaatcctagacgccccaaaccgatccaacggccaggaggccttctccccgtagccgctggatgaagaaactacggttcggatttaataccgcccacagtcgacccacatgcgtcagattccaatcccagttctaatctcctccgcccatatcagatcggacggtcgccgatgctccaagtcaagatctaatcttatccgtttattacgtgatcaacgatcatgggcccgtcttctaccccaggccagggacggcggcgcacaggccgccccatcgcagcgcaccccggtgtttgacaacgcggtgccccagggatccacccgtagtacgaatgtgcgtgaaacagagaggggactaaagcgaacccaatgatgcacgacttaccgtcgatcgggaagtggagggtggccaccaacggcgtcctgcagccctccggtgaatcttcgacaccggcgacaaatcgc

SEQ ID NO: 194142 - DNA, 579 bp, Zea Mays
cggtagggtacaggaagccatgctatatagaaggtaatcaggcattcaggcgaacgacagggcaggtggcggtggagctgcacattgtgcatgcagagctatacgcctatacaggaaagatacacagttcactaatagcaaagttacacagttcacttactttcaaaagtcctggcttaatcaatgttacacaacaagcctgatgagatagtgtacgtcaacgatcaggagcacggaaggaggacgacatggcaatgacaatgttgcgctacttgacatgtcatccgacgacatctggtgcaccaacaagcacggatccatggagtacgaacacgaggacaacaatgcgcacagagacatgcgaggttgatgcgaaacaaaacaaaaaactaaaaaaaaaaagaagcaaagcctctcctctatgtggctagctgtacattgcatgcaaacgacacggctcaattaataatcatgaatgaagcgaacaagcagtgtgcgggaataggttaatcgatcgttgagcgacacgaacccggccggtgccgccgccaccgtcacgggttgtcgaggtggatcggc

SEQ ID NO: 194143 - DNA, 321 bp, Zea Mays
cttctgcggacttggtgagtcgacttgaaatgatcctcaggggcaaggtgtcaaatgttggtgctccagtagcgtactcggcctggaacttgcctcctcccaaagccttcacccttttcgtgtcgaatccgcccattactgatggcggtttgggccttagagtgcgaccctctgctgaagaagtcagtgctttggttgcttcgcttggggagattcctgatgacgaacggcaggttcattttgaggtgcctctgaaccctagtgatgcagatataagcgctatgcttgatttgctagctgaagattcttccgatgctgctc

SEQ ID NO: 194144 - DNA, 354 bp, Zea Mays
ccaaaaaggatgattcaaatgagattgttgaagatagcaaatcactggaaaatcagttagaaatttgcaatgcagctactatgtctgatgagtgttcctccagaaatgcaaatgaagatccctctccaattaatatgtctgctgagtgttcctccagaactgcaaatgaaggtttctctccaattaatgaggcttctcatctagctgaggagtcttgcctttcagacaagtcatacaatgctatcagttatgaaaatggaaatgggcctgctaaatcttctgaggagcctgacaagtcatgcaatgctatcatttgtgaaaatgaaaatgagcctgctaaatcttctgatgtgg

SEQ ID NO: 194145 - DNA, 431 bp, Zea Mays
accacctcaagcctggcatcctcggcacatttgggtcggcacccgtgcgcccacctaccagagaatggactaacggccccgacgggcaccacttagactcaaatcatcgggaggctggttttggacgcatgttcgcatccacccacctcccgcccaatggtatgctcccgtccgattcacccacattttcccatcttctcggttcccctcatcggttgggaggagggcacacagaggggttcacacagtcctccaattttggtcccttaccaaaggttccgtttcccccttttgatggcgacaacccccgtttatggatcactcgtagcaaagactactttgatttatacaatgttgatcccaccgcttggattcgtgtgtctaccatgcatttcacagggccgacttcccgctggttgcagtcattaggc

SEQ ID NO: 194146 - DNA, 537 bp, Zea Mays
cccgccaccccgccagtttcatgcaccgcaaagtagctgcctaggggactgtttatcttctccatcaatacttgtcccgtcgcttcaaagccaggtgaaggtgcgccatcaataagaagagacgcctcgggtcgtgcctcagcttgaagggtctcctcggacgtcaggtgcagtaaatgcatatcgcgcatagtatctccagttctctcccgcgaggcatatggcggcgtaggcacctcgatgtcgcggcccaaggacggctgcgggcccaggctggtttgagaaagaacatgacttgatagctttagggtttagggcccaggcgcatagtatctttagggctgatattgttgttgatagctttatctattgtcctgcactcctgcttgtaactttctgtcaagaacatgacttgaccttatgaaacatatttgactgggtatctttagggctgagattgttgttgatagcattatagcaagtacgtttgtaagtagagggactctaactctcatcaagaggatgacactatgagtt

SEQ ID NO: 194147 - DNA, 423 bp, Zea Mays
atcttaggatcacgacattctgaatctttcattacttgccctacgacgagttgagagtcccctcgaacgtccaaacatcagacacccagctccacagtaatgtgcagtacgtttacgagtgcttcatactcgaccacgttattagaagcttgaaagtggagtcgcacaatgtaccacaaccggtctcctgagggcgacgtaaaaatgagcccgccaccggttctccctttgtcatcgacccacgaagtgcatgatccaacatttcttggtggttcgtgtcggctctaattgagtctcggtccactccacgatgaagtcaggaaggacttgtgatttaatcactattcgcggggtgtatgagatcccatatcccatcaattcaagagcccaattagcgatcctcccagaaatgttcggattgtg

SEQ ID NO: 194148 - DNA, 409 bp, Zea Mays
gctgcattgggagcgcaacaaggtgatattcggcgacgtcgctgcattgatgtgtccatcaccatgtcaagattagggggagattgttagcactaatcctgacatgcgtgcgttgggtcggttagctcctagaattgttagctgctgcatgggcaaatgcaaaggatgctcaccacattgtgcggatgagcggcatgcgaggtcgttgtgatacgtcattggaggatctacatgcggttagtttgttgcgatccatcgtgcggcgtcgtgcgcgcgcgacaagctggcaagcgtggagtttgtgctagcatttccgtccagctatataatcctgtgtactgctcgattgtggttatagaaaacaatacagaggctgcgtttgtgtgcagtcagggagtgtgagcgtcat

SEQ ID NO: 194149 - DNA, 293 bp, Zea Mays
ctaccctcttaacatctactactccatctttaaggctcttatcgatcaagacgcctactccattcttgtttgttgcagtccccgtgtaccacaacttgaagcctgtaccttccacttccttcgccttctgtcctttccacttggtctcttgaacgcataaaatatttactcgtctcctcaccgcaacgtcaactatttctcgtaacttacctgttaaggaacctacgttccaactacctacacggaccctagttggctcgactaacttccttacccttcacacccgccgagga

SEQ ID NO: 194150 - DNA, 412 bp, Zea Mays
gtccaataccggacaatggaaacagggttcagctacgtctttactacaagtgcctggaagagggccttatttctaagcagcacgatgaaaggtttcaggaaaaggaagaccatggcaatccagttagcatggatgtccagcagctgcattcattgttcgatgttgcagtacagaacaatcttacttcccttatttgccactgtatcctcttcaggaggctgcttatgcatttctatatcacatcttctttctgttattttcttaacatattcaccagatatcacagatgtttgtttggatgagaatgctgtgtcaagtgatccacttctggcttttcttttggatgaggtggtcatcaaggactggtgcaagagggctgttaatgtgctcattactgagattggtgtgatct

SEQ ID NO: 194151 - DNA, 576 bp, Zea Mays
tgctgagcatggaggagctttgaatgaacatcaacttagtagattggtaagacttgatcatactgtttatgttgttgttttttgaatattttgagtctgggtacaatttgctatcttgctaagattataatgacacttctctttttttcacagcacgctattttgaagccctttatgctccgccgggttaagattgatgtcattgctgaaatgaccaaaaagaaagaagaaattgttccctgcaaattgagttctcgtcaacaagttttctatcaagccataaaaaataagatctcgcttaacgagttgcttgctggaagtcgtggcagtctaaatgacaagaagttacttagcctgatgaatattgtcatgcagttacggaaggtagcgggttgttatagtatgtttttttgcttttgatcatatatgtaaaatcatttagaagaacccaactgcctagaaaaaatccttccctaacgtaaattttgctaaatgtgactccttttctggttttaattggatgctatttctctgcattgccttttaggtctgcaatcaccccgagctgtttgagcg

SEQ ID NO: 194152 - DNA, 422 bp, Zea Mays
caagtccggatgcggtcggctgacgtgcacaagacggcgttctgcacccacgacggcttctacgagttcctggtgatgccgttcggattatgcaacgcaccggcaaccttccaggcgctcatgaacgacgtgctccggccattcctccgtcggttcgttcttgtcttttttgatgacattttgatttatagcaagacctgggcagatcacttgcgccacatccgcgccgtcctcgacgaacttctccgccatgtcctcttcgtcaagcgatccaagtgcatttttgggtccccatcggtggcgtacctaggccacgtcatctccgcccacggtgtggccatggaaccggccaaggtgcaggccattcacgactggccgacacctcggtcggcgcgcgcggtgcgtgggtttttgggcctcgc

SEQ ID NO: 194153 - DNA, 392 bp, Zea Mays
gaccagggtgcgggcccttctgcttcggttcctgatgatgtaccagcagaggcccttcctgaggttgatgctaagggttgtgatcgtgtataggctattgtttgcctatttgacgaggatgaagaggaagaagaagaagtctggctgatccgtaagaacagccggcactatagaggtagcgagggtggtagtgatattccttctccagctctgtcagctcttgtcagtcttcaggggctttcaatatcagactttgatcaagtactggaggaagtcgtccccgaagacatgctatcagagccacctgtagatgatatcccggccatctcttcagaggtcccagacggtgggctttccttgcttgattccgctgggcaagaggtaacccgagc

SEQ ID NO: 194154 - DNA, 296 bp, Zea Mays
ctcagcgctctccacccccgtcccctcgcggcggcggcggagcccgagcctgagtcctgcccccccgggctaggttggtctccgcctccgccctccagtctctttggcacaacctgcagccgctggcgcaggtggacatggatctgccaagcctcgccgtcgtgctgcgcgccgcgctcagtcacgttcctgaggagcgcaaagctgcagaggagagtctcaaccaggtgagcgcctcgtcgccttccgtagtctcgtcacccgatggtggacctcagctcctcctcagtatccaa

SEQ ID NO: 194155 - DNA, 466 bp, Zea Mays
caggtttcagataatggcaaaaatgagtctgtggcttgtgttggagtgatagagagtcagttccaggaggatatgtcatcacatactaaatcaaatgatcaaatggaaggcatcttaaaacaatagtacggatctcacttgtaaacttcaaacatcgtgcattttgaatctgccattcattcttgaagtactttcatttccatggtttgtttatgctgaagaggcactgtccattgcagctcggagaaaggtagtcattttgtatcttactggtcacatatacaatcatctttgcatgatcttgttaagagctcaatcatggagactgacgattttattgagtaagttgtaaccatgtcgagtaaagctatcattgttgatactctgggcaggcctttcccatgtctcttacctgtttcttgtatgcagggaaagcagaaacaaaaatgaaaatatattccaggaa

SEQ ID NO: 194156 - DNA, 628 bp, Zea Mays
cttggcatttttgtgtggattatcgtgagttgaatgccacgactattaaggataaatttccaatcccagtagtagaagaattgctggatgaactgcatggggctcaattcttcaccaaattggatttgcgatcagggtaccaccaggttcggatgcaccaagcagatgtggaaaagacggcttttcgcactcaccatggccattttgaattcctggtcatggcttttggactgtgtaatgctccttcgaccttccaggccttgatgaatgaagtgctctctcagttccttcacaaatttgtattggttttcttcgatgacattcttgtgtacagtcgaacctaggaggatcatctacaacaccttgcctcagttttagcttagcttcgtcatcatcagttgtaccttaaacagtccaagtgtgcctttgctcaagatacggtgggttatctcggacatgtcatttcagccaagggtgtagaggcagacccgaacaaagtgcaagatgtggatcgttggactactcctatgtcagtggcagatatccggagttttttggggttggctgggtactaccgacgttttattcatcattatgcttcaattgcagaacccctcactactcttct

SEQ ID NO: 194157 - DNA, 415 bp, Zea Mays
ctttgactgatttcatgcataccagaggcttacagatgcgttctctaggacgagttgtaagtttcaaattctgttttatgtttgatagaatttccaatttctttgtaaatgctgactagataactatctgtataggtcaagctttcagagaagctttcacatgttcagtccctatgtgtgcatgagatgatagtgcgtgctttcaagcatatcgtccgttctgtgattgctgctatttcagacattcgacaattagcactaacaatagctgcagcgttgaacttattgcttggtgtccctgaatctgatgtctctggaagttctcctaatgtgcatcccctagtatggagatggctggtgatcttcttgaaaaagagatatgaatttgagctcacggagaaacattaccatgatg

SEQ ID NO: 194158 - DNA, 403 bp, Zea Mays
ccccattggggtcagcgtcagtaaattcaggaacatgcacttcttcagcagcaggaaccgaaggaccaacatcccgatccaaactagatactcgctggagacgtctctttttctttttctgctcatcagcaagaggatcaagttgattggctcgggaagggcgtcttgggcgaacactgacaggcttctgaatatccaaggttataccagcttctgggagaggcgccaccaccaatgtcccagcaggagcagcatcagaagagtcctcagctagcatattgagcatagcacttatctctgcatcactaggatccaaaggcacctcaaagtggacctgccattcatcatcaggaatttccccgagcgaggcaaccaaggcgctaacttcttcagtagagggtcg

SEQ ID NO: 194159 - DNA, 679 bp, Zea Mays
gcagcatatgaagttcttactttggatggtgaaatgataatagctgtagcaccagctccaaaggatccccatgaaccatcacaaaaaactgtccagacagcttcgtctgatgtggtagctttgtcctgcaagccaggagtccaatcaacaatgaaatctgccaatgcttgggattggatggatgatctgtggacgaagtcaataacaaactcattgagctctgctgcccattttccaattcggcctaaagcctctctatttcttatgatatccttgagtggttgagatgatggtacaataatgtcgtgggattgaaaattgtgccgaagctttcttgaagccataaggactgcatagaggactttctccatctctatatagtttcttttggatgggtccagcacttcggatacgaagtagacatgcatttgcctttttacaccttcgtccaccacctcttgcaccaaagcagcacttacagtcgattgtgaagctgatacataaagcaatagaggagcccctggcgaaggcggggaaagtgttgtcagctttatcaagtaatctttcaattcttcaaaggcttgctgctgagagggtccccactgaaagacctctgctgattttaggacttcgaagaacggcaagcttcgttcaacagatctcgagatgaacctgttca

SEQ ID NO: 194160 - DNA, 341 bp, Zea Mays
gagggcgttgtgtactttgtctggtatggttggctatgctgtgctggtgtgattatagtcggtcttagcgcgggtggtttgatgctgtcgtttctgcttttgttgtactggttcggctgcgcccttaggcggcttctgcgcgggttctttgcgatagacttcaggtttttttcgcacttgttgtgctagtccggctgcacccttgggcgacttctgcgcggatagtcttcgcgatagacatcggattttttcgcacttgttgtgcttagtccggctgcacccttaggcgacttctgcgcggatagtcttcgcgatagacatcggattttttcgcacttgtt

SEQ ID NO: 194161 - DNA, 716 bp, Zea Mays
ccagactgaatatggcttgtagtcaaattggttcagcaactggcatgtcatttcagtttgtggagggtgcttttatttcagctttaaggaaaggccattggattttgcttgatgaggttaaccttgcacctccagagacacttcaaagaattggtgctgtactggatggagagaggggcacactttgcctagcagagaggggagacgtggattatgttgaacgtcatccttgcttcaggatatttgcctgcatgaatccagcaactgatgctgggaaaagggaactgccgtacacttttaggaaccgctttactgaatactttgttgatgatcttatggatgacgatgatctacgtctttttgtcaggaaatatctggatggtctgaatgctgcaaatggagttatagatagtattgtgcgattttataaagtggcaaaaaaggagtgtgaggagagactgcaggatggagctaatcagaagcctcaatttagtttgagatctctatctcgtgctttaggatatataaaaaacgcagagaaaaaatttggcttcaggaaagccatttatgatggtttctgtatgttctttcttacattgttggatcctcctagtggaaaaatcatgaagaacttaatagtttcacttctgttagatggaagagtgccacctaacatttcttttgttgactacttcactgataagcctttgcaatta

SEQ ID NO: 194162 - DNA, 654 bp, Zea Mays
ctttgcctcactcacagctctcttcgcgaccttctttgccaccttgtatctttgttcgttgtctgcattcttgtcatggtataaacgtctgtaacactctttttttgaaatgagtattttattactccgcttttaagaaagctgatacaatgtcacacaagacagactactggggacaccagcttacactgacagcaaaacaaacctctattaagctactgaagcagcaggaacaaagcacgcctccacgcactgcaagacagcaaccacaaggcctaaaaactagtcaggacaaaaacctgaacctgacccaagtgaccattcacgccacacacaccagaaccaaaaaaggtctgaaaaaaagacagctccctggtcagctaccattttatggcatccaatgagcagcaaaacgcagccaacctacagaatccgatcatctcaacttacacacatccatctctggggaagcaccgaatgagcaacacaaaagctaagcagacaactcacgccggcctgacaaaaatacagaggagttccagcgcacagctcaaagatgaacgccactccccaagaacctaccgccgttccaccggtcagcacaaacagacagatatcatacgacaccaatgtctgacactgcatcccgccttg

SEQ ID NO: 194163 - DNA, 429 bp, Zea Mays
ctacgggagcggcctgatcaacgaaagcgcgcagcttcatcacacaagagtatggttacatacatacagcgagggcatcgcacattacattggctcaaccttcgggatgatacccatctacctatagttgaacaacattatcctcaattcctcacccgcaaatagacttcgcaactccccctaacccacactcgccccagccggcgaggacaacaattcccgcttgccagccccgtccacacgaaggcgaccaccttccacctcaccacgatgacgcctatcacctcgcggcaactcactcaccctccgtttcgccaccgcccttcgccgcctatgcccaacactcgcacccggaagatcctcatcacccattacatgtggcgaagcctccgccgcagccacatccaatgccgcaaagtaatccaaatc

SEQ ID NO: 194164 - DNA, 565 bp, Zea Mays
agggacggtccaagagcatcccaaaccagtggaaatttctctctgagtgagcacaatgcttcttggcacgtcattgaatcatctgtacatgcacttaaccaggacataggacttgattctagggttgttgtgccaactaaggagcttgccaaaggatgccacaacttggtagatgcacatatcattcataagagtaacaggaaaacccagcaacaaaatccacccttttctgctataggtcacttctctgaaattttgcactctatccggtcgaataaaacacaccaaagtgtcgtcaatattgaaaatatcaccagagatcaatttgtgcttctagagaaggcttcccatttcaaagattcccagcccaaacaggtgatcggagcagctaagaacatgcagtctaagattattttgaaggtaatcccgaatgcgattaacccacataccaaagtcagccggttgcaccactccctccacatccatcgcaatgacaaagtcatcccgacgagtctcctgctccaaagcaagatgaatgcgggcgagagtgcgccggttagcgtcc

SEQ ID NO: 194165 - DNA, 337 bp, Zea Mays
gtcaaagggttttggattgtgtttgaagacatagacaaagcacctagcgatgtgcgttcaattttagtgcctttattggagggttcaaataccttttcagttggccatgcagaggtaagaccttccttctgatatctgacaatactctaagttgcttacttttacagtctctctgtgtgtaactgtgtatttaaaaatgttgaaaccctcacgtgaattcatgagtgccactgtaacagaggttctataagttacaattgtctcatgtaggccgtggaagttgctgagagttttcgcttctttgcaaccgtcactacatcaaagaacgatgtttccc

SEQ ID NO: 194166 - DNA, 332 bp, Zea Mays
ggcggttagcggcggcggaagtgagaggaccggccggcgattagcggcgagaaaatggccagcaccggcgctggcgatgacatgccacctgtatcgtctgtgcataagccaacaggtacgtctgtttcgccggtcgtgcatcatgtagcgtctgcgatcgccgtttacacagagggtgtctccgttactccaccagtggcattgagggcacctggacatatcgatgaacacacaaaaacggcagacatggtcgacgcagagaagcacatccccatgagacatattgggccgcatgaacaggacacacctcatattcttcaaagccatgtaag

SEQ ID NO: 194167 - DNA, 1011 bp, Zea Mays
ctggcgtcggtgtcttgccctgccccagcgccgccgctccttcccccaccccgaagcgccgcctcttctgcctccgtcgacggtggtggtgctcctgatccccgccgttgaactggccataggagagcaaagaggaaggggaggccacgagggcgccagtagatatattcatcttcatctcggcttgcgatatttttgaattttctattccgtattgaaggcgtcgatggccttgtccgccctaatcagcaccctcctcgccgccgccatctggtgcgccgcttacctcgccgctgccatctcctccgccttctgattcccactccccactccccaaccctaacctcccccctgtagcacaccccacctccagctttgtaggtcctactatacttgcaacctctcccgccgactcgcttcgatctacccgccctcgcgtcaccatggggtacgcgcagctcgtcatcggccccgctgggagcggcaaggtaagtcccctgacctttcgactcccgtagccttcccccttgcctttgggtgactgctttgctcgcccgctgggggacgggctctgatggtgttccggtgttccctctgctataatgtttcagttccttcttgtttcgtagtgatctggtagggttttgtttcccgtgcgaggcgatttccttctctgtttcgggtggggttaagtttggataaacaaattcccttttagattacaggggacagagggcaatgaactgatttcccaactcaatcccctgctgtacacatgaattaatcttgggttacggcacatgtacccttaagatcacttgcaaaaagatgtttaacttttgaatacttgccgcactggggtctagggtctgattaaggaggaggtagatgatagcttgctctaattggttacttgtggcgtgcttgcagtcaacttattgctccagtttatacgaccattgccagaccgtgggaaggacaattcatattgtcaatcttgatccagctgct

SEQ ID NO: 194168 - DNA, 674 bp, Zea Mays
aattgttttagtactttcggggcactttttatttgtgaaacatctaaaacaggctggtaacctgtattttgtgtggatttcaaacaatccattcatgtatctatagttgtctattgaagtagtttaacccatctgttgtagcgtaatatgtggatttcaggcaatagtagtctcctggctccgtctttgaagaaataaacctgcatgaccacacacttctggcagtagtgcaacacatgccagatctgcagttgccaacttgactcagaggtggcaggcaatcctgctcgaccttgccctaagcacccttgagtagaaggtgggggagcagacatcgaaaaggcatggtgcggggttgcagtgagggttggtgcacgatagagatgggtgtcgcaggcaatagagaagggcaagtagagagggctcagtcaacgcatgaatgcagagtgaataaatgggagtaggtattctgtttcgtgagttcattccaaatatggtgaatcaatacatgggtggagattgagcagccaatttagtgctctttttggttgcttgatgtgcctgtagtttgtgtggatttgaaacaattccttcactgactgttgaactgatgcaaaaatatgagagccctattgctctttgattttgtggatcttccatggtaaataattttg

SEQ ID NO: 194169 - DNA, 576 bp, Zea Mays
ttattattttcattcacctaatattttgtcacaaccaagccatttaaaatcattacttcagttattatgtaggattgtagtatcattggttgtggactcctttgtgggacaccagcaccgttgtcaacctaagcaacagcccagctcaagctgtggctatgcgacgtcagcagcatgcaaaacagaatggtggtaacgggagggaaattaggaaggattgttaggtaagtttgttgattaggaggtgcatctaaattataatggagcaccttagtttggattgtaagcatcgaagacacttcctgtgtcggggtgtcggatgtgggttttctcttcaacggtggcgtcagagttttccactgctgccgccatcaaccatgactccatcagttcctcgctattccctgcgtaccttgcctccccatctactcctacttattgtccacgccatatcaatttggaatcatatgtaagatcctaccgatcttatgagatcaggatactatgaaatttaagattcatgtttggttcggtatcgttttggcttggtagaatcatagtatactaacattctag

SEQ ID NO: 194170 - DNA, 419 bp, Zea Mays
ggagaattgtcgtggtagttgcccggtcgccgcagatgagggccagcgctggacagagcgttgcagaggggcgccatgtcttgcagcctcttgtacgcggaggtgaacaaccactacattgctcgggcgctggtgcatctacgactcccccacaatggaccacccccatcatctgcttcacccgccaacgcgctaggaaaccgcgtgctgcagcctgcaggtggacggtcgtcgttgtctgtcgtggagcaagcaccctctcctggacatcgctcttgggttcaagggtagcggtgatggctgcccctgatgacgggggcggtgtcggcgatgagggcacgacaaacgtggcagaagaagtcgctattgctgcgagggaaccaaagcgctgctggcacatgatcttgaactgtggccac

SEQ ID NO: 194171 - DNA, 491 bp, Zea Mays
tgaaaatgaaaacaatcaagaatcactagatgttgggactgcacaaaataatacggaatcaatagatagtgagattgttggtgatcctggacttcgaaaaccaattgaagagttagatgtgaacattcgagatgttgttagaagagagtatttattgttaggcccttgtcaaccaaaaggtcacatatttcccaagaagcgaataggagatagacaaagaagtttttaggaatcatggttcaaaaagcatgaatggttggaatacagtgttgctaaagatgcggcctttttgcttttattgtttccttttcaagcaaccaagaagggaaaactttggtgttgaaagctacactggtgcgacagggtataacaattggaagaatgtgattaagtcatttgatgtacatgtgggtaacattgatagtgctcataataaggctagaagatgttttgatgattttaaaaatcaaagacagagtgtgtcacatgta

SEQ ID NO: 194172 - DNA, 568 bp, Zea Mays
ttcagagccatccatgattagcttgttgcagtcagatataagagtagctcttaaagctgcctttgcaaacatggatggcccgttatcagtaattgattggtgcaggggtcgaggcaatgctgctgagtctgcaggtacgggagatgcatactcttttcagtactccagtggtgatatcctggagccgtcaagttcgttgtccattggtggagattcaatgagcccaccccagccaaccagtagcaatcgaggtatacctgctgtgacctgcactctgaacttgataattctgctgcaaaaataatattgccaaagggaggaagagacgatgattgtatcacaggagatttgcgtgtcactgcaggcatttcagaattagagttccaaaagggatatcaccgtgtcagaccaaccattgctgtcctcccttcaccttctatgctagtcgggtaatgtatcttttattttccatgaattgttttatcctgcttaagcatatgtatttgcatgagttactgatgcaagcattaaaactgcagttaccaggatgattggttgaaggcctcgg

SEQ ID NO: 194173 - DNA, 319 bp, Zea Mays
cggaagaagagcgcgatgatgagtggaaggtcattttagaacttatggaaggatgggaaggacacggagcgggtgatccacgtttgcacgtgattgtagtgctcattgacaccacatagaaggttgaagacgactagacgagcgtacgattagatacaggctctctactgcttgcttatgactgagctgaccctcatgatgatgctgtgatatttgttgtagaatggagaagtactgattgcttttatgttgttctagaatggagtaaataatgatgatgttgaaaaatatttaactagaaagtaagggttcagtttcc

SEQ ID NO: 194174 - DNA, 388 bp, Zea Mays
atttggtttcatcataaatttggtaaacaactaggtgcctatcatgtaacctctatccctccttaggtataaaaggaggagcagtgaaccctgaacatcaagaagatacaacagatccactacacccaaacttgtataaatcatcatgtctctcatactccaaccttcaatacccagtattgaacaatctttaacagttggcgcgctggatgggagagcacgaagatgaatcaagagttgatgacatctataaagttcgcaccagaagacaaattcacgtttggttccttacgattcatcgccaacatgttggacctcaagcatggcccgcgacatacgatgaagactattgtgactaaaccgccattatggcaactttggatcgttt

SEQ ID NO: 194175 - DNA, 372 bp, Zea Mays
tccaaatcgaggcttagagtgcaacatctagaaccattaacccagcggggtagcattcgtgtgctcgagaggtatgtcaccggcgtgaccaccgccgcatccggcctcggttgctgccgcctggtgacatcgggggattgaagatgaaccagtgccgctgattgtgggatgtgtggctcagattagaaacagaatgtcccttgttgattgcatctgtgtcgtcgatcgcaagttgtgcgaacgtgattgctttggggtcgtggaggcctcggggccatcagatcttcgatccgacggttggtatcacgtgcgagttcggcttgatgtcgatctaatcccagccattgaaatcagatcggtcggccagaatcc

SEQ ID NO: 194176 - DNA, 514 bp, Zea Mays
catttagtcaacctgttagctcgcgttccgatggactctcgttttatgttccttatggagaattgagaaccttattttgtgtgctgaactctaggtagcttcagttgttcttacttatcctgtttccaatttttcttgagaaatatgtggtatgtgcatacggcacagtggtttgctgattctatcattatcaaaccctgacagagagcactgagatagaactaggcaggactcctttctggattaagctaataaagataacatccaagtgccggaaaacaaaacaaattctgtcaaaatttacactcctttagattccatctgtgcaaattattgttccgggtatctcaaggggatatgcctgagaaataaaggttccgctcatgttagttacctctgttaaatgattttgagtacagaaaaaaatcaatctgttgaacactgttactgatgggctctgacttaattttagttcagttcagaataatattatttccgaagtcccaggctctag

SEQ ID NO: 194177 - DNA, 497 bp, Zea Mays
taacactttaccatttgttagagttaaaacaatcaattgagcactaacaagtagacttacaaattttatccaaatcatttagtgcactaaaattaccacattcatttaacaaacgcattcaccacaatcatcaaatccggcacatatttatatcgaagcgcatttcacccattagtccgcattttaacttagacaccacatgagcactactaatttttacctgcgaccataaccatacgcatttagaccacaagtaattcatcgtaactacgagcttaaccaacgccatctagcaagttggttaaccaaagccacaacctaggccgctatacaacatactcgtcggctaccctattattatcgaaatctgagacacaacatataccacaacatttatataaacatacatattcacatgtattttcacacatccacaaaatcatacgacccgtaaaccactattctctaactcgaaaccatcatgtgcttacttccca

SEQ ID NO: 194178 - DNA, 536 bp, Zea Mays
gtcagtgtctgtgtagacgatcaactcatgtgtggagcgctgaaggtggagacagtatttaacaataccctgaaggtaccgaaggatccgcttcatcacgctccagtgtgaatcacagggatcatgaatgtagagacagatctattggacaacatgcatgatgttgggcctggtgaaggtgagatactgaagagtgtcgataaagttgcggtagacagtggggtcactcataggagcacagtcaccagagagcttggcatgcgtgtccaccggggtcaaacagggcttgcaatctagcatgccagcacgctcgaggatatctagggtatactgttgctgctggagaaataggcccagagcgacgctcaacaacaatccccagaaagtggtgaagatgagtcaaatccttcatggtcaacccatgttgaagggcggtgatgatccggtgtaggaggcccgaagagaaggcaatgaacacgatgtcatcaacataaaataggaggtacacagtgtcactaacacactggtagatgaac

SEQ ID NO: 194179 - DNA, 278 bp, Zea Mays
cttggctgcaaactcttgtatagccggttggcatcctcctctgatgctgctggcacccagtaaaatgcctcccttgctgtgctaactgctcccacatcaacctctgatccagccatatcatatggttcatcatatgcatcctcccacagttcctttgtcctccttaccgcctcattgctcaccacttcgccataacaaacacccacttttgcaacattgtcactgatgcccatcgctaccatatccgtggcataacacacaggaaaactctggcatgg

SEQ ID NO: 194180 - DNA, 296 bp, Zea Mays
agacaatgacaggaagccttgcgactcaatgcatctaccaccacattggcttttcctgggtgatagtggatttccatgtcataatctttaattagctcaagccatcttctctacctcatgttcagttctgactgggtaaagatatatttcagacttttatgatctatatataaatggcaagtatttcccagcagataatgacgccatatcttaagggcatgaacaactacagctaattccaaatcatgagttggatagttctcctcatgtcggcgtagttgtctcgaatcataagc

SEQ ID NO: 194181 - DNA, 462 bp, Zea Mays
gtttatcactggaatgtttgtttctgaggatgattagtgcataagaggtagtgccataaggatggtagatcactatgcaattgaaccttatgttcaatacccgtgcgttgcaacggcacaatcatatttaatggtattgacggctgagcggcacgtgagagccgagtagcaaaacataatcagtctcctgttcatgagaacgatgttctgagccaaaatcatgattttaacaatttggagctacatctaggatgtcaatatcaaaccaaattatatcaccaaataatcgggttgcatccccctcggtcgggcgtgctgctcaatcgatctgggaggggctttttagcacaccaaaccagctcggttgcttgcagcaaatgatgggtgcagccctgcatgatccaatgatggattgacttgttaacgatctttgaggaattctctctgctggttgacgtggcg

SEQ ID NO: 194182 - DNA, 449 bp, Zea Mays
ggctaatacatgcatatatacttaaaagaatgaaaaaaaggagatcagagtggtcaatatcggggagaaagagaaggcccatttaacgtcacaagtctcctagcgtaacagcttatcctctcccctcccaaactcctttgttgatgcttgtcactcgcccacgcccttgacatcgcctgcttccccaccggccattgccgagaaggcccatttaacgtcacaagtctcctagcataacatcttatcctctcccctcccaaacttctttgttgatgcttgtcactcgcccatgcccttgacatcgcctgcttccccaccgtccattgccgcccccatcgatgttacctcctcccccactgccacatgacgtctgtgccgcccccatgcgtccttgcctgggcagatgtgcctgccgccaacgcctagtgcagcctcttctcccactggcc

SEQ ID NO: 194183 - DNA, 494 bp, Zea Mays
aaccggctccctctacattgtctagcgcttctgcttctccgcctccgtcgcctcgccaatccctgcaaactatcgcagtgctcttgccaatccgaattggtgtgctgcaatggcggacaagtacaaggcattgatcgacaacaacacttggtgcctcgtacctcggtcacctggtgcgaacattgtcactggcaagtggctgttcaaacacaagctccactctgacggctccctcactcggcacaaggcgcgctgggacgtcagctacgacatgtgctccacaactccatcccacgtgcgaccgttgtctactgtgacaatgtgagcgtcgtttacatggcggctaacccagtccatcaccgccgcacgaagcacatcaaaatcgacatccacttcgttcacgagaaggtagctctagggcagtttcgtgttcatgtcccatctacgcaccagttcgccgacatcatgaccaagggtctgcccatccagctctt

SEQ ID NO: 194184 - DNA, 335 bp, Zea Mays
tttctcttacttctgcatattcttgcacacagtcttctctttttagaaggtgtacacttattcatgttgatatccatatatgctaccttagtgggtaaacatttacttaaagcagacattggttattactgcaataatgcaactatatcctttctacatgactacaccagtgcaccatgttaattctttcagatgatttctgcctgttttgcatagccttgtatgttgtcttcttttatactgagggagctcggtggcgaagacctaaaggtgaagactgtaagtttgtcattaagtcattttgactttttattgaatgataacatggatctgat

SEQ ID NO: 194185 - DNA, 521 bp, Zea Mays
gccgggcgctgccggagtcgtagtagtgcccagtccccaacttggtactccaccggacgatggtgctaatcatagacacgcttttggaccgcctgggcctgttcgaggcggtagcggacgtcggcgagaaaagccgtgcggtcctccatctcctgtgccacagctgccacacgcgtctcaccaggctcataagagcggatggagggcgggtcgcggccatagaccacacggaacggcgtctcccgggagcgacgattggaaagccgtgttgtaggtgtattcggcccacggaagccagcgaagccactgccgaggacgatcgcctgtgaaacaacggaggtacatgacgattaccctgttggcggcctccgtctgtccatccgtttgcgggtgaaaagccgacgacatgaagagcttggtgccagtgagccgcatgagctcggtctagaatgtcgacgtgaacaccgggtcgcggtccgagacgatggattgcggcacaccatgaaggcggacgatgtcgc

SEQ ID NO: 194186 - DNA, 1078 bp, Zea Mays
accgtatcctgaagagagatctggatactgctcttactgccaaagtggaagctgaggagttgcttaggcaagaaaaaatgcagttaacatgtgctcttgatgaggcaaaatataccctttctgagaggaacagtgagctgacccaatttgagatcaattttcatcagcaaaagcaagcactggcgaacttagagaaggtgaaggttgatatgggaactgaactcaaaacatgtatggatgaaaattgtgtgctgaagagagatttgggtgttgctcttattgccaaaatggaggctgaggagtgtcatacaaaagaaaaggaggagttttgtggcataattaaagagaaaggaatgatgattgataaacttcagcaatacgtcgctgtgctagaagaagaaaacatggtcaagaaacttgatttgggaagtcttatcaagatggagtgtgacaagtccattcgtgaagtgaagaactggtattctgaaattgttgagatctctgacaaaaagcttttggagctggaagaaaggcttagattcgctgagcagaaattttcatgcagggagcaggagatcatgaatatgtttgatcaagaggaatcagattggtatacactaattgcagagaaagaaattgctatttctgatattcaacaaactgttgaatctgttcagcttgacatcaagcaccttcttgaggcagcagcagcaaaagtggcagaagttcagctagaggtgaatcaactttatggttttgctgaaactctgaattcacttaacatcatccaagagcatgatactgttttcaaggatatgctcattgcagagtgcgaaagagaacttgactccctgcaggtgaatttagtgcaagagaagcatcagtcaagaaatttgaagaatcttattgaacagctcgaagctcaaactgcttcagaaatgtcagaaaaggcagaggagcatctagaagttacgaataagctgaaatcattggaggggagaaatgaaacgttagatgagcatctgcgagagcttaagtctagaacaactgatatgtctaaagctgtactacaagagag

SEQ ID NO: 194187 - DNA, 323 bp, Zea Mays
gccatgcctcaacatccttgcgtgccgcgagacagataggttgtgcagcctcgaggtacaaaatgtacaatatgttcttccctcgatgtaccttggccagcaatcggtgatgattgtcccaaatgcggagcacgccatggttaatcacaaccttggaccctccttcatcaagctgtcccagacttagtatggagttcttcagcgctggaatgtagtaaacgccgtgaagaactctctgctcaccagtcttggcttgaaaaatgatggatccaactcccttgatttccaccttcgatgcatccccgaaccggaccgttcctcga

SEQ ID NO: 194188 - DNA, 422 bp, Zea Mays
agaacattcttcctgaaaacaataccttttttgctgactcctggtaatcatcacatcttgaaatttctcaaattatatataacccctcacaaagaaccaatgcaaagacaaatatcatgacattgagtctgagtttttttagtcagaaataagagtaatcgggtcgattgacagaaagaaaattcaatgaacaacagtcatcatacaacttcagccgattgatagcaagagtagtacatgggaatttggggatgactgtgagatcgggccagagaggcggagcaggcatgcccatcataggtcgacctgatcccatcgtccctcactccctatcaaatggtgagagcacaggaccagcgttgcaactggtgggtggaccgaggcgatggtattggtggccggcggcaggccaactccgcacg

SEQ ID NO: 194189 - DNA, 965 bp, Zea Mays
cgctctccggccccattccggcgagcattgccaactgcacttcgctgtacaacgcgagcatggggttcaacgagttctccgggcctttgcctgccggccttggtcagctacagaacctacacttcctgtccttggcggacaacgacaagctgtccggcgacataccagaggaccttttcgactgcagcaacctcaggacgttaaccctggccgggaacagcttcaccggcagcttgagccctcgcgtcggcaggctcagcgagctcagcttgctgcagttgcagggtaacgctctgtccggggcgataccggaggagatgggcaacctgacgaagctcatcgccctgcagctcgggggaaacgggtttgtcgggcgcgtcccgaagagcatctccaacttgtcgtccctgcagaagctcacgctgcagcagaaccgcctagacggcgccctgcccgacgagatcttcggcctgcggcagctcactgtcctcagcgtcgcgtcgaacaggttcgtaggcccgatccccgacgccgtgtccaacctgcggtccctctccttcctcgacatgtcgaacaatgcgctgaacggcacggtacctgccgcggtgggaagcctcgaccatctcctcacgctggacctctcccacaaccgcctcgccggcgccatccccagcgcgctgatcgcgaaactgagcgccctgcagatgtacctcaacctgtcgaacaacgggttcacgggcccgataccgaccgagatcggcgccctcacgatggtccagtccatcgatctgtccaacaaccgcttatccggtggtgtcccgtcgacgctggcagggtgcaagaacctctactcgctcgacctctctgccaacaatctcaccggcgccctgcctgccggcctcttccctcacctcgacgtcctcacaagcctgaacatctccggcaacgagctagacggcgacatc

SEQ ID NO: 194190 - DNA, 612 bp, Zea Mays
gtttgctacaacaccttactggccatatatgtgaagacagggaaatatgatgaaattgctactgtatgtgaagaaatggagaaattgggcattgagaaggacactgttacttacaattccttgattaatggatatggaaagcaaggacgcttggacatggtcgctttccttgttcaagatatgcgggcgcaaggcgtagctcctagtgtgctgacatactcaactttgatagatatctattcgaaggcaggaatgcatggagatgcatttaatgtctatttggattttaaggagtctggtctaaaggcagatgttgttctgttcagctcttttattgatactttggccaagaatggcttggttgagtgtgctttgtctttgcttgatgagatgatgaagatgggtatcaagccaaatgttgtaacctacaacacaatcattgatgcatttggcaagtcgaagatttttactgaggaggattctgatattggtgacatgggaattgttggggtttatggtggccaggttgtaagggtcactaatccagtgataagaggagggcgctctgccactgatgttaggatgaggaggtcacaggaactatttttcatt

SEQ ID NO: 194191 - DNA, 326 bp, Zea Mays
cctctgtgccagcccgccgctcttcgtcgacctccgttccggcgctctggtcgagggccgtgctcgccgcggtgcacagggacgacaccgcgttctgcattggcgagggggaggcgactagctgctccatggaggagaaggcatacatgcaggaggcaatggcagccttgcgagtggctaaggaggtgcttgggatgcaggaggggtggaggaaggaggcaattagggagatgaacagaactgggcgattctcgcgctcattggccaattcggctactgactggccgtgcctgttgctggatgttctgtcacgtgcggcagaggag

SEQ ID NO: 194192 - DNA, 271 bp, Zea Mays
ctgcgacatgctgccccacggcaggcccggcgactgctactgcaccaactgcctagcgtagttatgccactatctaggacggccggccggccggcggcggagccgcctcgatgtctcgatccccgacagatgatatgatcggagctggcaaaccaccagggacaggaaaacaaaatacttattagtcgagtcatactatttgttatatgtctgcatttttagtgagctactactttggatccgccgtttcttcgtcaattcatggtgtccc

SEQ ID NO: 194193 - DNA, 375 bp, Zea Mays
gtaatggtcctagtggagtatctacagctatggaacttggttgatggggtagttctgcaacctgacatcgcagaccaacacatctggcgcctctctgctaatggtacttattgtagcaaatcggcctatgatgctctctttgttggctctatccattttggcccttggcgacgtgtctggaagacctggccccccttaagatgcaaattctttgtatggttggcaatcaaaaacagggtttggacagctgatcgaccggcaaaaagaggtctgccccatccagttgtttgccctctgtgtgatcaggccgaggaaaccatccagcatattcttgtctcctgcgtgttcgctcggcagatatggacgtccatacta

SEQ ID NO: 194194 - DNA, 522 bp, Zea Mays
gcagatattaagtcttggtaccatatgaaaattggagttactttgatcaaatgatgggctgtcagacgcagtttttctaaatcccatggtacagtgcctgaacggatcagagcaaccgcgcatctcaccaccgacgaccgccgccgcgattcgtgccaccgccattgcgattcacgccgccgatgacccgataaggctgccatgtaatagctatgcgcctggagatgactctggtgactcaccgtcgtatcccccttgctttgcggcctgagcagataagctcgccggtgacagccgtcgcacggcttggcgccacgtgccctggaacctccatcggatcgccgtgaaccgctgtaaccctctgtccatcgccggagtgacagccacggtgaccggacactaagcacttgcgccagtaacctttcccctcctccgaccgtcgtgcgtctcgcccaaattcatcagtcgccgcttaacaatcctataaattgatgatcggggctgttgcgccatgtaatcacg

SEQ ID NO: 194195 - DNA, 483 bp, Zea Mays
ctgctaccactaatacacatcgcccccgcacatatcgatctcgtcgtcgtctcccccggtggcatgctccgctcccgctagatccgatctattatctatggatccccgccgtctccccatccttctctccctcctgcttgccttcttctccgccgttgtcgcctctgacgagatccacggatgcggcggcgtcgtcgaggtcgacgttcctcatgttgctctatctccgtgtacagtgtgtttcgctttggttaggtgtgacttgttacactgatgcgacttggggttttgggtggtttcaggcgagctctggcttggccaagtcgaggaaggcatcggattccaagctcgattactccgacatcacggtatgccgtccgctcccgccatcgtcagtttttatatcttaggaccgtctcatcccatcacgtagacaagcttcgtagttgcactcagctgtcctttcctatcgagctttgactg

SEQ ID NO: 194196 - DNA, 306 bp, Zea Mays
taaagctgttattacattgtttttctatgcacattaaataaatgcaactataatcatgataatgtgttcattttagggaataaaaatgctttgaccattctgagcctatgggcaccagtcttagctgtaagttccggttttgacttcaaagttcctttgatataagaaaaatgactgcaactgataaattatgttctttcatttgtgtttacaattttacagatatacctgatggacatccacatttggtacactcttttatcagcacttgttggtggcgttatgggtgccagagatcgccttgga

SEQ ID NO: 194197 - DNA, 476 bp, Zea Mays
aacaaaagttaacctactttgctcttgtcaaagccacattagttctcataacacaatcaagaaagtatatattcccaccattattttgtctaactgttgaaaggattaatgtccttctcagcaccttgacatgaatcaacagtgcatacttcaacagaaagaaagtcatacttttcataactctgaattctttcttgcaaagaaattacttgggctgcatatggagatactataccaacgctggttttcttcttctgctcggcgcatgctgtagtggttatagaccaaaaaaacatggatgtcacttaaacatatcaactttaatgaaacttacatgttctttatcagctcaaatgttagacttaccttcagcaagtctgccaacaatatttgctaccacagcagcttcaacaatatttttaagccctgtttattgttttcttcgaaaccaacttcaacatggatgaatgaataag

SEQ ID NO: 194198 - DNA, 399 bp, Zea Mays
cacatttcgtgctgcctgcgaggcgcgtgggttgcttgagagcgataatgagtggaagttgttgtttgacgaggcgatcgtatccgcatcgtcgtaccagctcaggcagctttttgtgaccgtggttatgttctgccctgttgctaatgtgcgtgcattgtttgatacatactggctatcttttacagatgacattgtccgacaacttagagatacattgggaaatcctaactacaacataccgcatgaacaactcatgtctctcctgatacgcaaactttcggctgcctttgctaatagtggcgggaacataaatgattacggtctgccaaggatagatgtccaatgcgctttcatggatgagaacagattaattaatgatgaaattgaccctgagcc

SEQ ID NO: 194199 - DNA, 569 bp, Zea Mays
cttgaatatttcggtgcaactcctgtataaacagaacacccgtccaaataaaacacccaaaatgcaatatcaagttaggcaagtgactagcattttttgaagcattaaggaaaaatacgaagactaattatcaacataccatcttgacgctcgtcgatgccatcaggatccaaacctgttggtgcagtatctgcaacagtttctttaggaattgtaacagtgtcggcttctacatcattcatcgacacatgatccttatttggcaatgatgctttgctaggtgaacttcctgattctagagatctgccttcttccgattctgtcttcaactcctgtatttcctcttggttcaatttggtagggtggagagacaaatcatcagcattccctgaactgattttatcttcgtcttctgaaacatcattaggtttgctcagtatcatagaaatatcatctagtacaacatcctggacatgctccactggatgatgtactttctcggtgtaattgttgcagccaatagccatatctaaccagacaagacaataactatgttagtaaacgaaaaa

SEQ ID NO: 194200 - DNA, 804 bp, Zea Mays
actcgttccctgcgccgccgcggacgccacatctcgtggtaaggatagattctgattcgaagcctctatcgagctgaattgccagctcgaggttaaacctttttaaagctcaacaagttgtaaccttttactcgcaaagctcaagccttttctgttttcattcagtgtgcaattttcagttaactgaaaacataacagaagcacattattgttcatagttagtcagctattaggcctcatctatatccaagttctgtgaagttgctgttccattgtgccatatgtacaatgtgcctaattaatgaaagcctaattttttgaactagtttcctacaaacaaatcattctctcttctttttaacaaagataagggtcatgctgcaatgattcttactgtctaggttaacagttaactaatgccccctctttctttcatggtgtactcatcattatgcacactatctgatttttgtaacactgactcatttatctagatcataacacgccagatgatgccaatggacaaacgcaggatgaaaccagagacaataggtctctggttgataataatacagctcaaaatttatctagcgatgacatagaggcaatgaagaggtgatattctgatcatatttgacttctattgaatatacactatgttttcttctctgttcactctgatttacttccaagtatgtatgcaatttgattttccaaaacagggatggtgcaactggtgacgagattgtagaagctttaatagcaaacagctcaacatttggaaataaaactgtcttctcacag

SEQ ID NO: 194201 - DNA, 369 bp, Zea Mays
ccgggttaccaacaagaggattcctgctgtggatttggtgagtcgactggaaatgatccttagagcaaagtatcaaacattggtgctcttgttgcatattctgcttggaatctgccaccttccaagtcctttttcgattttgtgtcaaatcctcctgctagtgacagtggtttgggtcttagagtgcgaccctctcttgaagaagttgaggttttggttgcttcgcttggagatcttcccaatgatgagaggcaagttcactttgagatgcctatgagtccgggtgatgcagagataagtgctatgctggacatgttggctggggattcttctgactcggtccctgctgaaacaatggctgttgcaact

SEQ ID NO: 194202 - DNA, 389 bp, Zea Mays
cttgggaatgccctatcgccaaatcctgactccacaactgagcggaaaccagccgtggctgtactatcagcgattgtttttggctgtagaggtgaactggtgaagtgatgggcacggcgatcgtaagcgacgggggcggtgagggaagcgatggaaagtcggttgacgggtggcaggcagagaaggccgtcgcgggcaaccgtagggcactcgaggcccttcgggagctcgtggcttatcctttcctctacgcccgcgagtcccgtttgctcggcctcaaggtaatgtgctcccgtctcttgccccccatcagacttcgtcattgtctgctacacctccgaattaatcattcagcttgctttcttcagtggcccagagggttgctgctc

SEQ ID NO: 194203 - DNA, 274 bp, Zea Mays
cggggttacctgggtggagacatatcaattgtcgataccatcatcacccaagatgatacagaagcagatcattttgaacaaatggttgttgacaaagactccaaggagttgctgggtccaaatgagtctgattctgatggtagccacccaaatatttcagaacctgaattttctatccaaggggaagatttacatgattgctcagctgcaaaagtagaattagatctgcttgaaggaactagaggaacctcattagaaactagtgagcctgaac

SEQ ID NO: 194204 - DNA, 359 bp, Zea Mays
catggggaaacccataacgttctggagctgcaatagtgccacggtcacgaagatgataaccctgattaaaaacaacatgagagtcatcattgttagtacaagtatcaacaacaggatcatcgtcaggactggccgtgggagtagagcgaggacgacgaatgtaagtctgagtgacatgtggtttggaagagtaagactgagatggtggggaagtggaaggtgatgtgatgggaataagaaaatctggggtagaaacagtaggtggtgatactgatgaagtttcagaaattggaggaaagctcatgaaggaggtagactttgtggaataaaaagaagaattagtggaagagttgtaaaag

SEQ ID NO: 194205 - DNA, 574 bp, Zea Mays
gtgcagctcaatcgccgagaatgcttatcttctacaactggtgattcaaattcctccggctcagcaactgagagctcgttcaaaatacattccaggtcctccagttcggcatctgctccaaactgaccctctgcttcaagagcagcggtaggcagtgaagcagctttgactattccatcctgtttgtcttccatgttctccctttgaacagcaacgtcactgacggccaccacctcagttttcactccaacagtctgatcttcagcgacatcaccacttacttgcaaaggcttgaacgatccctcttcgtcaattttgaaccctgaatcctcctcctggccagccgcattgctggtttccacatgtttgagcctttgcgggtcatctgaagcaacctcaactccatgctccacaacattgaactccaccgtgccccaatcgccatctggatgcaccgagtccccctttttaacctctaccgatgtgcagtgctttgcctccggagacccctcttccgtgcagtccggtgctgccagctcctccttcctcgcatcaggaaccccgtcagcaacag

SEQ ID NO: 194206 - DNA, 349 bp, Zea Mays
ggccagagttattcaccggtggccgtcgtggctcggtcaattccaccacagtgtcatccatgccttgctcctcccttactgtacctcttctatacatggtttccatgcgtgagcaaagccttctgcggtcactgatcgttagccggaccgtcgtagctataaatagcgccatggaccacggcgaggtattcacatctccaccagtgatctcagttgaagtccaaattcacggaatcctctccacctctcccaaaattggtagtgcacggtaaaactatagttccttacggccgtgtagccccaatctcacctcccaattccacccagaaccgtcgcagcgccattttcc

SEQ ID NO: 194207 - DNA, 393 bp, Zea Mays
gtcgggaaggatcaggattgtcgctggtgatacacaccttgtgcgcacttgaatccagagtgcattcaagagacggtctgatgtttcctgtggtactggtgctaccaaacgggctaactgtttgcacctttgcctttccaacgctggtgcagactagaggaatgtgggaagaatccatcgcagagatatttgttttgtgttagaatcatcaggtcgctatatctatgctcaaaagcctgaaaacaagaaggacaagctcctaacgaacgggcatctatcacctcgtgcacaggttctacctgttccttcaaatacagcgcagggatccatcaggctgtcacgctcgtgcaaccaaggcaccgccatacgggcttctgtggccctgtgccgctg

SEQ ID NO: 194208 - DNA, 355 bp, Zea Mays
gtttgtgcaatgcacctgagtaatggttcttgctactctcaccttgatttgcttggccgatgtccaggactttgatttgcttggtggatgatgttcccagaccactgaaagtggggcagcttgaataatgtgtcattagttggaacttgcatcccagttttacggttgatgtccaagtgttaatgaacttatataattttataactaggaagtggaatacgtctgcactggacataatttttctttaaggaaaaatatgttcttttcgacattcgttagctctgctttctttgggttatgaagcttaatatgctttcacatgcttagctaaatgattgaccgtttcttgctaatc

SEQ ID NO: 194209 - DNA, 783 bp, Zea Mays
attggaggaacctctagtaagtgattcgcagaggactgacaatataacttcagttgaagagaacacaccattgcatagtgataacacaataggtaaagcagaacaatcaaacaaaccatcaccaactggatcccaaaccacagctgcgacgtatgaagtaaaggagtccttcagtcaattccatgcatcatctaaagacgtgacaggtttgtttctctatagaacatgccatcatgtgcacccagctatgggataatgatattttttggttcacaaaacacaattttattggtatgtcagataatctatagctgcctagaggctgtgccagtaaagctaccatgttgttttgtcgtttgaaatttctacttgcaaaatgtggagtaattctaaatgtttttcgttaataacaaaaccaataatgctgtaatgctgccgaaatgctaagatattaccatgttacacggagaaaggagcttaatacttgtgcagtaacactcttttcgttttccattaggaaataaccagagattgagttaggaaatttaacctcactaactacccatgttggttacagtttgttcagaactagtttaatatatgctagtgtgtcaatgtgatgaaaaggagtaacgaaaagtataaatataaacctcttatgcaggatccacgcaaaaagaggcaggacatgtggtaactgtgcagcgaaacggagcacgccaagagcaaattcctctctcacggcctgctgttgatactaaaactgataccagtcatctaggc

SEQ ID NO: 194210 - DNA, 403 bp, Zea Mays
ctcttaactcaagcccacagatcccgatcggacggcccaatcttcatcaagcgctacacctaatctgaaccgaacgatacacgatccacggccgaggtgctatcgagacccgagtcaaatctgaccgcacgatatggatctaacggcccaaacaccgtcttctcccccccggtcatccgagcggccaggagcagagctccacggcgcgctcaccggcgagcacccgctgacggcccagtaccccgaaagccaccccgaataattccacatgaagtgcacggtactgtgaacaggaggaggcagagattacccgcgtttgaacggtgacgaagctcggccacggcgacaggtgctccgcggcggcgctgctcgcacaacgaagaaattcccggagcctcagctg

SEQ ID NO: 194211 - DNA, 528 bp, Zea Mays
gaagctacaacataatgaaaaatccgtacctctgaaagtgactgaatatatgcagaaagaggttcgccagtacgagaaattatattaacaagcaacccagtgcaatcaacaagaacaatcctttcctttagaagcttctggtcattccatttgaacctttctcccatctcaagacaaatgaaaacctcagtatacgctcattgataatgtcaaactcatctttcttattactgccatttatcttcgaggaacaacccccacagatcttcccctaagcagccagtagtaaaaccgcagactggataagttttacattctcaatgtagttccagagctcttcaagtagattatttgttttttcagcaagaagtctaattgtatccatgaagatcttctgtaaaacaacaagtaacacaaatctaagtgttatgtagaatttgtatgcaagcaagtagtgttgaataactttaaatgtattacttcatcttctcctatcaaagtaatgatggcttagaaacattctccaag

SEQ ID NO: 194212 - DNA, 672 bp, Zea Mays
cccatgtacatgtactgacatacattaatatacctctgcccaaattaggattagggttttcagtctatccaacatggtatccaaagagggtttcttctctctccctccggtagccgccacatcccttcacgccaccgacgacccctgtctcctggctccgaggacccgccagccatctcccaatcatcttcccatggtcgacacctctagatcgacatccccgccgacacgaccatccctggtgcgatcgtgcggcccgagccaccgtcggctctgttaacggcgcagacacctccaactctagaggcgactgcgtgcacgctcgatcagccctcgtctccctcctcggctccttcctcatcgtcgtgcgctcccaccaagaccacatcccctgcgctcggcacctcccctctgctccagactgacgccacaccctgtaccccgacacctcccctctacactaggccgacgcgcgcgcctagggctctccactgcttctcccagcaagaccacgccctctccccacctgcgatgagctctcctcctgtgaagttctctccaccgcgtcaagcagcaccggctctgacaaccatgatgttgtcaccagatccagcagctcccggctccacctccaccacccgtgccctccgtcgtggtctcatcgacccatgg

SEQ ID NO: 194213 - DNA, 556 bp, Zea Mays
aaagttcaagtgttcaactaatagcaactagcaaattgacaaccacaaacaaagtggaatgaaatgtgcagtagtccacaaccataaacatatcacaaaagcaactaaagtggaatgcaatgtccacaactgcaagaacacaagtgttactcaatcttcctctatcatatctcaattagggatggaaacggtcgaaaacgatcggcaaacactaaaaatcgttactgttttcatatttttcatcggaaacaaaatcgaaaacgataactttggaaacaaaaacgatatcgatccggtgagctggcagagcagggaggcgggggccgacgagctagcagagcagggaggcgaggactgacgagctgatagagcaggcaacagtggcgcctagcgcgagcagtgtcagtagggaggcggcgtcgcgtggccgtgggggagaagggaactcgagcaacaatgcagagaggagaagggaactcgagcaacaatgcagagatgaacggacgaaggcaccacgagtctgtgacggctggctcaacgctcaacgaggctgtgg

SEQ ID NO: 194214 - DNA, 562 bp, Zea Mays
gtcgacgaccagcacgcgcgcgcgtccagcgcaaccgcgtcacggaaccctagcgtcgcctcgttcgctgcccaactctcctccagactccagtgcacaggtctccatcacggggaattctcatatagcaagtcgtcgtcctcgtcctcgtcctcgtcctctcctccggtgggtggatcggccatcgcgccgggccgggcgggcatacctacgtacacactccccggttcccgtccccgtccccgtcccgcattcgattggttccttcgtcttcgtctgccggtaaggaattcaattcccggatgggttttctacgatcgagtgcgcttcggtcttcgtctgcttgttttgttatactctgcttgctctgaggtctcagctagtccctcagctaccgcacccaaatccaaatcctgcctgctgggatggatggactgccgtccaagcaacaaaatttgttgcggatctgttccttcggaggtgggacttttttttgtcccggcttcaccgattcttctcgctgctggggcgggactgcggctttctggatctaattcggcgt

SEQ ID NO: 194215 - DNA, 287 bp, Zea Mays
gaagattctgatgacagtgatgattatgatgtggaaagtggagatgaagattctgaggaccggccctggcggccaagccatactatcttcggaaaatcgacaattaaacaaagtcaaattgacaccatgagagaaagatactttcgcgatatatctattgtgagggttggaggagacaacactgtccctactcctgaggaaaatgaagttgttgtttaccgaagctttttgaaggcaggccttcggttcccgttgagcaaatttgtggttgaagtgctgaagatatt

SEQ ID NO: 194216 - DNA, 351 bp, Zea Mays
aacactgcaaaaaataatgacactagtgccgccaatgtgcatggctatgaacgcgaagaactggatgaggtcctgatgctgctcgccaccttcgcagtcaccatcacgtacgttgcagggctgaatccgcctggcggcttttggggcgacaccaaggatgggcaccagatgagcgaccctgtcctgcaggagaactactccagacgctactgggcgttctacgtctgcaacaccaccgcgttcgtcgcgtccctgctcatcatcatcctcgtcgtcgacaagaagctcaccgccaagctctccgtacgcttcgtggctcacggcgctcctgggcctcatgggggcttacgc

SEQ ID NO: 194217 - DNA, 1317 bp, Zea Mays
cagagacagtgtgcaattccagtgctaccaaggttaacaatgtctggtcatcgcatagatccgccttgtggggtagcacatcttgagatgccctatcatggttctgttgacatggagtcagcttccatgcacacaaaacatttggccgcaattgctaaagaggctgtagtgtcatctgacactgttcctggagcaaaaatcagattgtggcgtagaataagggagtttaatgcatgtgtaccatacactggagtgcccgtcaatattgaagtacctgaagtggtcgtactggccttgatcagtcttcttccaaccataccacatagccttcctgctgatgctcctcctcttctgcctccatctccaaaagcagcagcaacaataatgggttttgttgcatgcttacgcaggctacttacatcaagaagtgtggcatcacatgtgatgtcgtttcctgtcgctgttgggagaataatgggtttgcttaggaatggttcggaaggagtagcagctgaagctgctggacttgtggctatgctaattggtggtggtcccggtgattcatccatcttaatggatgcaaggggagaatcccatgccacctacatgcatgcaaagtctgtactgttctcgcaaccaatgtatgttccgatccttgttaacaggttgaggccaatatcggtgtcaccgttgttatctttgtctgttgtggaagtccttgaagctatgctttgtgaaccccatggtgaaacaacccaacatgctacatttgttgagctactgcgtcaagttgctggtttgcgccgtcgtttgtttgcattatttgcacatccagctgaaagtgtgcgagagactatttctgttataatgcggacaattgctgaggaagatgcaatagcagcagagttcatgcgtgatgctgccttgaaggatggtgctcttctgaggcatttactaaatgctttcttcttgcctgctggagaacagcgtgatgttagtcggcaacttgttgctctttgggctgattcctatcaacctgcacttgatttgctatcaagaatacttcctcctggacttgttgcttacctccatacacgttcagatgaagaatcacagagccagtatgatgaagcaccgttgagcagaaggcagagacgaatacttcagcagaggagggtccgtggtagtaaaagtatgtcagtacaagaacaaggggtaccccccaatggtgttgaggatggggaacccttcaggcacaccagtgcgggcacttatggagtagcagatgttcatcagaggcatgttggcccatactct

SEQ ID NO: 194218 - DNA, 484 bp, Zea Mays
ctctggttccttcggcactgtggcaagaagccggagccatgccaaacagggtctaaatgttggccttgtgtaattctactgtctatacaattgtaccctccttgttatgtcctcctctgctttgctcatattcattacgccctgcagattaatttggtgggacaacttcatcttttgtcatctactgtgactacactagcagtgccatccccttcattgcttgccacagtagctcgtatgaccttcatagccataataccctttgctttatattctgaattatttctagccatctaatttcacatatccaaatctttcccatctgaaggtggtggaaacaatcctgctccagcagtgccacttgttgctctggggactcagaatggaactattgaagttgtagatgttgtggcaaatgcagtttcagccagtttttccgttcatagcagcacagtgagaggattgagatggcttggcaactcac

SEQ ID NO: 194219 - DNA, 487 bp, Zea Mays
ttcacatagttcagtcatgatcaacacggcactgcttcctttgtatgaaatgttgaccaaataggcgatggaaaacatttaaaaaaataaccagagacatcatgtgtaaatgttctgttttaaattgataagtgttggggaggtctctagccgacaatccaaattgatgaaatcaatgtttacatggtttttcaggtgaaggatgccaatcaaggccaaaggaagatcatcgccctctttgaaaagctttggaacatgtgaacgagtcgaaggtgcacaaagccgaaggtatggaaggcaaagcttcagagtcgataaagagtacttcagagaaggggagagataagaagcctctacaaaaagaagacgtgtgtgacacgtctgtgcagtgaaatgacattattgcactcccttaaatgtgaagggtgactatgtaatagggagggacaaacgtgtaattttatacgaaaatgtacgtggatttgac

SEQ ID NO: 194220 - DNA, 546 bp, Zea Mays
cctagtgcaacagctagctcatggggtaggtgatcagtggcacaataattgtgagcaggatgttgaacctaatgtcccatggatgtttgttggaatgccacagcaagcaagtacatacccagtgtctagtgaaatgggtcttacagtggcatgggacggggagatgcaagttgaaactcacacacatgagggattactgcagcaacttgctcaaggtggagaagccttagaagaattggctgagaagaagggtgatgttgtagatgagaccagcaagtctgacccaccaagtatggcagttgctatggttatgaatggtagaagcatggaggggcttcttcctgctagtgttatcagtgtgcttgaggaaagccctgagaaggagcagaatgctgaaaatgttgatgctactagtgctggtggtatcctttctcaagatttggtttcagaatcaacccatgaaactaatggtgcaggcgagattataagtgcccctaaggttgatgatgaggattgggagatactacaggttagagaaatcagtga

SEQ ID NO: 194221 - DNA, 462 bp, Zea Mays
ccaattatattttcttttccgcttgcatggttaaatcagctcttgacttgacactgctgtttcaggttgattccttgttacatctcccatctgcatgcagttccgcaatgtcataggatgcctacatcaacaccaagcaagcaagcagctagctagcgtggttagttatatcttcaaatcagtctacagggatggatctagtgacaggtccgctagccattctcccgtccaagctgcaggagctactccaaatccaagatgagtataggctccagaaggaagtgaggggcagagtggagatgatctgccgggagctgcaaagtatgcacgctgccctccgtaaggtggctgatgtgccgcgggatcagatcgacctccagaccaaggtgtggagacgcgatgtcagagaggcatcctatgacattgaggatgccatcgacacctttctcatgcgcatcagag

SEQ ID NO: 194222 - DNA, 876 bp, Zea Mays
tctacatctcgtgaaccaaaaacaccccatgaaatgtggttccataaagaatacaatgctaagctgaaatctgcagtcacaacccttaagatgccccctggatctccagcagcattaggagagatttggcaaccttttgattcaattgctgcttctttagccacacatcaaagaaggtcacacataatgttaagtgaaattgctccacagctagctgttttgtcaacctctgacattccaatgcctggttttgagaagatacttggttcctcagaatccttttctggaaaccatggcattgtaaccatatcttccttctgtaaagaggtaacaatactttcaacaaagacaaggcctaagaagctcatcttgcaaggatcggatggtcagaggtacacttaccttctcaagggccgggaagatttacgccttgattcacggataatgcaactgttggaggcaataaatagcctgttgtattcgtcttccgacactcgaagtcgaaatatcacactacggttctattccgttacaccggttagtggacgagctggactgatccagtgggtggaaaatgtaagcagcatatacaatgtgtacaaatcatggcaaaagcgttcacagttggcacatgcacatgcagaggcacaagtatcttcagttagcactggtaacattcacaaccctgttgcacctgttccccgtccaagtgacatgttctatggaaagattataccagcactgaaagaaaaagggataaaaagggtagtctcacgaagagattggccattagacgttaaaagaaaagttctattggagcttatgaatgagactccgaaacagattctgtggcaagaaatgtggtgtgcaagcgaa

SEQ ID NO: 194223 - DNA, 1038 bp, Zea Mays
cagatatgcttttgtgatacaaaacataagtttcttgtcatatgaacctagtaacattcaatacatcttttttgtgctcttctaaatgtgatttcttttaaactaactcaattaaatcttccagtggaaagcatgggcctctgaagttatcctctaccagagtgatcagcatttcagagtatttcaaggaagtgtctttgctggacagggcacctaggaaccgtttcattgaagatattgacgatgacctcccgttcttaactcatgatagggttcacaagctactgagatctggattacccccttgtatttcagcaagacctgtggcttatcgattcttgacaccgatttcattgaagaaaaccttggtgtgctgcctgagttggatttactggtattcagatcactgaacatgagtcgctctgagtctgaaatagataattgctacaaaccattcgtgaagctcttcaaggctcttgagggtaagtatgctggaagggatgcaatcttcaagctacccaagtcacttgatctgcatttgtagtaccttgagttgcctattgtcaaggactatcgtgtgatatggtccaaccctcttccctaagcttttgatctctataatgtactgcaaagtgcatcgacttttgagggagaagtgcccggcacgtggacagggtgctgcagccaatgcaatcatggtgacgattgaagagaaaatctttgacttcatgaagtcatgcagtacaaatgctatgctaattagttattctggtgctcatggtgagaggacaaagaagcacattgtgggcagtgaagatagaggagatgaggcgctgatatctgaagttagtgatgtcactaaagatctcaaagcgtcgaatgtcccactgaaagttagaaattttatgggcaacaaggagctcagtgttgagggcaaaacaaccaccgcagaaggaaacgttgagattgttccaggagatgagctgacagctactctcttggacgctgtgaatactattcagcgcactactactggat

SEQ ID NO: 194224 - DNA, 284 bp, Zea Mays
ctgaactgttgcattgcttactactagcttgatttgaaaatgggttgtaattaccgctgttttctttggaatttactcctaatagataaaatttatcaagtaccttatctatatcggatagattcttcggcaacgattggtatatattttgatttcaaacagtaaagtcaagcaatagtaagatgggtactgtttgtacgaggaatctggaattgactgtcattttaaccggctgtttgttcatggtatcaatcttttcgctgtgtgatctggataccctttac

SEQ ID NO: 194225 - DNA, 337 bp, Zea Mays
ggtagatgtgagtaggataagttatgatagttgaaaatcttgggtgcttataattttatatgttgatctatacagattttgcaacccaacgcatcagtcaagtacttgtatatggctgagctaatatagggaaccggtttaggttaatcatgtttataggggtagggtctaatttatgccaccagcattatccaacttgctcacatgagattagctcaacttgaggttagccttcgttaggttagatcaatctatcacatctaagttattttcgtgtgactagattagactagataagatcttattattttggattagatccttgtggttgctttag

SEQ ID NO: 194226 - DNA, 350 bp, Zea Mays
aaaatacttgtgaatatgtgtgtttataaaaatgttgtagtgtatgttgtgtctcggatttcgataataataggctagccgacgagtatgttgtatagcggcctaggttgctgctctggttaaccaacttgttagatgtctttagttaagctcgtagtcgcgatgaattgcttgttgtggtctaaatgtgtatggttatggtcacaaatgaaaagtagtagtactcatgtgatgtctacgctaaaatgcaaactattgggtgaaaagcgcttcgatatggattatcgtagagaatgcgttgttaattgagtatggtacttctaatgctcgaaatgacacggataaaaatt

SEQ ID NO: 194227 - DNA, 370 bp, Zea Mays
cctttaccttctcacgaagctgcatgccagtgtcgtttggacctagtcgaacgatcacatttcccaactgcattgcctctaggtgaaactgacagtcgttagcttaggtcaggtagttcttgtcattcaggacaagctttgtgaagtcagtcttgctgttttcagccatagtttgtcatgcaaaattaatttcaggctaagcgacgtgtggctaattaattttgtgtggcagactatggctgaaggcaacatgacagactttgcggagcttgccctgaatggcaagaactacctaacttaggctaacgattgtcagtttcatatggaggcgatgcagctaggaaaggagatcgtccgactgagtccaaac

SEQ ID NO: 194228 - DNA, 316 bp, Zea Mays
gacatcttatacagtgcattaaggacttcactatacttgcgactaattgtttccaaggagtgaccaaacttattccttatctgcctaaaagattgtggatccccacatgcccacaagaatatgccaagagcttccatagtactgacaccccgactaggaagcagaccataattttctaccaacgtgtcatgcaatcgtctaaaaacaattcgtcgcatgcgaaacatgtcgaagcagtcgttactaatctccaacgttctctgaacccattgaataccagtttccaccaatgttcttctaggaccctgactgaaat

SEQ ID NO: 194229 - DNA, 427 bp, Zea Mays
aagacagcactacattgttctttgcagtgacatagtcagctatgttatgatccaagaccaaccgcagaagcctgttcaacagagtcagatcaattttttcaaagaacttctcaaattttgtctggagcatcacaacacactgcccatcacttgtgtcccatatatccagtaaattatttatgccctggcaccatttataaacaagaagaggtggtggttctgaatcagcaggcttaacccaatttggaaagaggtgtcgtttgtccccctcgtaccacaggtactggtcaaggtatgcatcagtgatcttttcaagaggttcaatttcatatactggaatcaagtagctgtacaagtccatgaattctataccaacttctttgaaagctcgctgagtaaggaggtgcctttttatccttgacagtgc

SEQ ID NO: 194230 - DNA, 514 bp, Zea Mays
tgatgatggagtggacccacaaattgaggatgtcaacagatactactttgaggatggtgaagagaaaccagtttgtttcagtatcttgcctttccagtttggtgaggacgatagcgaggcagttttcctcagaaaggatgttttcttgtgtggatttgtggataaaaatcttcctgtgtacaaggaggtggtagcttggaagataaggcttgacagtgagcatcccaacatctatgtgctttctattgagcacaagtggataaagctgttgaaaccacgaaaatgctatggagacattgttcgatcaacattgattacggtgcaaatgctccacttttttgggagaggggagcaaagaagttcgaatcacctttgggatcaccttgatgaagtttttgggtatccatctacatgcttactttgtctttaccctcgagtatatgcttataatgtttattcgtttgtcttttgaagtaaatacaatcctaaacccgtggaggatgacttgatgaag

SEQ ID NO: 194231 - DNA, 357 bp, Zea Mays
tctggttttgtccacggtgataggggtggcgaagcactttggtgtttcgcgcgcatgcgccttgctggagtcgaaccaaacggcatgacaattgcgagtgccatctcagcttgtgctagtttgcggttgctgagtcagggcatggagctccattgccacgcaattaaggttgggagtgtgaacaatgtgctctcggggaactccttggttgacatgtatgcaaaatgtggagaaatcattgcagctaagagagtatttgatgaaatacccgagaaggatatcttctcctggaactcgatggttgcagggtatgcacaggcgggctattgcggcaaagcatatgagcttttctgtgag

SEQ ID NO: 194232 - DNA, 419 bp, Zea Mays
cgcgctactcgtgatcgaccgaaggttttgctccaatttctcgccgtcgttactagtcgctgcgggatcacctaacgccgtgggcagggcactttcgcgggcaaattctttgtgagtatccctccaacgacttcgcatttacctccgcctcgtgtagctggtttgggagtggcgtttcgagctcgtaatcaaggtttggctgggctggcaatggccgtcgtcgccaccgcggtccgtattgcgccgctggtatattgaggaagacgatagcctgtcaccattgatttgtaaatgggcgttctggattaagatgcgcgtactcatgtcggcgggaacgttctggatcctgggatcgtaatcctgcggctgtggcgcaacctctagtgtcctggaccgtgactgttggatcgagatccaac

SEQ ID NO: 194233 - DNA, 335 bp, Zea Mays
accgaatactgggggaagttgaagagcaaattgagcaaactctagctatggtttgtgagaattacaagtcgctagatgactctataccgttgggtttggcggaagattttaggcctccaactggattggctgctgctgctctggaaccagctattaagttgtacagtcttctacacgacgtcctatctccggaagctcaactaagattgtgtggttacttccaggtcattgttcagctattcggtaaacagatggtctcttatgttattccatataactaacaatttttatgttttttattcatgtccaggcagctgccaggaagcgtacgaggc

SEQ ID NO: 194234 - DNA, 288 bp, Zea Mays
aagtgacatgatgattaaccggaataggttccaatggttgaggagagagaccaaagtggcacgatgacaaggtttccaccggttgcgaagatgagcatgagtgccttcaaatgcaatgcaagcctttgctggagtacgctctagcttatttccaagaatatgggacaacttataatcttggttcttctcttcaaggcagaaggtgtatggtagaggactatatggcagcctaagtttggcctctttggcatagttggacgtccatgtgttttttgttttaaagaaaat

SEQ ID NO: 194235 - DNA, 276 bp, Zea Mays
cgccgacttaagccgattgctccgttagtagggtatagtgatcactctatgtcgagtaagcgcgagcatgttgcaccgtcttaagtcattgctgacttaagccgattgctccgttagtacggtataatggtcaccctgtgtcgagtaagcgcgagtatgttgcaccgtcttaagtcgtcgccgacttaagccgattgctccgttagtagggtatagtggtcaccctatgtcgagtaagcgcgagcatgttgcaccgtcttaagccattgctgactt

SEQ ID NO: 194236 - DNA, 354 bp, Zea Mays
aaggcgataatggacaagggtgtgagggaaaagacgaaggcattgaagagctagtggtataagtacaacaaagaatggagttatgtcaaggcttacacacggtgaagaagaggatattgccaagggtgaggtaaataaaacatcactctcaaattaggataagagattggagattttagataacaaacataatgtaatcacaaggcaggatagagtgatgaaaagggtaaaggaaataacaaacaaaaacacaacaaaggatagagttaacaactcgcaagtgacaaagaagaggatacgaccaagggaaaagtaggtaaagtacgatgctcaaattgagatggaaagggagaa

SEQ ID NO: 194237 - DNA, 981 bp, Zea Mays
cttagcaggctctctgcggcggcgcagaccgtccgggacggtccacagcttagggctggacggtccgcgacctagcgacaggagcgggtctttcctgtgtccgcgaccgtccgacctttcccaggtagcacatatggtgttcaaaagtcttctaactattttagccccatagttcaagcatcatcattagttctttaccatccccaatccatcatcacgtatgaaccctcttaacattaaccttatgtcgaccatctccgaactccacattgtgcaccataagcaaagaaacatattgcacatatcacattcatgataaggttactcaacactatgggcactcatcatacttgaacaccttaggcgtaacttaaccatgtgtacgcaatctttcctcgatgagtgcattgtcagcaccaacataaagggatgaatcaaaacaaaagaaaaatacagaactcactcaaatgaccaaaagtcagagaaaagccaaaacaaggtcaattgaaatgagtaaagtttggtccctaaagacatgggcaataactcaacacaaccaaccaaaaatagctagtcctcaagaagaggccaaaaatactcaccaccgctaggaaaagatcagagagccaagaaatgttgctagtcccttagacgaggcaaagactcaatacaactagcaaaagtagctcagacacaaccccttgaacaagtgcaacttctcaaaaaatgcatgctttcaataagtactctcccttttggaaattaattgtttgtatgcaacattctcgcctttgttggcacatccacacatcaatctatcaaaaactacaaccccctcaaactatgctatgaaatgtaagggatacataaaatgcaagagatttagaaatatatcaattacaatgaaaagatactctaagtggtcctatcatgtgcgttaagcaacaaatccatgtgttagcaaatgctcaaactgatggt

SEQ ID NO: 194238 - DNA, 443 bp, Zea Mays
taaggcatctgcatcagaccaaggggcatctgcgtcaggtacagaggcagggtgcatgttgcccaatcctcgaggcatctagcgcactgagcccgaaggcacctattaccttaacccttgaggcacccggcacatcgtcccctgaggcacctcttgctccagcctggtccacgaccgacagcttccttatttacgacaggcgcatcttcatgctggtgcagctcaatttgcgccatcgggtggttgcattggcctattctgctagtcaagaagggatcgaaaggatccttctgcgcctacgcacgaatttctatatccctggcgactgagtactcatccgcgacttcgtcctctcgtgcatcacatgtcaacgcaagatgccaaccctgcagtcgactaatctcctacatccactcgacgtactagctcaagtgtggtcggac

SEQ ID NO: 194239 - DNA, 341 bp, Zea Mays
caagaacttgcaaagcaattccgcagatcgttgacttcactgaggaagcaataattctgagaaagcgttgaggaatgggtcaagcatcaccctctcactccctacatttttgcttggtccagagaatggagttggttaatccatacaagtacacggctagcttagccatctggaatcagttcatccaaagaaataaaacatggggtgacctcattctggatattcatgtgatttctcaaagcaggcgccacatcagtgaacctggcgtgactgaatctgggctggtatctaagaagccttgtcctcgttgctctgcatcttcgaaatttctgcgttgttcc

SEQ ID NO: 194240 - DNA, 325 bp, Zea Mays
ggaggatcgtcgaaggtggaggccatagtcgacaataccccgaagatactgaataactgcttgatcgcacccaagtgcggctcacggggatcatgcatataaaggcaaacctcctggacgacatatgcgatgtcgggcctagtgaaggtgagatactagagagcaccggtgaggatgcgataggtggtggggtcacttacggaagcgttgtcgctagagagcttggcatgcgtgtccaccggggtcgcacagggtttagtctagcatgccagcccgcttgaggatgtacatggtgtactgtcgctgttgaggaagagtccatcgg

SEQ ID NO: 194241 - DNA, 313 bp, Zea Mays
ttttatttggctttggaaactcttccttactatttttgtggatcactctcaagtgcttctcgctctctcgttgtttcttctttagatcatccttcataatttccttcagtgtcaaaggaagcaatgagattcgctctcctttgtacaagaaagacaacttgttggttcttccaaaaatctggacatcacgatcatataaccaaggtcgacctagcagcaattgacatgcttgcatagggaccacatcacattccacgtgatcattgtacttcccaacaaaaaaggaacattcaccacgtggctaacacgcaag

SEQ ID NO: 194242 - DNA, 430 bp, Zea Mays
ctttgtcatcgaaagttgtgtcttgacatgagttggacaataatagggaaaaacgagtgtcatgtatagaattacccaatctaaacaacaaaagatgtgtgtacccatcactagttggcatgatcagaaccatgtcatctacacttatgggcactaatgaggagcgatgatgtggctcttcctaaactgcttccactcaatttctaaacaattcgttggttctccactcattcggtccacatcaacgtcctctccaccctcatactcatgctcttcactctcaaactcctgctctccaacctcatacacctattttctaccgtcgtactcttcatctttatcgtgtgatatttgaagcgcttaatgcctatatcttagcaacacttcccacctactagtgctaaacaaactccctaaaagggtattgctc

SEQ ID NO: 194243 - DNA, 294 bp, Zea Mays
cgtggaattgctttaaagactaataatattgttaattcacgaccattctcaactatatacagtaaaaagctaaggtttcttattaaaaataagacttcatgcaataatctaaatgtgagaagggaagatggaagtgttgcacatagtttgttttgtagatctgagaaacgccaaagcacagttgctacgtgtagcaccattgctgacgaggcttcaacatctactagtaacagcagcaagagtgttactgattctaagactgacactgccaagatgaggcgttcaagaggaagc

SEQ ID NO: 194244 - DNA, 490 bp, Zea Mays
gagacggtggctcgagtacgaaccactacagcgattgcgccggcgacgagcttcgtcacccattagcgcaccaaccaatcccagactaatgctatgcgaagaggaagccaaggcgaacccagtggtggcacaaaattggtgtaccatcgggccgccaggcctacccacggtggctagcggagccgcaacagaggtgagatccgatgagaaatctccagcgccccatgaccccaaatctacaatatactgatcctacgcgattcggtaacgaaggagagaccataggaggaattctcaccccagaacgacgatgacggtgaggcagcccgcgatgccgtgcggtgtgacgctttccttgccaatcaacgagaaattcctctggttttggaaacactcagcccacccgagggcagagacggccctccccctggcgctccttcacggccacgcgcggaggaccggacgtcggtgcagagggattcaccggcgg

SEQ ID NO: 194245 - DNA, 395 bp, Zea Mays
gagatggcatctgctcggaagcccattgatgaagaagaactagtctcctacatccttgcgggactagatgaagaatacaaccctgtggtctctgcccttgttgcacagaaggattctgtctcagttggggaggcatactcgcaactcctcaattttgagagcaggatggctttgctgtatggaggatcccagccatcggctaatgttgctgctcgtcgtggtcgtggtggttctggcccgcgtggccggggtcgcaatggccggtttaatcctggtcgcagcagcaacaacaatgcgccaggagagcgtggtggtccaggagggcacagatctgatgggaacacaataatctgtcaggtttgtgatagaactgggcattctgcccgcaagtgctg

SEQ ID NO: 194246 - DNA, 383 bp, Zea Mays
ggggcagggcccagcaggggtcaatagggtggcacacgagtcagtgaggggcggcatggcagcctagagggagtctaggggcactggtgccacagaccaaagcaatgtgagagaacttgcacggagaaaaacaaaggatagctaaccatagggcaccacgaagtcagaattatgaataaaatccaaatcgggaagtgaggtgatggtgggctgatagtcgagaaggggaaatctatctcagcaaagatgacgtgatgggagatcaagagacgatgaggggtgaggtcaagacaaaggtaccgtttgtgatcaggagagtacccgtggaagacgcggtgggcagagagagtaccaagcttatggggagcagagctagaaaggtc

SEQ ID NO: 194247 - DNA, 447 bp, Zea Mays
cgcccctttaccgtctcgtctttttgctttgtttgctagtcgtgtactatggcgtgttacagcgtaggcagatgttttatttggaatttgtgtggaggtggaaggtccagaaaatggaactgtttttgtcagctgatcttggaggggtgtggttggttctgagactgatcccaaaatatgcaaaggactgtacccatttgtttcatgtacatgaggttgtggtaaggctggttcaacaacaatatcagagggtatatggttcaagctgtctgtagggatatgatggggagcagagtgattgctttcttgagaaaacaggttcagaccagttctataagggtttgtgtgaggtgtttgtgcaattaggggaggggaaactggtcttgttatcgaactgatgaaatccactaggcatggagaaggttgtacctcagaaggaagcaaaga

SEQ ID NO: 194248 - DNA, 550 bp, Zea Mays
aggaagcttctaggattcttgagtggcagctagctatgattgatgaattggctgctcttgaacgcactggtacatgggatattgttcctttaccctcgcatgttgtccctatcacatgtaagtgggtcttcaaagttaagacaaaatcagatggttccattgagaggtataaagctcgtcttgtggcccgtggttttcaacagactcaaggacttgattatgatgagacttttgcacctgttgcgcatatgaccactgttcgaaccttgattgcagttgcagcctcatcttcttggactatcttctagatggatgtcaaaaatgcttttcttaatggtgatctacaagaagaagtttatatgcatcctcctccgggggttgatactccctcagggcatgtttgtcgtcttcgtcgcgcactgtatgggctgaaacaagctcctcgtgcttggtttgagcgattcatctctgtcatcacagctactggtttttcttctagtaaacatgatcctgcattgtttgttcatgtctctccaaaaagccgcacttt

SEQ ID NO: 194249 - DNA, 1518 bp, Zea Mays
atcgccatacacttctccactcctcccctgatcaccacccccccccccccccccccccctcgatccaatccggtaagtgcgtgaatccgtcacctgattctcccgtcgggctgtaccagatcggatcaaggcgtcgcgaccatctgatcttacgacggcacataggagttctttcgttggttgttgattcgtccaagcctcacggttcttacaataacttttatttcttcttcttaattttccaggttttttcttcgattcggcgcgtggcaacctggtcagtccaatccgtccgtgaagaatttatccgtattttcgtttgcgtcgcatcgtttctgcgaaggatttcctgttcgttttgggggagaaaggcgtcgtccttgatgtctactatcgcgaccccgccgccgccgattgcgcaagagaaggccgccagccggaataagcgcaagtaccgtgccgagccaccttccgccgagttgggcccatacgggctggagtacccgctgacggcggactgcatgggattcgagtttatgtcgcctgagaaggctgccatggcagcagcggtagccgctgccgagggtgtcagccttgacctcctccagaactcgtgcgaaaagtgcaaagatctccaccctactgcggaggagttactggactgccaacgatatgtgaattggagcgacccaaacgagacgcagctggaggagatccttctcaagagtctgggcaccacctttgacaatgctgtgagtctgatcaccacaatgggctactctgaggcggttgcacgggctgctgttgtgcgggcagctgcgcaatacaactggagggagagccttgcagggtttggagaggcagcagttgaggttctcaagacggaaggggacatgttgccgagggagggtgcctctgttgaagacatgaggaggattgagcaggctgtgcttggtagtatggttatgtgggtaaatgaggctcagccactctgcaccacaggcgatgtaatgttttgcttgcttatgtctgacatgaacgtggcaaatgccagtgccatggactacaatacttcttccctcccatctgttgctgctcaagttattgcccaaccagacgcggggaactatgttactggttcaggttcaaatttatcagtttctattaccaacccacagactggcgttacattccgtggaaaacttaccccaatgccaccgggctcttatggtgctgtaaaagctgattcgtcaatggcaccagcaagcctcaatgtgtcaagtaccaaaccctcggtgccgggcaagactcagtgtgtgataccaaatattgagccaaaagaacaacctgttcctatacatgatcattcagaggaccaaccatttgttgctgctgcgacacaatctgtgaaaaatgacaagccatccccaagcaagagggggggctctaagagggactccttgcatcgacagaagttgacaagctttgataaaagttcccgagcattgggttccaaag

SEQ ID NO: 194250 - DNA, 394 bp, Zea Mays
tttggttgtacacacgcatgtaaaagtaagtaaacaacgcaaattccgggtaaccggccaagccactaaagtagatatacagagaagaaaaaaaaactaaaaatgcaaccacattgacttacatattgctactagggagcaccgtgtatccttttccttgaggataatgggtgtgcgccgaccaagaaattcgataacccttgtcggataccacacaacagcagggacatttttgttccttttcttctttttccccatatcaaacggctgttcctgattccgcaactgcggaggacggtgcagagttggcaaaacattattcaaatgaaacaatgaatatccacaatatccaagaggcacaaaaaattatgctaatttccttgtcaaagaacac

SEQ ID NO: 194251 - DNA, 522 bp, Zea Mays
ctcaccatcatcacagtgatgattgatgtgattttctgcacaatcttcatcttctacaaattgagcgtcatggtgcgcctccacatcatgctcttcataccttcggctctacaaacatacaagagagagaatacataaagaataaatctgcatagggtacaaatatatttcactagcattgaactgaactccattagaatgtaactaagttgttgaaatactttaccccattctgtcgtgaatttgaaccattatttgaaatgagttccacatcttgcaattcccttgccaccctttcctcttgcatttgctgctccaattcagttatgcgttgttgaagagctactttctcacattcagcctttttacgggccaaaccttccatctgcagtcttgtgggtgtgtaacacttcaaccctggggtaccaacatcttggggagttggtcctaaacccaaagcacgaacacgtcctcttggctccttttctccacaagcagcagcaaatgcatcgccctcttgaa

SEQ ID NO: 194252 - DNA, 424 bp, Zea Mays
cctttagctagcgaggtggtactatgtgggagcgctgcgttgcgtgtggcttcctatcgtgttgggtttgagtggtttatcacgacccttctgtggtgtaccgacccattggtaggcgagaagcggggaagagaaacaggctgacacgcttcgcacatgacgcacacatgacacacgaaattgatgcttgaaagtagtagagattagtaggcaagaagcgggaaagaggaacaaacctacacgcttcgcacgcgactcacgacgcacgaaacttgtgcttgaaaggagtagataagagaagtatgccttttaagggcttaatcattatacgagtttctatcaagtcctaatgagccaaaacagattagattgaaccacttagggaggatcacgaagacgtttgtgccatcttgttgatgtggcc

SEQ ID NO: 194253 - DNA, 573 bp, Zea Mays
gatttggattactttgcggcattggatgtggctgtggcggaggtttcaccgcatgtaatgggtgatgaggatcttccgggtgcgagtgttgggcataggcggcgaagggtggtggcgaaatggagggtgagtgagttgtcgcgaagtgataggcgtcatcgtggtgaggtggaaggtggtcgccttcgtgtggacgggactggcaagcgggaattgttgtcctcgtcggttggggcgagtgtgggtgagggggagctgcgaagtctgtttgcgggtgaggaattaaggataatgttgttcaactataggaagatgggtatcatcccgaaggttgagccaatgtaatgtgtgatgccctcgctgtatgtatgtaaccatactcttgtgtgatgaagctgcacgctttcgttgatcaggccgctcccttaggcttctgtacggagttctttagaaaagacttcgattttttcgtactagtattccggctgcacccgtaggcgacttttgcgcggagggtcttttggaaaagacttcgatttttcgcacttattgtgctagtccggctgcaccctt

SEQ ID NO: 194254 - DNA, 460 bp, Zea Mays
tggaggggggatcagttgatgctccggctctcccgattgtttcggttgaggagcgggaggcgcctggtcaccctccagatttgggatcagttgatgccctggctctcccggaaatttcggttgcagagctggaggcgcctggtcaccctccagtgttagcgttggatctggcagaggatttgggggtcagttgtcaggaggactggtcttcgcatgttgttatctcgccggctgggccttgcttggacaatcctttggtgggggaccttatgtccggcttggcggaggctgtcactgctgggcagcatggttccaggttctcctatttgctgaccgatggtgtttctgctaatgtggaggaggcagtcactgctgggcagcatggttccggggtctcccaattggtggctgttggttctcctgctgttgtctctgccagggtgcggaggtttgagtcttg

SEQ ID NO: 194255 - DNA, 312 bp, Zea Mays
tcgggagagggccgcactctaaggcccaaaccactatccccagcaggaggatttgacacaaaactgatgaacgtcttgggaggaggcagattccagtctgaatacgcaataggagcaccaacattcgataccttgcctctaagaatcatctcaagccggcttaccaggtccacagtaggaatccttctattggtaacccgggtcgaatcagtaacgccatgatacagataagctgggtacgctctgtccttcagcggctgaatgttcttaaaaacaaaatcggcgaccacagcctcggcagtcagacccttc

SEQ ID NO: 194256 - DNA, 540 bp, Zea Mays
cgttgtacttcctccacatctgctacaataaggtactcctcaataacttcatacttcctagtaactggaggaacaaggctggcctttgtcatgcgggcacctaatatacgatcatcgatcacagactccccatgttcagttaactttaggcaatttccttttaaatcccaggctccagaatttacatcaaagtcactctcagtatcagaaacagtagtttcactctcagtttcatcaccttcagagtagccatcatcatcagatgtttcactaccagagcagacatcctttttctttaatttagacaggcttcttttgatttcaaggtcaaatgcgcgagatgaattatctgctccagcagccaccaaatttgctcttgttttgttttgcttctttttgagtttagtatcgaatgaatattgactaatgtccaggctgtcctgggctgctgctccgtttctctcagaaatgtaccttgggttccctagtctctttgctagttgtatgaaggagacaacaatttgctttacatcatccaaa

SEQ ID NO: 194257 - DNA, 377 bp, Zea Mays
gcaaatgatgcattcttgccatggtgagcagggtggcggaggacacacctgtgcacaacagggagaagcaatggcaaaatgaggtagtcagtgggcatagagcagcagcagacacctgatccctggagtaggatgactgcaaacacatgagcttactggtcagaggagagtggcttgttgtggctagacacagcatcttgctgaaaggaggtggcagcgtccattggatctgcttactaacaagtaggaaatgatgggagatatgtgcttgatggatgggaggagatggtggccggcatgggaaaggggtggtagagtatgtggcctcacatggtggctgcctccacgatgctttaataatctattctttgttgcaa

SEQ ID NO: 194258 - DNA, 602 bp, Zea Mays
gaaggctgcccttggcgtttgggttgcacggtaataataactctgctttattatgagcacctgattggaataacatcaaatactgtagatgctcaatctgttatgaagagtattagcactaaaagtgtattttttagttgatattcaatttacagttttacttttctaactctattataactgcaccaatttatgtaggttctactgagagggtcatgtcgggaggagctcaagaggattaagcgtgctgtacaacttgcagtctttgctgcttatcacctttctcttgaaacatcattctttgcagatgaaggtgcaacacttcctaaattgccctcgagacatgtggtagttgatccagatacaaggaattgtacaaatagcaattcagctgcattgaccaatgttggtatgcctcatggacgtaaatcagaacatgacaaactctcacagactgctatggtcaacattatgtttgaaaatacccctgtgtcacctagttcattgccatcgaatggagaaggccacatgtttgtgggtgcatgtcagcataaagaaactgaatattctgttgatcataagaactcttgtgaacattgtgt

SEQ ID NO: 194259 - DNA, 434 bp, Zea Mays
ttttgaaatggcaatcaaagaaaaatctgcgttgaggcgcttcagctggcgctacataatcattgatgaagctcaccggataaaaaatgaaaattctcttctatcaaagactatgaggatttacaacactaattatcgtctcctcatcacaggcactccactccaggtaggcttctcttgccactatttgtttttatataatgcgtgcacctggaacaatgatttaggtaccacttcagtaaccgtgttgtgccatatttattttttggtttaatctgatcctagtctgatttgctgctacatggcagaataatctccatgagctctgggctctcctcaatttcttgctacctgaaatatttagctctgcggagacctttgatgaatggtttcaaatatctggggaaaatgatcaacaggaggtggtgcagcag

SEQ ID NO: 194260 - DNA, 616 bp, Zea Mays
ggaatactggaattgtgctctcagcctgtcctcttgtaatggatgaatcttttggttttagtaattcatctgcccagggaaatcagacaacttcctccagtggtggtcttggcagcatgatgggtggtgttgttggaggcgtggttggagtagattctggatggaagtttttcaacgaaggctcttctccaatggaggatggtgttgtagtcatgtttattatgcatcaacatgctcttgtggtatgaaccaattacaattttggaaacatgttctgtgattttagtagctagtatatgtgtcatgaatacttataatgagcataatatcatattgttttcatgttaggttagactccgtaccaatattgaccatgttgaccatattgagaccttctctagaccagatggagcacgtgagggctccatcgcgtatgctgcgtggaaatatacatcatatttgaatgaatcgtcatcagtaggtaaagtagcccttctttcatgagcattggcgctttctttaatgtgtatttcaatttttggggactaacatgatgatgctatagatgaagaacgagtgtcatggctagcacttgcatgggaccgtcaagtgcaag

SEQ ID NO: 194261 - DNA, 1650 bp, Zea Mays
ctcgtgcttccccaagagtaggcggggcaggtcggggctcgcgaggttcgcgccgtgcgcgctcccgcacgcgtcgggactatcgtttcgcagccggttgagcgggtccaaggttcgttctcatctgttgctttggatcgacagctgaagtgaattgtcagattaggaatcatgatgccgatttccttagttttggattgagacattgagtgcgataaggactaaagaggtgcttagtgccttacttccatggctaccttttctttgcttgcatgccaatcgtgtgtgatggatgcaacgggcatatcgtcagttcagaacaataaatgcacatattcggattggaatatctgtcctcggcagtacaacattaagtggtagaaccgtgccttttcttatcataaaacaaattaaggttctccccatctctggaatctacagaaggagcaatcacatttgtttttgaatatctggtagcctaatcgttcaatgaacatcaaaattcgaacttagtgagaggtcttgtgcagtagtaccaagtatcatatcattgtaacaagcatcaatttgccaggatagttttcatatctcatcagtatcttgatggtgcagctcaaccattcttgttgtattgatagtgttatttagtttctagggctgtcatatgttcgttccaaattccgatgcacttactcctgtattttttagaaagattagaaggagtgtttttgctaaaaaattaaggaaacaacaaggttacattgtgctccagaatataatctgatctcatgtccatgtcatctttgtgtccttttaagggccctgtagaatgtggacatccttttgctaaatcaattctttgataattttcaggtcaagcctagccatatattgcacgccgctggacctgatgaaccacatgttgcaagtccaacatggtctgatacttcccttgatacacgtgacatggatcatgctattagtaaggaggagcttgaagatgttctcaacactccgcttcctgagcatccgaagctaattcgtggtcaattgaagaatggacttcggtatcttatcttaccaaataaagttccagcaaacaggttagaaaatcttttttctgctcacatctgttagtttttatatatggcaaaggacttcctctgtacaatttcacccttgatttccatacaatgattggaactttgatggttttctgtactttttaatttgattggagttacttgaaagttgacaactatgggtggagtctttaacatctgaactaatgtgaggtgtttatttgatttgttgaacatcagaactgtgtaatagtaaataaatcaagcgacaaatattatcctgatgcccatttcatgctaaatttcatgcaactgtgaagcaaccaaacattgttatgatatacgtgtagaatttgtatattattatggtttcatctagctattttgcaggtttgaggctcacatggaagttcatgttggatcaattgatgaggaggaggatgagcaaggaattgcccatatgattgaacatgtcgcgtttcttggcagtaaaaaacgtgaaaaacttttggggacaggtgcgaggtctaatgcgtatacagacttccaccatacggtgttccatatc

SEQ ID NO: 194262 - DNA, 473 bp, Zea Mays
cttggttaaggcggccttgtcgctgcctttctccaacgcagcgatgtctgctgtctccagagtgatggtgatttgcttcatcccttgccttaacagactacaggcgtacccgatattgatggcggtctccatcttgtcgccagtcagcacccaaatcttgatgccggcctgggcgagcttgtcgatgcactcaggcaccccgttctgcagcttgtcctcgacagcggtagcgccgaggaggagaaggtccctctccaccaggtccgcagcctcgtcgatcttttcgtccctgtcagcgctgacggagttcttagccgccgcgaactgcctgtcgaagtgcgcatactcatccgccttcagctcgcggtacgcgagcaccagcgttctcaggccagcgtcggcatactcgtttatgtgctgctgggtcacgtctctgtgcgcgctccccgatcctgacagcctctcgaacatca

SEQ ID NO: 194263 - DNA, 396 bp, Zea Mays
tgaacctgccaagaccattataaacaagctgtctgaaaaaattcaagctctgagggaactcccacggaaagtggatcacataaggatgaaactaataataatgagcaaagttatacagcagattggcacagtctaccttacagatgaacttgtgaagagttggattggggaggtccggaaggtggcttaccgtgttgaggatgtagtagacaaatactcataccatcttcttcaactggaggaagaagggtttctgaagaaatttttcgtcaagggtacccattatgccattgttttcagtgaaattgctgatgaggtagctgagatagaagaggagattcagcaagttattcagatgaaggatcagtggttgcagccatcccagcttgtccctca

SEQ ID NO: 194264 - DNA, 331 bp, Zea Mays
agctatgctttgatgtacatcagctttggtgcctgaaatctcccacatcagagtgtactctgcacggccattcggacaaagtgaattgcttggatttcgtcacacatgatggtcagcaatatttgattagtggatctcaagactgtactgccaaggtatcgatgttgtctgtgtgtatagacacattatagttccgcgcataacaattgctactgatccatgctatatttttgtcaaatgaggcatgggccttgaaggaaaaggaatgcgtccagacaatggatgttttcatgtcgccagttgtttctgtcatttcccttccggacactcc

SEQ ID NO: 194265 - DNA, 300 bp, Zea Mays
gcaacatgtatttaattacatcggcttgaccaaaaacagtgcaatgactagacagtaaataacatctacacttggtgcatgcataaaacaagcataagcataacttctcaataaaagtgtacctcgtttcagcatccaccaacctccgacttagatatgtcaccacatgtcttgtgtcagaacagccccaatgaccttatcttcagctgaaatgtataattggaatggtactcctgctcgtggtgcttttaatacaggagccgaagacaagtattttttaatgagatcaaatgtttcctg

SEQ ID NO: 194266 - DNA, 621 bp, Zea Mays
ggtgttggggagggtgcgcgaagcctcgccttgggcgaattgtaatccgggactccggaattcctcgccgtgtccgctgcgccgccgtgaacccgcccttcgccgtgggatcgagcccctgcgtcggccggaacatcaaggtatgcaccgacctcttcgttggagtggttagaaggtagttggagtagcgccgcggggaaatctcggcgtgtgcccccggaatttcacaccggagcaccgccggccgccttaaatcgcgatgcaccgtggacctggggtctgcgttgggaaacgattgaaattgaggggtgaatcgggttcgggatgtctcgaatctcgcgtgggtcatacgaatttggggttggcgctcgggttagccggattcaaggactccggcgaagtccaccgccgcgcccctgggcgacaccgccatcgggacagcttgggttgggaacgacgccgctcggccgttggatgcgtaagggacggtcccgattagatcaagcttaccccttcgtccaatccaactgcgtccgtcgatgcgagatccagcggtgcagagtagatctttgattcattaaatccgtgccgttaatctttaatccaacggctctgatcgcg

SEQ ID NO: 194267 - DNA, 445 bp, Zea Mays
gtgaaaggcaaaaacggtgacgtgcgttagggaaaacctttttgatagctatcgctacatcatgacagtagtttgtaattattgaatgtggtggtttggcattcatacatcttaaccatgtaccaaaaagccacacataagccccaagagatctaccagcaagcaggccacaacctagtaacactggctgtgcatggtggttagttcccatgaatgacacaaactgcatatcatactgatcgctgaagtttgtgacattaatagcaacaacatcaccaaagtaattgtatgaactgcgtgatttggcgtcagaccaaaagacattccttagttgcccttgctcattcatatctaaactgtaaaagaaacaagggttttggtcttgcattttgttgagaaaatccaacaaggcgtctaagtctccttctgcgagcttcaatttcct

SEQ ID NO: 194268 - DNA, 520 bp, Zea Mays
agacggggaggaccgggaagcgaggtggaaggatctgacagacgaggaggaggacgagctggagtcgctgtgggagcaccaggatctggtagagcagctgaagctcgagctgaaaaaggttcggtcgtcggtcgggctgcccacgatcctcgaggagtcggacacaccaaaggctccggtggaggacctcaagccatggagtatggatgctaagttccttcgcgaggaccccatggacgagctgaacaagttctacaagagctacagggagaggatgaggaagttggacattttgtgctaccagaagatgtacgcaataggtatgcttaattaatttctgttcaacgagagttaccttatctctgattccctgtaatggttagcacttatttagttgagtgcaatgagaaagctttctaatttctacgaggcaattaggtcaattaagacgaaaacagacaccaattgttttaattttgactgcagatttcctacagctcagagggtcccagcagtccaa

SEQ ID NO: 194269 - DNA, 285 bp, Zea Mays
caaaagtctcaggatgaaggggtatggcgatcacagagccgttggatcacattccgatggccccgattagatgacacattggtgaaccggtacgccgctatccgccattgattcagagatctgtggtgaggatttaattaaagcgagatgtaaccgtgcccgcacgatgtggatccaacggtcaagactctaagccgcaagaggtatgccatgatctattctacaccgtccatttccagatcaccggtcaaagaagcgtctccttcacccctatccgagtcgggc

SEQ ID NO: 194270 - DNA, 443 bp, Zea Mays
ttctcatgcgcaacatgttaacacactccacatcattgaagttgtaaattctattcaagtttctgtgcctctcttcatccattgcactcattggggcataagtgatcctaggtcgtgccacttgacactggacaagtctagaaacaaaaaatgcatacacaacagcaacaagtccagctgccctcactattaacatgcgcctctcatcatcatgatccatctagatgcaaaggaacagagccaagtatcacataaaagctcaccagcagtaacatgatgcagtactagatcataggcatggcaacaaaataagctcagatctagggaccaaatcataggcatggcaacaataagctcagattaaatgctataaaatcataggcatggcaacttaagctcagatctagtgctaatcaatcatagacatggcaacatataagctc

SEQ ID NO: 194271 - DNA, 424 bp, Zea Mays
aaagcttacaggggaagtaaaaggtaggtagcccgaggctgtgtgacgtttcctttagaaacctccattgctggctccccatcctcttcctgcttcatggtttcacctgctgccttctccttcctcgattgccgcagctgctatgggaataccatctttctacaaatgggtcgtcagcaagtacccaagcatcatctcccctgtgaaggacgaaccagaggagtgccctgatggcatcatctacgacaacctctacctcgacatgaattgcatcatccattgctgcttccacccacaggaccagctaacgcatgcagacatagatgtatccacacacctcaatccatgcgaatctggacggtataaatgtatgtgttgactgactgacacaccgttgcaggtgcgccctccgacgacggccaat

SEQ ID NO: 194272 - DNA, 492 bp, Zea Mays
gtcgtggtgtattttagtagtggtggcgtaagatatttgtttgaggtgtgcgggtatatgccgtaatatggttatactcgcaacaaagaaatatgtatgtcttgttaacacaacgtttaggttgctgtcgtataaccgtgtgaagaatgctcgcgatggtcatgtgactaaaaggtgatatagtggcaagcgagaagtaagttcaatatttttaaatgattagttgatagcacctatcgacatcgtcatgatttttgtcgtatggcggatcgatgccttgtcatcgtagtctcggggaattatcggaaatgttctggtgctttaccgatggggttgaatgtacttgtgatgtattacaatagctgtgtgtcgtgcaagtatccaaaaaaaggtaaaatgtggtgtatgttggtaattagaaaatagtcacgtcattaaccgactcgtgttcagcaggagtcgatcacgttaagtgattacgatatacatatt

SEQ ID NO: 194273 - DNA, 423 bp, Zea Mays
ttccaaggtcgacgatgcacgagacaccactcgggttaccttttcccggtggaaacaagctacgaaagcccaccatctgggacctctgaacagatagctgggatatcatcttcaggaggctctgatagcatgtcttcagggatgacctcctccagtacttgatcaaaatctgacattgaaagctcctgaagactgacaagtgccgacagagctggagagggaatatcgctacccccctcgctgcctctatagtgtcggctgttcttgcgtatcagcgggacttcttcttctacctcttcatcctcatcaatcatgcagccaataccctatgcacgatcacaacccttggcatcaacctcgggaatggcctctgccgggacatcatcaggaaccggtacagaagggccatcatcctgatccaag

SEQ ID NO: 194274 - DNA, 383 bp, Zea Mays
tgcttcggtagcgcacccgagggccaacaggcaggttgagcgagctaatgggatgatactggaggcactcaggaaaagggtcatcaaaaagaatgagaagttcgcagggaagtggataagggaattgccctacgtcgtttggagcctaagaactcaacctagccaagctctacatggaaacactcccttcttcatggtctatggatcagaggcagtattacccgccgatctcaagttcggggcgccaaggttggtcttcgaaagcatagcagaagccgaagctactaggctggaggacattgatgtactcgaagaagaacggctgaatgcagtaattcaatcagcacggtaccagcagactctgagacgctaccacgacaagg

SEQ ID NO: 194275 - DNA, 277 bp, Zea Mays
agacacaagcaaacattataaactcaaattcgagaataaatattcgattacaaaacaaagtacatctatgctcccgatgatcttgaaagaaatattgccttagcaatatcatctcgaaatctatccatagtcctatcattggattgagtagttgatgtatccgaagcattttgagaaggctgaaatcttgcgtatctctctggaatagtagggatataatctggattccgatcacacttactgaaatctttatctaaagcatgattctctcgaataa

SEQ ID NO: 194276 - DNA, 374 bp, Zea Mays
gttctttgagtggatgaaggttagtggcaagctaaagggaaacactcatgcatatcacctagctcttaaagccattgcctggaaggaggactggaagatggctgaacttttgcttcatgaaatggttgctgattcggactgcgcattggatgctcgagcatttaacggactgatatatgtttgtgctaaaaggaggcttgatgcttgggcaacaaagtggtttcacatgatgcttgagagagaagtgcagccaaacttgtctaccgttggtatgcttatgggcctttaccagaagactgggaaactatctgaagctgaattcacttttgagaaaatgaggaactgcaatatcaagtgtgttaatgcttactcag

SEQ ID NO: 194277 - DNA, 339 bp, Zea Mays
ggtgcactagaccagtccggtggtgcacttgaccgagtatgcagagaagatatcctgtgggttttctggaacttggtgcactagatgactagatcagtcccgttgtgcaccagaatagtttttcagagagcatgtttttgggtttgtgaagacatggcacgccgtaccggttcggagtgtcgcgggtggctcaccagaccacttacgcaaataagttgttttttaggacttctacagttggcatattgaaccttgtcagtggagttcggtggtgcaccggacatcatctcaaatagctctctccgtgggtaggcaccagccgccaacgactagctcaca

SEQ ID NO: 194278 - DNA, 393 bp, Zea Mays
ataacatccatggtatgaacagatcccgtggcttgacctatctttcccatgcaacataacactattactgaattgacctcgatgttcactcccctcaatccaaactgcagcaacctccgaagtgatgggtacattatataacttctggttcagcgtttggtcaaggttcaaggcgatatggtagttttcaacgttatcaacgtgccccatactcctaaggtgctcagagtatgggtttcccttaaatatttcaaccaactgtttaataatggccttgtctttctcaagttgctcttgacgacatttacaatatctatgctcgagactgggataacatcatagaagtaaagttcaaggtgtttatgttctgccccatcttccctaccgaatgac

SEQ ID NO: 194279 - DNA, 530 bp, Zea Mays
ggctttgcaaagggtaggcaggagggggaaaaagcaagcccgaccagcgcttaaatccccggcggagctcggttccgaaactactgcctaccgaaccgcgattcgcgcgggcagttgagctccgaccggtacggcgttccgtgaacacgacaccgcgcggggttgaacggattgagcacacagtccatttaccagtgacagtaccggaggcaagactcaggccagcgtggatttcggatcgaggggcgttcccttgaccagatcgcggcggctttcggaatgggggactgactaagcggagcgaaggcggatgacggggggggaacgatagagctgccccagcagccaaagcttaaccaacccccgaagacgcggatccggccggtagtctgggcaccatcacacgcggagtcagcgcgacccagcagtccacgccagcgcgagggagacgaaagccggcctgaccgatggggtccacacgcgggtgagaaggagtgggcggggcgcgcaggagataactgaccggcggg

SEQ ID NO: 194280 - DNA, 505 bp, Zea Mays
attgtggtggttctcctccttgccacctttcttgtggtggcaagatcgttgtgggttccagaagaaccctcaaatgcggatgacataagaggtgcttgcatcgaggagtgcaccaaagaaaataaggctcctggcgacaagaagacatgcgaagtgttgtgcaccaagctcacaaaaaagcctagcgaagaaggcaaacatgattgatgaagtagcactccgataatatataccctagtggatcagtggtcatctttgtagccatgtctgccacacgatggccttgactatattgtcttattgttttgtttttggtttccactagtatcctaattccttgttcatataacctaatttcactcaaagcattttatatgcttcacttaattaaataaatacaaaggcaatggcatgttctgttttgatctaattggaatatcatagggcaaaccgatctataaaaagaatggtaatgaatcttatatatagatatgttcaatgtgca

SEQ ID NO: 194281 - DNA, 289 bp, Zea Mays
atcaaacagactgactggctgtaatggaagattgatcgatattgttaatttctgcatctacggcagtttaacaaaagataacatcctgtgctatgaccacacaggctgacttatgaactggactacaaagggaacgtttgtggcgataagcatggcaacccaaatttgcaggagctggatgttagatactggatgaatccgaatcaagtctaccaaagtggactcaagaacagcaaggttaacctggctgatgccaaagccatctgcctgatggagtgcccaaatccag

SEQ ID NO: 194282 - DNA, 842 bp, Zea Mays
gccaccatcaggaggcgccagaggggacctgcactgcggcgaggtatgcatggcggcgacgacggctaaaccatagcgagacagctcggggtgaggcagcacgtcgtgcccggcagtggcggcatcgctttcttcctgtcctcccccaagcagttcacggtacgcctccttcctgcattaaacacatgattctgggcctccacccttggatctatgttaatctggtatctaggtttactttttcactcgtggagctgtgccaaattgactaacaaattgaccttaagtgttatgagtttacatcgtatactccatcatttataaaagaaaacccattcatagatcacacagattctgtcagcatcccaaaaaaaattcactgaacattagcatcatgtgttccttggatctatgttaatctggtatctaggtttactttttcactcgtggagctgtgccaaattgactaacaaattgaccttaagtgttatgagtttacatcgtatactccatcatttataaaagaaaacccattcatgagatcacacagattctattagcatcccaaaaaaatttcactgaacattagcatctaacacatgacattactttgtatcagcttcaaatttttttactaacacaaaagagaagggaccactaccttgatctatcgtggtataatagtggtatctataataaagttatagagtatcgccgcacagtgaatgggtaccatcaaaagtcatgcacaaactgaaattggaacctctctaaaaacattttgtgtttgtaggtcacggtgttggaacctgtcgtgcgcgcgtgtcgcagatgtgcattgc

SEQ ID NO: 194283 - DNA, 410 bp, Zea Mays
tcttctcttgattcccttgcggaccgtacacacatgtaagccaccaaggagggctggtgcttgaatgaaagttcacagagacgctatgaccgtccaccctgctactagcacaaataccaatgctatttttccaagccaccaagatgccaccactagcaccaacagatggtaggaaaacaaaattgtcaaaagcaggaccaagcatccgcaatacaaggaaccgagaaatatccaccattttagtctcttgaagacaaaccacatcaactcgagcagaatccaccaaagtacgaacagcatcctgtctagcagacccattaagacctcgcacgttccaaataagaaattttgaaggatccataagagatgaaaagagaaacgactaccagggagggaccctacaaatcagc

SEQ ID NO: 194284 - DNA, 829 bp, Zea Mays
tggccatgatcggcgacgatggttcaagctagctaccggaggggctttacggacctacaacggccccggaacgcacgctaatgcaacccgaacaccccgagaacggcaggtccacgtgcacggtggaaaccgagcatgggagcacacgttcccaaacaaccatggccggactaagcaaacggacgccactgtgagcaacacaagcatggagaggttcggaaacaacacttgaattgaatggcgatgtaccagaacgagctggccacggtgagctaagttcttgcggtgttttgggtggatttgggggaaacgtgaaattgaggctcgtcggtgaaccactgggagcaatactggacgtcgaggtacttggctaccatactgagcgtgtggtggcttcaatttatagagttcatgggcggcggcgatcaattggagcaagttgcgctggcggccggaggggaggaagaagcactggtttcgcgaattcgtggccaacgacgtggcagtaactccggtgagccacggagggttccgagaaggtcacggagacacggtagaaaagttaagccacgcggcggaggaccgtcgaccggatttggaggagaattgcgagctgaggatgcgctggcaagcctaaggcggtttccggtgagggcacgggttgccgccgtttacctagagtttgccacctcagtaacttattgaaaagtcgccggggactctttaccgggaccgccgacgaccaaatcgagccacggcggcattcttatcgccggcgaagctgattgttatcccgatgcactgtaccatcagaacaaccttatcagag

SEQ ID NO: 194285 - DNA, 607 bp, Zea Mays
tgattcccacaccaccactacgtgtggacaaaatgaaaaggaaaaactttggatttgtgttgaacctctgcattagagtctgcctctcttctgggggagtagaaccatctaatcgcaaatatgtatacccatataaatttatgaactcttccaagacgtcaagcatcttagtcatctgagtaaatatcaaggccctgtggccttctgatttcaaacgccttaacagaatagcaagttcctgcaacttcccacagtcaaactggatcaaacgcctatcaggaaagtagacttgacgacgaacgatagcagaccttataggagacagaatgggagaaaacttgtacatgcatttttctctatatgctggatcaataaaaacaggagactttcctttgctgcaccagcaaacagggggaggagctcgagcagctggaattgcgaatgtaaatgattcaacaaaataaagcattttctgaaagcgttccacagatggaagaacaagatctgcaaggcgtgatgaatagtccatgtggcacaatggattgttcctcttattaagaatatttgatacaggatgctttacagtcaaaacatgtctcatgtttgt

SEQ ID NO: 194286 - DNA, 325 bp, Zea Mays
caccaacatcccccttatggtcagaagagtatccaaggaagacaattagtggaacgacgtgcaagtttgtggggaacaacagcggaaaggttgggatagcaggcacaaccaaaaatgtgaaggtgtttgtaggaagggggagtgccgaacaaggcaccgtgggagcaaaaggcgttgatggtctttgtgggggagacaattcaacaagtatgtcacaatgtcaatgccttcaacccagtatcgtgctggagcagaagcttgaaaacgcagagtgaaaatgactagaacaaataaaaatatggccgactttaccattctactaaga

SEQ ID NO: 194287 - DNA, 374 bp, Zea Mays
gtacatggaggcataagccagaccagaaagatgtgctaaaaacaattgcagcggctttagtctggcaacaacaactgcagtggcttcaacaagggatcaaaaagctggtgactaggccccacatatctaaaacccgcccatgtacaaacatcaaaatagcatgtgccaacctgacattcagttctatgcagatatggtgttcaagtttctgttaaacgtgatgccatgtctccagatttgatgcccaaaaggcatatatctccagaacggcaatgctttgaggaatgagcatgaccctgttccgaccaaaggccgggaaaatggatgccggagttgagaacgacgattctggaatgcacaagattctggtgcag

SEQ ID NO: 194288 - DNA, 389 bp, Zea Mays
ttgttctagggatgagggaagatcattgcagctaccacttctaacaattctgggccactgcattacaattctggacatgctgcctttttgaattggcacgaatgcatctagtcggtgcctctaggattattatcattggtaggaggagcagttcaaccagcgccctactacatgatttactacatgattctggatgcaaaggaaagaccgtcggagatatctgaacaaaagaatcaggaagggggaggaaaacgagctcacctggaagggacgtgatgggggatgcccgcccttgctctgtttgacctaaaaattatagaggggaggaggaagatggttgcgacctggaagggaagggattggggatggctgcccctgctccctttgac

SEQ ID NO: 194289 - DNA, 564 bp, Zea Mays
caaggagatactctagttgagcccgacgtggtgactttcaactcagttatacatggactatgtaagatcggtcggatgagacaggcaatcagtgttcgtgagatgatggccgagagagggtgcatgtgtaacttggtgacatataattatctgattggtggattccttagggttcacaaggttaatatggctatgaatctaatgagtgaactgatcagttctggattggaacctgattcattcacctatagcatattgataaatggcttcagcaagttgtgggaagttgaccgtgcggagatgttcttgcgtacaatgacacaacgtgggataagagccgagctatttcactatattcctttgcttgcagctttgtgtcaactgggaatgatggagcaagctatggttttgttcaatgaaatggatatgaactgcggacttgatgctgttgcatatagcacaatgatgtatggtgcttgcaaatcaggagatataaaagcagctaaacagttgcttcaggatatgcttgatgagggtctggctcctgatgccgtgacatattcc

SEQ ID NO: 194290 - DNA, 283 bp, Zea Mays
caaacatgcattctgaagtttctctttgtagctcgatcatacgtccataccccttcctcctaggcacgtaccaattcatcgatcaaaggctccatgtacaagcccattttattccccggttgtccgggaaatatcaacgacacgaatatattttgcctttgaaagcacacaccaggggggagattgattgggataacaaacacgggccaacatgtgtatggggcagcgctcattccatagggattgaacccatatgtggccaacacaacacgtacattacgag

SEQ ID NO: 194291 - DNA, 660 bp, Zea Mays
gcagcgcaggggatgctggatctacatgagggggcacgtgcgacgctagagccgtgcatggttgtgcgggagacgacaaagccatgcatggtggcgtgggaatgacattatcgtatggtagcgcatgagactctagggtcggtgggggtagcatagggggcatcagggatgtgtgtagcgtggtgggggaccaaccatgggtgcaatagggggcaccatagagtcagcctcgagaatggtgttcaacttaagagggagaggcagtggaaggagaggtagagaaagggaagtcggactcgtcgaagatgacgtgacaggagataaggactctatgtgtggagaggtcgaggcacttgtatcccttgtgatcagggagtacaaaaaagacacaaacaagtggagtggggtggaagctttgtgggggcactggtagagataatatgatagcaggcgcacttgaacacacgaagatggttgtaagaaggagaggtaccaaagattgcaaagaagggggtagggtgatgaaccgccttggtaatgaagcgattgagtagataggtggcatttgtcagcccctcagtttagtactaagtaacaagggaggcctgaaacaaccgagagtgtatgacattattcgtggtgtgaatcatacgctcagcc

SEQ ID NO: 194292 - DNA, 526 bp, Zea Mays
caagagattgaaaggatactgtctagtaatgtgaggaggcggtgaagacgggacgagttctgagccataaatgacgcagaggggcagacgtgacatccgaggaagtatactgagggaaggtttacttcagcgcctttagtcagcaatctgccgtaggtaaattactccacatgcatgtaatgtaatagaagtgcacaccagctctgcagaagaacagataaagagaggcaaaacattaagctcgctgcaaccgcagaagagtggagtggccaacagaacacgtaacgtagcatggcgcgcgataacgaaacggataaatccctcccgtcaacaggtggtaagcggacggaaccgacatgcacggggcaggcgggctaggcggaggaggtgtatagagctggaaggtaactgaataattcgggcatgagatcctacagcgccacgaggctcgaggcacgtcttcggagcatcggaatcgaaatcgaaacggtccgctgcggcacaaaaaaattcgaatcggatttca

SEQ ID NO: 194293 - DNA, 793 bp, Zea Mays
aaagtattcagatgctgctagtaaatataagcttgtgagttttgaacaacaatattccattaaaataatgttgatatgcttttcagatgacctaaaactaacagttaaactatatgcaatgttcttgatcaggctaaggataacttaaaaagcataccatcgtctacggcgcatactctgcagttgcaatgtacacttaatttaatggcttgttacttgaagacaggccagtttgatgaatgcataagtgaaggtacagaggtatgcttacgtcatgtagtatcttactaccttttcattcaaatattatttcctagtacaagatagtttggcattcttaacgaagtcttctttctgtcatagcctacagttctagtaataaaatgttgtccatcaaatatggtgttttttttctatcattcgaatttcatgactggtgcaaatttactgctttagcaaactatatgcgctaaaatgtgtgaattctgtaaaataagtttttcccctaagattactaactgaaggcaaaataaatccggttcaatgtttttgacctggtagtatgtgtgactaaacgtcatagtactacataccttactgcatggttgataattcgcatacctttggctagtaatttatttttttcctagattttttaggaaaaagtatgttgtctattgaatcacccaggacatttcagttcttctttgacatgacatactggctgatctatatctaatggattacaggttctaagttatgattcaaacaatgtcaaagcatattatcggag

SEQ ID NO: 194294 - DNA, 358 bp, Zea Mays
caacattactagttgtttcctcaagccattttttggtccgcttcacatgcagtgcctttctatcagcaaaggaattattgacattggagacagaatcatctgtaatctcatcatggcttatcttatcagatatatttttggttggcaactggcgaagcatctgcaatatatgctcagttgactcactgccaccagaatgattctcattcttgtgcttaccaagtgcactaagattttccttgtcatttagtactatcatcaaagcctcggtcaatccaagaatggcttgttcaatgctcaaagaactcccagcagcaccactaatcatagtcttagctgtgtagagaaccttcccaag

SEQ ID NO: 194295 - DNA, 409 bp, Zea Mays
ctggagataaggaaatttcttactaaatatacaacatctgtcggaagagctgttgagagtatgataaaggttgggaacgtgaattcacgatcaggattggatcttccacaggtgcatcacttacaatgcctgcttagttttaatgcattgttttccttgaacttcatcgatggatttgttttttcgggattagagaagcatgacatgtggttacaacttacaagtaatgctacctgttattgtaaagctgaatgtttacaataatggatgccaatacacatgatcttgctggtgcttacattgtttctgaagaatatttagaactaataatggcttttcctgttaaatttgcagagagaagggatgaccattcatgctgaacggctcaactttcatcgttatatctcac

SEQ ID NO: 194296 - DNA, 277 bp, Zea Mays
ccaccgttagctccgcaacctcatcacgtaccccatcgtccagtatcacccccagtcctgccaccgtgagctccaattccaagttttccccaaacctgttcgaatccaccgtgaaggtccgttcaccgcggccagcacaagccaggtccgatactgtcatcctcagtcttgttctaacattcccttgtgcccttgatgctctccaaaccatccaattgaactagaccgccatgaatcgacgggaacgcactcatcggtccgccttgtccacggtcgc

SEQ ID NO: 194297 - DNA, 383 bp, Zea Mays
gagctatatttttcttcatccctctccaccagtatctggttttgaggtctaggtacatcttggtagtctctaggtggatggagtaggctgagttgtgagcttcttcgagcaggacttctcgtgcctccccttttggtacacatagacgatttttgaaccaaaggactccttggtcatctgtcctgaggtccaggagttgttccttgcgggctttctccacaagtcttgttgtctctgagtctagacgttgagttttgcatatgaggtcttctagcattggtttgacttcaagactgtcgctgtttcccagacatgtattcagttgagctgattctttcttccaatcctctaaaaagttggttccctttattccgaatggtttt

SEQ ID NO: 194298 - DNA, 2074 bp, Zea Mays
cagatttgtaaatctgagggagtgaatgtcactgttcctcagttaaaacatgtaattgatgtttgtctaggtgacattaggagggtggtgatgtttttgcagttttggtaccaagggcatcaattcacaggtttgatgctttaccatgaaattttatccatattttttatagttccccaaaccccattcatgttggagcctcctgcactgggtctgccccctttttatgttgtattggctcattgttcacttctagacctttcagcatgtaaaacttactatgatggtacatgatgaagtggaagatgctggttgtttatgggtattgtgctcaataatagccccccccccatctagaatgtaagatgttttagctttatcctaagtcaaacttagcttctttatttttggccaggtttgccgaaaactgcaccaacatctgcaacattaaattagtttaataaaatccaccatgaaatgtcttgatagggctatttgctattatagaagtttaactttggacaaaactaaaacaccttacattttggaatggagtagattgatggggtttgtcgcagagcatcaccctgcaacagttttgagaattatatcatgattcatgtgtgacatgtgcattagtcaccttataaatctaagctaggcctaggaggttcttaatttactagggcttgttttttttggctaaaatgaatttcatatatagaaagttttatctgcatgttgcagatacttcccttcattctttcagtaaatgatgtggggttagtctgttagatctgtcagaatgaactgttggcaccccacactaacagttgtgcactcttgtgcttccagaagagctattgtagttattttccatgtactgcttaactagttggtagttgaccatgaaatattttttcttttccgtttttgtttcatttgcaatgccgtgctgttttaactctagaagtgctgaactgctgatcatgttgctgttctactttcagagaggccaaaggaatgtttgtgtggtcctttctcacttgatttagatgcagtacattctacagtgccaaaaatgttgccatgggagttcccttgtaagttatctgaaacattatgcatggaggtagacaaaactatccttttggctgaagaaaagaaaaaacagatggaaatatcagatcttgaaggcctgcagttacatgtaacagcacctttgatcaagggaagaacttctaaaacaagaagggctaagaaatccaaattaaagcgtgctcactcgactgagcataatgatatttcaccttgtaagaatgaacttgatgatttccatgatcttccagatatatctcttccatctgataaacaaataaaaagaaatcggcatcgttcgctgctattatctgagtccgatgatgatccagctgatgtaggtactgaaaaacataacatatttactgttactgaagttggtttcttcccacaaccttcagaggtgcctcctatgcatgggcaagggatttctgatcagttccattttcccgttgaatcacgagagacatgtgaaattgctgattctttccaaaatccacctgaaagcaacatgtatgggtccatttcacaagtttgtgatacatttatgtcacaggacgtgtcatgtgtacccgagtcatccttaattttggacggcacatctgcatccataagtggtgatgaatttttgtcaagggcagtgtccaatggtttttctgccttttgtgagggtacatacactacctccagaatggtattagaagacagtgactgtgtgaagaatctaatggctgaacgacaaaaagatgttgaagatgtagttggtgagacaagtgagacttatatggaatcatttcggagaaatgaacaggcaagctgttcagctgctgggtttcaattaatggatgaatgtagtcgtgctgaaagcatctggctgctctctggcaaaaaatctaatgactcttgcaaggtggaactagtacaggacacttggaacaggctacggagttgtcgtcttgaatttaccagtgaggct

SEQ ID NO: 194299 - DNA, 293 bp, Zea Mays
tggctccttggtgccctagtctctcactcagagtttgatgttgtggattttcttatttgtgagatcgaggacaccgtactggatggtctgcgtgcttgtcgatagctgccttatgctcactatctatgtcacatttttgcttagctgattcggcctccacagttccagggcacacttgaggcctcacgcctcctctttgggtcctaccgtccagcgcctgaggatcctgtgccagcacctgctccagtatttgacactcaggccgaggatactgctcttcatcagttcgaagc

SEQ ID NO: 194300 - DNA, 379 bp, Zea Mays
cagaaagcggtttcaaattctgcccaggtagcatcccagatggccgcgctgaaggtatcccaccatgctagggccatcccagaaagttgatgagcaaccaattgaacacactgattttcggggcatccgatggcttccagtttcctcttgatcgtgcgcagccagtcgtcggcatcgaggggattgctagacccagcgaacgtgggaggcttgagtctcagaaattctcccatcctgtcctgtggtcttccaccacctgggcgctggttctctagatttctagtgaggatttcaatgagtcgggtctgattggctagaacttgggccaaatctagtggtagttccggaggtgcggggaggtgggtctcactcccttctc

SEQ ID NO: 194301 - DNA, 490 bp, Zea Mays
gcgccgactgttcttccgagtcagagggatctcatcttcttcctcctcctcattttcatcagcaacacagacagcacacccattggggtcagcgtcagatggatcacacccattggggtcagcatcggtaaattcacgcacgggcacttcctcaacagcaggagccgaaggaccagcatcccgatccaagctagatactcgccgaagacgtctctttttctttttctgctcatcggcaggagaatcaagttgattggctcggcaagggcgcttcgagcgaacactgacaggcctctgaatatccaaggctttaccagcttccgggagaggcgcgaccaccaatgttccagcaggagcggcatcagaagaatcctcggctaacatatcaagcatggcacttatctctgcatcactgggatccaaaggcacctcaaaatgaacctgccattcatcatcaggaatttcttcaagcaaagcaaccaaagcacta

SEQ ID NO: 194302 - DNA, 417 bp, Zea Mays
ggacggccacgtcgttaccgtcggcatcggcggacccactggctcgggcaagaccaggtttcggcggcggcgtcatccgttcccctcgactaatcgcgccatttgttgggggcggttgttggtttgttgttgctaacttgttatttggtggctttgtgctgcgcagcttggctgagaaggtggcgtcggtgctagggtgcgtcgtgatcgtctccatggaggactaccgcacggcacctggtgtcgacgacggcatcagcgacgtcaatgccgtcgatttcgacgcacttgctcgcaacctccaggttgggtctgggtctttttcctcacgacccgttgggatttgggtgggattggttcaatgctcacgagctaattgctttactgacgggccagggtctgttgagaaatggcggg

SEQ ID NO: 194303 - DNA, 274 bp, Zea Mays
ttgaagaggaaagaagtgggaaatgagcttagccatccagctgacggtgaggcatggaaagactttgacagaaaacataattggtttcaagaagatcctagaaatataaggcttgggctagccacagatggttttaatccgtttggcaaaatgagctcctcttacagtatgtggccagtttttgctatcccttataactttcctccgtgggtatgtatggagcaatcaaacttcatgttgtgtctactcatccctggtcgggaatgtccaggaa

SEQ ID NO: 194304 - DNA, 484 bp, Zea Mays
attggtaattcaatccgtggttaattcgtctctaatcctcctcttgttctctcctatattagtgtcagcagctcctccacctaaccgaatgtagcggtagccaccatttccctgctctttcctcccactaaccaaatccatatgttcctgcttcctccataaatgccgacagtttctctcgccattgtttgttacaacgtcttcaccggcgacctctctgtttctcttccccacgacgtccgggctcccttcgtctcactataaaaggcatgccctcgacctcgccaatgcccgttttttgtaccctttccctagctcgtgcccttgcatgctgcacgttgcgtcgcgctgttgctgttccctgttccctgttcgcctctgctcctcaccggtgaagtcgccggtgaagtcgttgagcaccttcgttccttacagcctctagaaaatgttccccagaatctactctgcctcgttgccagctccc

SEQ ID NO: 194305 - DNA, 643 bp, Zea Mays
ctttgatagccaagctcttcactgtttcaagttatactgctactgctattcgtgattcaaaccttctgagcatatttgaagaggaaataaaagatagaagagatatgcttaaaaccctcagtgcgctagaggtcctatatgaggtaaaaagttttttttttctgttcatttgtgcatcctaatatttggctactcactaagagtttcattttgagtacttgatttatgtatttgttttttaaacggatttacatatgaaaaactgttttcaaggagaaggggctatatcccttaagtttgaagataataatgtttttttatggtgtctgtcgtgtaaaaactcgtgaaaccgtgattcatttgcaagagacttggattagtattatttcatattagaggcttgatgaaccaatgtttatcgcattgtggtaattgcagtttctttccttatatattgtaccatgtcaacaatcaacatgttacataatcctggcagtcataggtaattaggtattctgctacctaatgaatgatcacgatcaatgtcttcaagattctggagtttcttggagaagctatattttgctaactatttcttctatgacaccgcagcttgttgaacaccctcacagcaacattttcc

SEQ ID NO: 194306 - DNA, 937 bp, Zea Mays
cagtgctccaaatccatttcggcgtactaggtgtggataaggatccttgcctcgacgagtggagcaaagccatggatgtgcctacgcctcccaaccgtgccggctgcaacagtaacatcggcagccccatgcaatcttttgatgatccctttggtgttgctgccatgacgagctttgatggatactcggagctctgcagcccatcagttgctgatcacatattctccctgctgaatgatccctccgctgcgcaacagatggttgccatgtggtcatccttgggctcatctccgcgtgcttcagctgtgagagaagacatgtcgtttgacacctttcctgggcctgtggacgggacatcgtcacttgctcaaaggttcaactcagcagcagcatcgagtccaactggagtcgacagagggctaaaagagtcagatgggcttgttcttccaagtaatggctcacagcaagggagtagcatcattccgaggtctgttggcaacgctcttgcagacaggatgctcatggcgctatctttgttcaggaagtcattgagtgatggtgttcttgcccaagtctggatgcctgttgagcacaatggtcgtgtcgtgttgagtacatctgagcagccctatttacttgaccaggatcttgcaggttacagagaagtttctagaaatttcctgttttcagttaaggaggagcctggtctgcacctagggcttccagggagggtcttcatatccggggtgccagagtggacgtcaagtgttatctattacagtaagccagagtatttgagaatggagcatgctcttcttcatgaaatacaagggtcacttgctatgccagtttacgatcccagcaagggctcttgttgtgcagttcttgaacttgtcacaaacaaggagaaacctaattttgatgcagagatggacat

SEQ ID NO: 194307 - DNA, 449 bp, Zea Mays
cgttcagtcactgacatccgatgaactctaattatgctgaatgaaggtcctggatggggcaaatactatattgggccgatccagttcctggtgtgtttcggagcagtcgtcgggtgcactctcctggccggacagagcatgaaggtacgtaccgctccaactctactcacgtcgtcacagcaagctctggagaatggggtgaacatccacagagcacgtacgtgatcgagcatgactcatccgcgtcgtcatgcgttcctgctgctccaattccaggcaatctacctgctagccaaccccggcggcacgatcaagctgtacgtgttcgtggccatcttcggcgtcttcatgatgatcctggcgcagctgccgtccttccactcgctccgccacgtcaacctcgtctccctgctgctctgcctcgcctacagcttctgcgccgtcgccgg

SEQ ID NO: 194308 - DNA, 317 bp, Zea Mays
cagcatatgagcgggagttgattggattggtaaaggcagttcgacactggcggccatatgtctggggccgaccctttacagtccgcactgaccactatagcttaaaattcttgcttgatcagcggctgtcaacaatccctcagcatacttgggtcagcaaactgtttgggtatgatataacagtggaatacaggcccgacaagttgaatggcgcagcagatgcattgtctcgccgagaggaagatacaggaactgtgtataccctttcttccccttcctttgatctcttctctactttgcaaacggaggctgactcg

SEQ ID NO: 194309 - DNA, 335 bp, Zea Mays
gacttacaaattttatccaaatcatttagtgcactaaaattactacaaccaattaacacgcattcttcacgataatcacccaacgatttgcgttttcaattagaccccacatgagcactactacttttacccgtgaccataaccatacccatttagaccacaacaagcaattcaccatgactacaagcttaactaaagtcatctaacgggtcggctagctagagcaacgacacagcccgctagacagcatacacgtcggcttgcctattattatcaccattcgagacacaacatatataacaatcacttacaccatcaactcttacttaacatga

SEQ ID NO: 194310 - DNA, 383 bp, Zea Mays
caaaaattgtggtagccttggccttcctacagaatctggtgattcaacaaggttctcagtggctctcatgttcgttgggtaaaatggtgcttcggtggttctgatcccaatcagtttccttgccctgttgctcccatatacattgagcgtgtcttcaattccctcgtcgatctccttaggtcatgcaccttcgttgttgtgacttctttctggcttgatagttggattgttagcgacccttgtgtgtctccttctcgtccctcttttctcattctgtcgagcgtaaactatcggacaaaggtgtccttagtaataatcttgatttgcgcctgcggcctcggccaagctcgttaccctgcatgcaattttgacataggttcagc

SEQ ID NO: 194311 - DNA, 708 bp, Zea Mays
gctagcgctccttccacattgcaacagaaaaggcctccatatcgtctatgacaggtcttgctcggtgcatgatttgacagacacaaaactactagtgcgtgtagtatgcaccgcatgcagcatctggcgcagatacgctcgcacgggatcggcccggggagcagatcagcgctgccgcatgtgtgcggagatttgctgaaagcctggcaccatgcatacacgttcggtcggcctcaagaatctgctgttaattaggagtgctactctaaccatgtgcgtgtgcgtggctgtggctcggtctatcagtaactccaccaggcagggccccatgtcacgctttgagatttagtaaagaccgcgaaaccaccctccaaattaaaaggcgtagcgacctggactggacctaaccagctaaatggctgcactatgacgaggtggcagcagcccgcgcttattttatctgatccgggtcccgggggggttaaacaaagtggtgttcatgtgtcatgccgtgatccagcgctggagttggttgtgtcgtgacgtcgatcgggccgggccggggcctgcaacggcgtactttaaacatagaatatataagatacagtcgttatctttgttcgttcgaacttgaaagatcacgcacaggtcagagcacgtcacgccgcttctccattccaaaacagaccgcttaataacggatcctgc

SEQ ID NO: 194312 - DNA, 318 bp, Zea Mays
cacatcccctcgccgctatccacgcctcgcagcaatccaccacgcaggaatcccattgccgatgacgcgcaggaccacccattgcccaatcgttcttcccatgcaccgtggatgccccgcccatatcctcctcgccccaaacgcaatccacgcctcgccgccatggaaggaatcacaacccatacccctcatcgccatccagcgcacaggaccaccccgccatctcattcttcccattctacgcgccagccccgcctagatcttccgatgctcgagtacttcccattctacgcgctagccccgcccagatcttgcgat

SEQ ID NO: 194313 - DNA, 549 bp, Zea Mays
ctatcttttggcaaattcttgtctcttggtattggtatgctcatctcctcgaaatctctcatactctcattttttatgcttacctttatatcccaaggtcgggttaagatattttattttacttgtccttgaccacccttgtttcttgatgatccatgagtggtcattttattttgcacatccttgacaatctcgttaattccttgtaacttcctttggtaatgagtttttacttcaacccttctgttggaacattacctatcttaccctcgattgttttctccactccgccatttcgcgattcctgccttaactctatccttggtcatgcatttcacgatcatcatctttacccttgtcgcctctacatcttactttgatgcttatattatacccgtcctttaaaaccttctctcttccgtctcagttttatagtcgtattttacctattttcccttagttgtatcatattccttgtcgctcgcgatttttttaatccaccctttgttgtctgttactacctttaccttcgccatctctccatcttac

SEQ ID NO: 194314 - DNA, 326 bp, Zea Mays
ggcctcattacctcaatagcctttattttctccgggttagcttcaatgctccggtatgaaaccaggaaccccagcaacttccctgcggagacaccgaagatgcatttctctgggttcagcttggtgcgggttgcccgcagcttgccgaaaaccagggtcaggtcttccactatagccgacccttccttagtcttgaccatgatgtcatcgacgtaaatttccaccttatcccggatcaggtccccgaaggtcttgctcatcgcccgaacaaaagttggcaaggcattcttcagaccgtagggcattacaacataatagtatagtcc

SEQ ID NO: 194315 - DNA, 435 bp, Zea Mays
cgagaggaagaatcaggtggtgccaccggcatctccgttaatggaggagcccgtgtggaaggaggaaaagcagcgtaagaaaaggaaacacgtgggcgccgcactggtggttccatcgccgccgactcctgatgcggcccaaaacttgcggatggaagccaagatgatggctgagggggcgacggtgaggaagaagcagaggcggctgaaggcggggcaggagcaatccggcgagccaccattttcaattgatgtccatccacaaggaggggaagaagctactgatgatggtggcgttggcgtcatggtcactcagtgtgtcaagaggagcaaaagcaagaactcccgggttttgaagacgcagcagacactgccccaaggttttttccctcccatggccaatcccaattccattgatcaggaccccaattattc

SEQ ID NO: 194316 - DNA, 308 bp, Zea Mays
cgggtttcgatgtagactacccgtcgtggtggttgtggccgaggagaggatctagcggctctaagctttataggcctggggttggagcccagccgggggaattcataacggatctccggtacgaccggcagtaacaacccgggcggcagcgagaaaatcgaggggttggttgagcgacgcgcagatcttgagcgacaattcagggctagatccgcaatccggtaagatctctagtaggcgcaaggcggggctggccaggcggtctcaccaaccgacgcctgaggaggaagccacacggtcgagcagag

SEQ ID NO: 194317 - DNA, 596 bp, Zea Mays
gctaatggggcttgacttcttcgatgagtacaagcttgactgcaccaacatcatcatcaatgccctgtcccgatgcgatgttgagaccctgtgggtggccaccaactttacgttgtccttcccgccgtgggatgccctgctcgccgaggtagctacctaacttgagctccaagaactcattggctatgtcaccgctggtcgcaaaggtcctagctagaccatcgtcgataacctgatcacgatacgacaccatgtctttgtcctcgcctcgttgcctctgctttcatgcattctacagcagctccaccaaacctgccacgaggagggcattcaacatatcctccatcacctgcacgccgacttccatgtacctgccggcaaggccctggcggaggcctttgttggtgattgcgcggtgtgtcaacaaaacaagacaagcaatgtccacccttgcagccttctccaacccctaccaattctggagctgatttggggcgatgtcgagatggactttgttgaaggcctgcctcgcgtcaacaagtctatcatcctcacaatggtgtatgggctctcaaagatggttcacttgatccccc

SEQ ID NO: 194318 - DNA, 413 bp, Zea Mays
gtattttgtatggacatcaaatttgaatacacatagagccttgcgtgacaaagaaaatcaaaagaaatggacagccattcgtgactttgctgagggtctttgttgggagatgctgtcacaacaagatgagacaattgtatggaaaaagacaaataaaagggactgttacaattcgaggtactatgctgcttatcaacacctacaagttttataataataaatgtttacctgtttagactagtaattaacttacagagtcgttttacagaaaatctgggcctgagctatgtggccatgatccagaatcaccatactaccaaccactaaacccctgcatatcaggcacaagaagtcagcgttggatccccattgaatatcgtaccacctggccatctcaggctagacaaaactca

SEQ ID NO: 194319 - DNA, 329 bp, Zea Mays
atcaaatcctttgtgaatatcaggtattaccaagattggtgcagtggttagctcttcctttaattcttcaaaacatttctggaaaggttcatcccacttaaaatatttacctttctctagcagtgaagtaagaggtttcactatcttggagaagcctttgatgaatcttctgtagtatcatgctaatccaagaaaactcttgatcttggacacatctgttggttgtttctaatttagtatttcacttattttaccagggactaccttgattcctccatttgtgataatatgacctaggaaagcaacttccttcagccaaaaataacact

SEQ ID NO: 194320 - DNA, 279 bp, Zea Mays
acctctatcacgcttgacaactaccacatcacccgatttatctatttggaacactgcctacctagcgtactactagtaccccgtattttgactcgacttaaaaacatagaggaagcgatgactacttcggcatgtcaccacctcactacacaagccaaaattattattatttaaccacacactagatagacatgatttcaattcaacttgcccgtattttaaatctcggcataagcttggctattggctaacgaagtgaccattttctaattaacaaca

SEQ ID NO: 194321 - DNA, 561 bp, Zea Mays
gatttgcctgctttatttcttcttcttcttcacaccgagctagctagctatcttgctttaatttgcctagaacgaatagatccaccgtactagcttcttgctcgatctgcagcttctcgcttgtgagccaagagcccggccagcagtgtcggccgtgcagtggcactctctccatcaacaatcaaccctctctccgtcgacatgtggaaaggtaggtagagatagatggtgtgtgtaatccggttccttggttcttgtgtttccgatctcctctaattaatcgatctctctacctggccagctcacttcacccatgcttgcatctagctgttccaatctgatgcatgatatagatgatgcttgcggcctcttcttcttgattcataggctcatcatctatgcctctgtcatgcacacactcgtgtctttcttcttgatggatacacgtacggggggttgggttgttcacatatatagtagtatagctagtttattagatgcaggtatacagatcatgaggaagcaagaaattatgcaaaacagtcggtgcttgcaggtgca

SEQ ID NO: 194322 - DNA, 475 bp, Zea Mays
gctccctctaccactctcttgctctctttggctaatggacccgggttgtcagccttcacagacatgtggacccggcttgccagattgatctccctccccgcgcggcgctggattcggaacagaggaattagtagcttcgcgcagatctcaccgtgctgttgctccttggggctacctgtctcccctaacctaggtgtttaaacactgaatcctcgcccactgttgtgctaaatcctagcatttgtgagccgccatacgaaacagaggaatagaaatcggtgccgcccactatcggctcatcgccagcctcagcggcaacccaggatcgggtcaggggggaatgaccatcagcctcagcggcgacctaggatcgggtcgctaggccgtgtggtggtcgttcgttggcacgacgggggaaatgaccatcaggctcggtgaattagcctttggtgtgtgtttggcgccacgtttctac

SEQ ID NO: 194323 - DNA, 340 bp, Zea Mays
ggtggaggtggaggcaatggtacttgttgctgttgttgttgttgttgttgaatttgctattgcagctgctgttgcgccctcctttcctggcgtatctcctctcgctcctggcgcaactcctgtcgtatctcttctctttcctggcgcatctcctggcgttcttgctgcatctgagcacgcatatccgccatagtgtccgtcatttgctgcatcatcctcatctgagctacaatcagtgggtcaactccgtctggtggaggattaggaggattcatctctgctggttgtggctgaggttgtctatatatccttcgagtgtgtcgattaggaggcaaatcaa

SEQ ID NO: 194324 - DNA, 903 bp, Zea Mays
tgaagcttgggtgcttcagtgtgtcgaaaattcctcttcatgtatgggtggaagatcacataaagtttgaaatgataaattgacattttagtcctggttttatcacagtcatgtttagtatacgatctgaatatgtgaatcgtaaaggtctgttctcaaattgaagttttctacccgactccctaatatgcaccagttcaaagatctatcttatgctaagagtgagatggttttatacttatgctatacccgttcttgtgttgtgaggcatgaaatccttggtataccaaggaagggaagtgtagtgtagcatatttggaccattgatgagtcattgacagcctcggttggtctgatttggttctgttactgggtgatttgcagggcgttcagaactataaaagtttcaagaagacagtagcacgattggaagaggctgctgtatcatgccgtgggggtgaaagagttgaattgttgaaacgttggttaggagcattgcaagatgttgatgctgaaaatggaagttcagatttaaaggtgtctgaagctaatgacccttctggtgaaatggacactttgaaagcacaaactgtgagtttacatgctcataaattaaatctcatggctgttcatttcacaaagttatgtgatacttttgacttttgtccagtcgcttatacacatcttagctgttgtaggctttctcaagtacatatatccatcttaaatttaaaattttggaagcaggttttgttctatgatgctgatattgatggtgcacctatgaatttttgtgatgtattcttgtacagccaagcacttgaaggtattacattgtccatggtaagttagtcgaaccattttctcttagcaacattgctattgtttatttgcacttaggtt

SEQ ID NO: 194325 - DNA, 396 bp, Zea Mays
atttgtttatcgcctttgctcagaagccttcaaattgccaccaccagcaaccacaatgtgccctcctgatcccaacaaattggatgacgcctctgcgtggtttccttctgctccactgcctcaactttgtttgtttcctgcatcaattgctcgcaccaactgtcaaattgctgccacccctaccctctaagtccctctgctactgattcccctgcagctgatctctgcgaaaattgtcctcagccatccttcacgacctattctcacagcagttgtcctcctatacattagctgtactcgtcctccatttttaacggtgtgccacctgccctcccatgcttctgctcgtggcatcaatttattgccatcaaataccattggcccactaaaaccagc

SEQ ID NO: 194326 - DNA, 276 bp, Zea Mays
tacctacccgctcttggtcattcccttttcctttaccgcgttgccagtcatagcgtttgtttggtataccccttacccttgtaatcactagatcttgacttgatacctacctaaggtctgcttttggaaatctccccttttctatcaaaacccgagagtgatgttctaccccttatgtcttggtcgtgaccttttctaggtcgctcataatgcttgctttaactccatcctttattgtgcttgtgtctctatcccacacgtcttgttcttctcctc

SEQ ID NO: 194327 - DNA, 377 bp, Zea Mays
aacgccagagcagcataaatcattcttgatgtcatcacaaattgaacataaatggctctaccagcctttgtcatcagatcagctttccacccaggtaactgtgctgcagttttatcgacaattgcttgaatttgacttctcctaagctttccaagagaaagcgggaggccaaggtactgacagggaaactccgaaatggaacatggaaggagctcctgaacacaagcaagatccgcctcagaacatcgaataggaaaaacattgctcttctgaacgttggtctttagaccggacgcatccccaaaaatccgaaggatttccagaatcagagttatgtctgaaggcaccggcttgaggaaaaccaccgcatcatccgc

SEQ ID NO: 194328 - DNA, 389 bp, Zea Mays
gtcacatagtcataagtatatgaaatgtgaataaatacatacacagagtgttatggcacagaaatcgagagttatggcgatcgagaggtcaaacgacgcgaaaacggcgtttgaacaagaaatagtgccataggaggtttgaaattcgaattgaggcatgaaatgatggggaattgagccgatacttcacgaataggtttatatgggtaaataagagtgaagtgtgcgcttggtatgatttgaggcgaagaaaatggaatttgggcactcggctcggaattgatcgctcgaaacggggaattgtgtgaaattgaagcctgatatatcggattggcgtgaaattgcacgaatgtgttactggaggtgttgtgaaggtgcctgaaaatttt

SEQ ID NO: 194329 - DNA, 892 bp, Zea Mays
cagcggcggaggcttctccgcgtgttgcggatgctgaagttgtgcctagtccgagtgctgggcgtaggcggcgaagggcggtggcgaagcgtagagtgagtgaggtggatggtggtcggcttcgtgtgggcagggctggcaagcaggaattgttgtcctcgccggctggggcgagtgtaggtgagggggagttgcgaagtctatttgagggtgaggagcttaggataatgctatttaactataaggagatgggaatcattctgaaggttgaaccgatgtaaggtgtgatgccctcgctgtaagtgtgttactatagtttgtatgatgaggctgtgtgccttcgcgtatccggctatgtctataggggcgttgcgcgcttagtctggcgcatttattatgttggtctggctgcgcctgtagttggtctgtgcgcagatagtttcttggtgtagatttgtgcttggatgtaatgcgcttgcgttttggcgcgcttgttgaattagtccggctgcaccctcaggcgacttttgcacggatagtcttttgaggaagacttcgattttgcgcacttgttgtgctagtccggctgcacccttaggcgacttttgcacggatagtcttttgaagaagacttcgattttgcgcacttgttgtgctagtccggttgcacccttaggcgacttttgcacggatagtcttttggaaaagacttcgattttgcgcacttgttgtgctagtccggctgcacccttaggcaacttttgcgcggagtgtcgcacgcgagggtagctagcgctgcccctcgcggtgactttgtattggtcgaatgtcgaagaccgtcgacgcggtcttttttcgacgtagatttttgcgggggatttttcgcttgtat

SEQ ID NO: 194330 - DNA, 520 bp, Zea Mays
cccggctgggaggggcctcacaagcggatgcgcctgggcgaggcgccaccgttcgatccgtacgactttgtgcctccaccgccgccaggaagggcttctgtggagggcgatcggctgctcggcctgatccgggaccatggccgcaatccacttcccggttgtctacctgacggcggctttggttacggaggaggtagattatatccccggcaaggatgtgattttgcggatttcgaccaaaagttgccacctcccatgctgaatgataatggcttcggacaaggttttgtgccagacgaaggccctcaccgaaagtattttgacggtgccaatcaccatttccatcagttccacccagagccattgcctggtgcgccgctgcaccctccactgcctcgctaccctgatccccatggttcacatgcttggcatgttgaggcaggtgctgtgccacggccagcagagcctccattcccctctaaccatgattaccgtgctgcaccgccacggttgactgcaa

SEQ ID NO: 194331 - DNA, 700 bp, Zea Mays
cgaaacttccaagtaatctctcctcacctgaagacccttctcacttattttttttgaaacccaaaccttaatatcattaaacatcaggcccagcactcatgtcacggaccaaaacatcgtttacaaaggttgggaggggagctgtccacaacataacaagctccgggtccccagataaagcaaagtgagctatagaatgtgcacccgtattacaaatacgattacaatgcttaacagaacaagaaataaaatctgaaaacataagatgtcttaattccttaaagagccatccttcaacgcatagatcaaatgatgttgacttcagggctttcaccaggttgaggcaatcggtctccaaaataatattgccaatgcctaaatcacgagcagcctttagcgcttctaaacaaccaacagtttcagcgtgcatcgcttggaaagctttgtataacttccctgcgcctgctgctatactatcaccagtatggtctctaatgacaaacccccatgctcctactttcagctctggtagaaaagctccatcacaattaattttgaggaaaccttcaggtggtggagtccatcgttcttgcatctgtacagcagctgtatttcttggtttcgtacctttcacaattttctcccatcctgtcatgctcattaccgagtgaactaattcatcagttgagttccttttgtc

SEQ ID NO: 194332 - DNA, 484 bp, Zea Mays
gtagacggcagtgagaaaagcctgatcccagtatttcaatggcatagatgcagtggctaagagagctaatcctacctcaacaatatgtcggtgttttcgttcggccacgccattctgttgatgagcgtgagggcaggagactaaatgagtgatgccaattttccggaaaagagagttgagccgaacatactcaccaccccaatccgtttgcatagcaatgatcttacgattgaacatgcgttcaacaaggttttgaaactcatgaaatatagtgaatgcatctgatttgtgacgcaacaagtaaacccaagtgaatttactataatcatcaatgaaactgatataatatttattgttgccgaaagaatcaattgctggaccccaaacatcagaaaagatgagatccaggggagcactagacctactaaccgaaataggatatggaagctgtcgtgccttggcacgcatgcatgcatcacaaacg

SEQ ID NO: 194333 - DNA, 935 bp, Zea Mays
aaagatgcgtgattatcaattagctggacttaattggcttatacgattgtatgagaatggtatcaatgggatattagctgatgagatggtatgctacatgtgttaatcttgattaagatgatcttctactctattttgttttgtttggcactttggctttgaatgcatacttttttataatttagggacttgggaaaacacttcaaactatttcattgctgggctatctgcatgagttcagaggtataactggtcctcacatggtggttgcgccgaagtccacccttggcaactggatgaaggaaatccaacgtttttgccctatcctacgtgctgtgaagttcttgggcaatccagaagagcgggttggtctcaagtctattctttaatcccttatggaatttttactgccatgttactgaatactgatctcttattcttctgtgccagaaccatataagggacgatttgctacagcctggaaaatttgatgtgtgcgtgactagttttgaaatggcaatcaaagaaaaatctgcgttgaggcgcttcagttggcgctacataattattgatgaagctcaccggataaaaaatgagaattctcttctatcgaagactatgaggatttacaacactaattatcgtctcctcatcacaggcactccactccaggtaggcttctgccagtattgtttgttatatagtgtgtgcacccagaacaatgattgagtaccgattcagtaaccgtgttgtgtcatattagtttttggtttaatctgattctagtccggtttgctgctacatggcagaataatctccatgagctctgggctctcctcaatttcttgctccctgaaatatttagctctgcggaaacctttgatgaatggtttcaaatttctggggaaaatgatcaacaggaggtggtccagcag

SEQ ID NO: 194334 - DNA, 390 bp, Zea Mays
acagatatgccgaacatgtaggcttcagtgtacggcgctcctacaagaagcggaagcgagggatgatagtgtcgcgtatttttgtttgttctcgcgagggtgtcagtgaccgcaccaagcaagagggtggagccatagtcattgcaaatggtggtgcagggtcagcaggcacacctaggccaggtccgccgccaacacggaccggatgtcaggcaagaatggtgataaagatcaccccctgccgaacataccgtgtagcaaagttttttccagagcataaccatcctctggccaatccagacagcgtgcataagctgcggtctcataaaatgagagcccgtgcacatgagcttggagcaggggaaatgcatcgaaggaagcaagggaagg

SEQ ID NO: 194335 - DNA, 499 bp, Zea Mays
gtttatctactattgcacttagtcgctgacacattgccgaaatgaccctaaacttctatttcttccccaacttgctccctgaccgcggcgcgctggtcgaacgtctcggacgaggtctgtaccggccatggccggcgacgactgcccggactaatgatcgggaaagcataaccgacaataggtgacctcggaacacgcatcaatttgacatgaatgcattgagaacggcatgtccacgtgcacggcggaaaccgtgaccacgggcacgcgttcccgcacaaccggggccggattgagtaatcggacgccacgatgagcttcacaagcgaacggagttgccgaaacaacatttgatttgggcagagccttaccagggtgatatggccacggagcgcggtatttcgtgcttgccggagacggaaaagggggaaaatggggtcgcggcggctctgagcgaaattgggagatgggatcggggctaaaagaccgtaagaggctg

SEQ ID NO: 194336 - DNA, 712 bp, Zea Mays
agggaccctcgtcaacgcgttcagcgatatgcagacttcctccgtgatgtcttcgtcctctggcgcagcgtcgtccaaggacaggcagaaaacgccgccccgcgccgcacacttgtgaaccgggagaatttctctgggcaaaaataacattctcccttggcacgtttgtcggcgatttcctcagtcgacagccgacgaacgcggggtcgttgtggttcctccgttgtcagtgctggtgtcgttgacggtggacgaggacgggaaggctggcgcggcgtggacgagtagacggcgtgagccgcctcagcggaatggtgctcaaaggccctagccagactcatggccatctgaaggttcgccggatgttgcatctcgacgtcggatgacaagagcagacccatccctacagtgaacaagtagatttggtcctgccaggttaggttgtcgcgtcggcacaggagggccaagaactggctctggtactcctccaccgtgtcagtgcagtggagctccttcaactccccaagtgcgttggtgcggatgggcgggctgaagcgcatgttggtgcattcgacaaagcgcgactaagtgatgatgccgagatcacgctgcaactggtagtaccattgcgtcgtcgtaccatccacaccttatcctccaacaacgtgaggtagccgcggaaatagccttcacacttgttcaaccatggaag

SEQ ID NO: 194337 - DNA, 503 bp, Zea Mays
attttcaccacaaggagggcatgcgaatttcccatgaaccatatgagaagcaagcattcctaaactaggaagatcacttatggtcataagcacggcccctcgcatagtaaaactctcatctcttgatgcatcatatgtgtacaagccggttagaaataattcttttaggtcatccaagagtggctcaaggaacacatgaattctatctccaggacttttaggaccaggaatcaataaagagagcataaggtggtgatctttcatgcaaagccatggaggaaggttatataccaccaatataacaggccaacaactatgtgtagagctcatcatcccaaatggattaaatccatcagtagccaaaccaaaacgaatattacgtgattctgctgcaaatcctaggaacttttcatcaaacctcttccacaccggtgcatcagcaggatgtcttaatgcaccatccttaatgcgctcctcgtcatgccatcttagaagagaagctg

SEQ ID NO: 194338 - DNA, 530 bp, Zea Mays
tggcggctcggcgaagaatttccgccacggcgagcaattcgcgagcaatcgaggcccattcatggaagaagatgtcctgccaacgaccgcacgatcctccctgactacttcctggctctaatcgacagcaggattcggtactctacgacgaaccaagcacggccgcattctcccttctctctcccacgattctctgtgtttcaagtgctctgatcactacgacgaggcgagggggaagaggtggtggtcatgtaatggcgaggtccaagcgctgcagtcgatgcaccctggattatggaggtcgaggtctgccaatttcggtcgaattggttgcaggcgtctgtgcggagttcggcgatgctgttagcggacgacctggcgcaccaggcccacctggcatcgtcacaaaagaggagaccggtatacgtccgaagaggccgacgagtggggcacagttgacagtggcacgcgggtgtatcagctgtggtcaagtactcttgggcgctcgtgggccgggatcggctggttgg

SEQ ID NO: 194339 - DNA, 448 bp, Zea Mays
ctgctccagagtcgacagctgatcctattccagttgaccgatgatggctcctgttctccggcaaggcaaccacaacatgagctcctcaagtgaaggtcccccgccccaagtttccctcttttctctcctgttttctggtctgctcttcatctgaatgagttaagtggtgctgagtgccgactgccgatggtctgtaactctgtatgagttaagtggtgccaaaaagtggttgttttgcccttcctttgatctgtacagagatccatggtagccgccgtggtgctgataacgttgaggtgatctttcctgagtctcatgtggttggtggagcccctgcatcctctgttgctgacagcaccgagcctgcgtcgacatcgttggccgctgcagattcttcggcacttgctgagaaggccattgcagcgctgtctcctgagcttcgtgcaca

SEQ ID NO: 194340 - DNA, 447 bp, Zea Mays
gacgctgaacaaggttataccacaaaatcaagttttggcccactaaagacctacggaaagacacattaagaggaacagatctgaaaacattggctactgtggcacttttatgccgaacaatttggtataaagatgggtactgaaacatgagagattgatttcctaaccatttgtcttcccaaaaccttatttgttcaccattcttaagggtaaaaacaccaaggcttaagaaaagacccttaactctcatgagccccgaccaaaaatgtgagccccctggcttatacattactttagatagagtataattctttaggtatttttttcgtaaaacatgttgtcacatgccatcctcattaatccacatgaagagccacttgcttagcaaacacttagtttgaatgtcaatattctgaattcctaccccccttgttccttaggtttggc

SEQ ID NO: 194341 - DNA, 319 bp, Zea Mays
tggagtaggtagggccttcaatttatagtgatcgactacgatggttctgaattttggatgagagtgagactcatttccccggtgggatgattactgagacccaccatggagctcatgcattcatcggtcgacggtcacgacttaggggatgccacgaccacgacaccatggtgaatcaggcgactacgtgtctttcaccgggaacacgacgaacaccggcagcgatatttcaattgaccgcacgggcaagtgggcacgacaatgatccagctcagggcctatgttcacctcacccaggatcttttcatccaccaaagtt

SEQ ID NO: 194342 - DNA, 810 bp, Zea Mays
tatggattggtagaccagatcctggcaaagcaatgctgatggaccctcctgttatgcaaatggactgcaagttgaaaaatgacgtggataaaacatcatcaattgactatgataggaaggtgaccatctcacatgatgattatgggtgggcaggctctgatgtcaaaccaaaagatgatatagtatgtaaccctgtggaggttagtaatgcttgtcaaacaggcataaatgaggtattagattctgcttccaaaaattcacctcttaacttgggtgatttacctcagggtgcagaactaagaaataagaatggtgacagttcctactccaatgtaaaacttcagttgaactcaagtgctggaaataataatggcttgcaaactgatgatgacaactttactaaacaatattttggtaagaaggatatgcatcatcgacaggaagagatgcatccttcttccaacacagtgtcattaccaacttcatgcagactcaatggagatgccacaccttctgaagaggagaaaatagcagaggatcgtgtcaaagtggatggaaatgtagatgctgtaattaaggaagtcgaaactgacttggtaggatgccatgcacatcagaaagaatttcagtgcacgctccaagatctatcagaaatagcctgcagtattgatttagtacataatacatcttctccacaaggagagaataagaagcctgtctcccctttaaatggcatgggccattatgttgataacaatagttgtaatggtgataccaattataaaggggaggagctcaatatgggggatg

SEQ ID NO: 194343 - DNA, 284 bp, Zea Mays
ctagttatgttgtgttcctgggtggaaacttcgtctcctaggccccaaagcggcaacccgtcatctcccgctccagcactaagaccgagtaccccgttgtggccaacggcatggctaaggcctcctggctctgccatcttctctaggagctccacagccccctcaagcgagtgtggtcaacctctccaccaatccggtgtagcatcagcgcacgaagcactgagtttcgaaccagtctcaacatttgtacatgatagagttcagactgcgagggaggggtgtta

SEQ ID NO: 194344 - DNA, 430 bp, Zea Mays
caaactgttgttctctgtacagggcaattcacatgcctagtgagctacctactaacgaaccatcaatccaacatattcctcataaattgccttctgtggccagagctaatatgcacaacacaagcaaataccaagcttgtttggtggtgttggttgtggaatttgtatttgtgcatttgggtggtgtctccaacttttaatgacagcctttcagtttcgtggatggatgtcaacaatcttgcctgggtacaactgaactcatgtatacaatactcatgtagtcatgtattagcatctagatcagatgggcagttatttggtcatccttttcctgaccatgcttttatgcaggtatctttactcagtacttcctccaggagatgaagatctcaaaggtacagaggttcaggcaattataaaatttaaaagt

SEQ ID NO: 194345 - DNA, 357 bp, Zea Mays
tgtgtcttgttttatatgttcctttctctagtgattgcgatataggagttccatagatattgacgcttatgtcctctattgaatatgtgttatcagtgatgcttgtgtgtgatcaataggagaactaataaaaagtcatgtccaaataaataaaatgtgcgtgcttgtgatgttgtaattgtgttgcgtaaataaataacatgttgtcgtctttttaatggtgttaatgttgaacgtcgataatgtgtagataactaaagcgaacatgtggttgttacggtgtcttccattttattgtttagttcgccattgtgtccttgtatatcttgtgctacttttgtgctactttcattatat

SEQ ID NO: 194346 - DNA, 393 bp, Zea Mays
cgctgcccttctcatccacgaggcagccgcgctcatcaaccttcacgcccaggcggtcgccgtccagaacatccgggctcttgtccctgtggttctagacatctcctccaccctctacaccagatggcgcgactccttcctcctcctcgtcggcaagtacactctggcggaccatgtactcaccgacaccttcgcgcccacttcccctgactgggttcgaatggactgcgtcgtcaagtcatggattgtcggcaccatcaccactgatctcgccgatgctgccctcacccgcaacgctactgcccgcaccgcctggcttgcaattgagtctcagttcctcgggaaccgcgagactcgggcgctcttcctcgacgcggaattccgcaattttcg

SEQ ID NO: 194347 - DNA, 408 bp, Zea Mays
attcaatccccaagacagtaaaccattgaggcatattaaaacacattttccatgaggtttcctaagtgatcctttaggtaaacagaaccatacctagctccatatgaaactatttcccgatttgaagtacacctaagttaaggttcatacattggagctctggcagtaaaacaatagtccttaccttgagacagcttagattagaatgaggtggatggtaatatggcatgagcaacataccacagttcatgcatggaggaaatcatttttactttctttcctagccatggtagttgtgttgctccttaccaaggcactacatggagcatcatatggttcatgatgtaaacatggttttagatctgtctatactcacactcaagaaccagccaaaatgtgatattccac

SEQ ID NO: 194348 - DNA, 829 bp, Zea Mays
gagtgcgaacgaggtggagcaatgatgggagaagttggctgagccgtccgatatgtgctggcaatgacaaaccgacgttgtagacgtgtggacaggatgatcgagaagcaatgtgggaaggcgccccctcgacattgcatgctctaccagccacatggttgaagaagtatattgcggtgtagtcaatgtcgatcccaatgctggagtagtgcgcgaggtcgacgggcggtgggcaactcaatccagattagtgatcggacaaactaaaaaaggatattgtagcagcatatgagattcactgtggttgatgaacttgccctcaagaaacctctaggcacgagagggctctgtgaatgcgacttggcaaatcagtcagtgacaagggtagggaagcgtagaggagaggcacaagtgatcaaagcagcaattgtttggctaggatcacatgcaggcaatcagatcaatggtggcatgtgtatagcagtaggcaagagattaggtagggtcgtgtgagtagggcgtagattggccagctatcaccatggtggctcggtgttgggttaacctggcccaaggcaccgccatggagacacatgatgaggcgacgactagtgtacttcacgacgagcgcggatagggtgacgaggtggtctggtgccacaagaagtccctatatgttacttgacgatggcgaggatgacaactggatcaataggattcgttgcctaatggggtggcgctggccccagttgagatctatctcttccgagggggcacggtgcataagctcttagtggctagggtttgggcccaagtgcggttggacaag

SEQ ID NO: 194349 - DNA, 746 bp, Zea Mays
cccaggaggcctaccgcctcgtcctctcgtctgactcggaggtaaacgcctacacgcttaacatcatggtccacagctactgtaaaaccctagagttcgatggggctgacactgtcatctccgagatggagaagagatgcgtgttcccggatgtggttacacacaatgtgttgattgatgccagattccgtgctggagatgtggatgcagcgatcgcattggttgattccatggccaatagggggttgaagcctgggattgtgacatacaattcggttttgaaggggttgtgtaagcacagaaggtttgataaggcaaaggaggtgttcaggacaatggaccagtgcagtgttgcaccagatgttcggagtttcaatattttgatcggaggattttgtagggttggggaggttaaggaggcagtgaagttttacaaggagatgcaacatcgttatgttacaccagatgtggtcagctttagctgtttgattggattattctcgaggagaggggagatggaccatgcaggggcatacttgagggaaatgaaggggcttggattggtgcctgatggtgtgatttacacaatggtcataggtgggttttgtagggctggatcaatgtcagaggctctaagagttagggatgagatggttggctttggatgtctgccagatgtggtaacatacaataccctgttgaatgggctctgtaagcagcacaggttgcttgacgcggagaaactt

SEQ ID NO: 194350 - DNA, 331 bp, Zea Mays
atcagctttcggattgcaatttcagaaattttgggctgctcaattcagccctcattacccttttgccaaagcttgagggtgcagcccttgtgaaggacttccgtccgatcagcctcatacatagcttcgccaagctggtaacaaagatgatggcaaataggctggctggacacttgggtgcaatggtttcacccaatcagacggcttttatcaaaaaaaggttcattcttgacaacttcatattggtgcagcgtacggccagatatctccatcaacaaagacaggctcgtatcctcttcaagttagacatttctaaggcttttgattcggt

SEQ ID NO: 194351 - DNA, 546 bp, Zea Mays
agtaaccaaggaagacacaacgggtggagcagggggtaagcttatggggaacagtgacataaatgttggggtagcacgcacaccaaagacacaaagatggtcacaggatggagtggtgccaaaaagagcaaagtggggtgtgggggcatgaatcaccttagtaggaagacaagagatatgtggcagtgtggaggctctcaacccagtagctagcaggaacgaatggctgaaataacaaggagcgcatgattttgttagtagttggaggaagtcgggtcaagagatgaggactagagcgaatattctaaagacttgtcgcatgggcgtggaggttgatgacaatggcctcgtatgccaaatgggggtcgatccactaggggctttgggggagggttgaggcagggagaactgatggtgctcagcctcgacaagttgccaggcgagagcatccgccgtggtgcatttgtgctttcaggcgagggctgcaacccgtttctgctcgcctgcagcaaactcaacatccgaaggcgggaaaggggtcagcgg

SEQ ID NO: 194352 - DNA, 365 bp, Zea Mays
gtcgtactcgtcggttaggaccttgtggccatactcatcgagttgacctaggctggtgatgtttgctgttagtcgggggatgtagacgctagccaacacatgatcgtcgtcactctttcacctgaagaggacaatgtcgcgtccctcaatggtgaccatggagctgtcacccaaatgaatggtcttgcggatgccgatgtcgagctcgaagaaggcaatgcgctcccccccatgcggtttatcgtgtcggtgttaatgatctagtgcgtgctcccgccactgcccttctcctagatctagacagttagttctcatcgaggtggatctctggccttcctagggggctagtgtcgcttgggaacgcc

SEQ ID NO: 194353 - DNA, 279 bp, Zea Mays
atctccataccagctcttcgcaggcttgttcgcgcggcaggattggggtgctcagctgcgaatgctgttggggtggtgccgctcgccaaggaatgatagtctgcacctttgttgctcatggtgcagtgggcacgtcagtctgcacctctctgtgtgtcccgtgggggtctgtattcggttcttttgtgttcagcctgctctgtgcgttcaccgggctttgcttctcagttgtcccagtgtctgtgtgctttagcatgatggtgtctgtgtgttctaaaa

SEQ ID NO: 194354 - DNA, 520 bp, Zea Mays
ctgcagctgcgcgaatacctcaagggtgggcgaacaactgtgtttcaggggacgtcaaacctgcacaagctggttgcgaaacttgaatgctagttatgtgagaattgtatggcaagagcaaggacatgaagctaagaagcagctcattgtttgtgtgcctctgggattgatgcagacaggaaagaggcaccctgatccctttcttgtaaatgttggtgagcatgttggcattggcatcttgatctgtttccataggtaaggtgaagaggattgtgtaagataaaagggacaagctgtatgtaaagacaagccaaagctgagtgaatttcaggcaccttattgtgtggagggtcctgtgtttgttgagtaggcaacgctcgggctggtgtgagatgatgactgcatttgtgttgtgttggtggtattttcactgctgacatgactgttgtatcggatgacatcttttctgttttatgacagtggcagtgtgatactaggctgttaggaggggacgggggag

SEQ ID NO: 194355 - DNA, 434 bp, Zea Mays
ccccaccagagcacgtgaatttgggatttccccaaaaccgttgaagaacaccgcgaagaacacctcgccgtggtcagcccgattcaggtccaatctcaccctcggtttccttgtttcaacatccttgcttgctcttgatgctcaccgacccgttaaatcgaactagaccgccatgaatcgtcgggaacgcactcatcggtccgccttgtccacggtcgccgtggctagaccaaaccttgtgaccattagtgaaattatgttgggggaaatgctcggggtagtgctaattttgtgtccgttgctcggagaaccctgccgttgccctaatcggccggcgtagatgctcgccggagcacggctgtgcgcgagcgccgtcgtggacttccaatcgtgaataggtagaagtgcaggggtctttttgtaatcggtcagcg

SEQ ID NO: 194356 - DNA, 300 bp, Zea Mays
cctagacttaccatctcagaaccgctgcaccggtgaacgccacgactgagccaccagtgaccttcttcctctccggccgccagcacgccatgcccaaattaggagacaccgcccttggatactataaattggtgccccagccggctccgctaagtagttgtgcacccagtgaaccaaccctcaccttcaatcgtcccccacagctccccaatttgagatttcctccaaatcaatcaagaattccaccatgtgtgagctcgtcgtggccagctctccacaggtccgatcacgccctcctcg

SEQ ID NO: 194357 - DNA, 503 bp, Zea Mays
ggcggcgatcgacggcctggaaacctagatccgagcaccttctgcaaagcaaggcgcataaacttcacaacttttgtcgccccacctcgtagcgcctgcccgcaccaaatgcctcgcagtccagtcgatattgtaccccgcgtcgcggagcgaggaaaaagaaggcgaatcgatgtgtggccggatctccgtggcgaagaataccagcaccgatgaccgaaccgggaggaggaaaggaacactgacacaaacaataacttgaacaccacgaacaccgccgcgacggatgggtgggtaaaaggcgacgaagaagaagagggcaaggatagggatgtggaggagagattggggaagccgcaagccaggaacagcaacgggaagggcaactgctcgaactgggacgattattacccacgcgctgcggcgctggggattgggtttggatcgctgctgccattgtgtgcagctaataaaaaccaaaccccgccttcccttttcgctca

SEQ ID NO: 194358 - DNA, 439 bp, Zea Mays
tggtttggtctatcacataacgctgccagatccactcttgcctttatgttatcctttgacttatcaggaatgtccataattgttgcccaaagtgcctcggcaacattcttttcagtgtgcatcacgtcaatgttgtgtggaaggagcaggtcgtcataataggggagccgagtcaagccagacttatgtgtccacatattctgctcaccatatcccacaaaaccaccttctgtattggccacgagcccatctatctattgacgaatttcggcaccagtcatcgttgcaggtgggcggtctgtcactacgacacctttcgtaaagttcttgatgtctaggcggaatggatggtcaggagggagaaattgtcgatgtttatcaaaggatgaatatttgccaccctttctcaatcaaatgaacctaagagcttccttgcaaa

SEQ ID NO: 194359 - DNA, 361 bp, Zea Mays
aacaatgctatcaatttcatgctttgagaatggctcatctaaccagttcaagtcattatggaaaagtaataagatggggagatcaaagacatttcccaagaaggcagtttgatggaggagaaagcgctctagctttcattgcgtccggccggccccgtagatgtgtgatataaatcagggccagtgcagcgcccctcgcaccgtctcctttactgcggtctcattggtgcactgcttgcttcaaacattcgtctgtgtccacctgtctccgtgtgccgacaagtgagatcgacaagcccagcagggcacgatgcaaggatgtggacggcacgctcgaaataggcagcggtgaatactggtc

SEQ ID NO: 194360 - DNA, 405 bp, Zea Mays
agcactctgggaaatcctcgtcttgcccgaggtttcctattcacgaaatggcggtttccgcctcgcccgagtccatctcggacaagggacaaccccgagccccgacttgcacaaaggtcacgggaaccgtggagatatgagcatttaatgtgaataccaaccccacgtgacgccgcagttaaacaggatgcgatgggaccgctgtcccatccactttcaccaactataatgatgcacgcccgggaataacggacactgcccccacgccgtctattgtgttcaaacaactctggatgggacgtgcatacttcagagcatggtctcaccctcgggagggaactccacctcgcccaaagtcggtctcaacctcggagaaaactccacctcccatgaactcggtttcgg

SEQ ID NO: 194361 - DNA, 1948 bp, Zea Mays
ggcaaaggctcctgcttccttggaggaaaacaagtcctctgctgatgaggatcttggcagagggcctgccttgactgggaagaaaaggagggactgcaggggttctgcggatgaggacagaaacgtgacaaaaagggtgttgagatccgacgcaatgaagctgcgggctgaggctgaggcagcttgtgtggtagctgtggaggttagtaaaactgacagtttggagaggaaacgctgtgaggctattgtggaggctgagccttgtaatagcaggctgctgatggaagttacttgcaatggtgaggaagccaacgaattggttaacttggactccagtgacgtctcggaagagtcagctaggtgttctgagaataatatgggaatgcctagtgttcctgcaacagattcttctcaagataacggtttaggcacgcaaagtagccttgcagaatcagatattaagacaatgaagtcagatgagaagatgtctactgcaactctttcagagtgcaatgactccagagctggaatgaacagtttgagtgttgatgaggctcaagatgacaaagtgagacatgggccttgtcagggtgaggtcatagactcagcaatggctaatgatgctggcacaagtacaaatttaatcaaaatcagccctaccagcggatcagaatctgttaagcaggagaataatgtggttggtaccgaggaagtgatactccacagtagcgatacgaaagttgagaagcattctcacattgacgatgtttgtacagaaactgagatttctttgactgataatggaatatgcgcagtagataaccacaccgatctaactgggtgcactaagcaggaggagaggggcagccccatgaatgaagccaatgatgtttcatcacatgacattgtatttacaaggagaggtagaaaatcatgtgaggcaaagcagaggacatgtgaagaggaggcacggtttgagaagcgaatcacaaggtcagctacagttaggcagagagaagtttctgcgagctcacacaaaacttccacaaatgaggctgcactagaaggcagagggaggaagggagatattgttgctcactatacaaggaaagtaagcagtgcagtatctccaaaaggtcaccatgctgagctgggagactgtaataccagtatgccgaaacaaacagtgaaagaaacggtggttgatcgaagagactcaggtgtccctgagaatgataatcatgcgaatgtcacagagaataaggagtcagaaaatggaaaggagatcaatttgaagacccaaccacctgtgggaattgttaagaaaacatccggaggaggtgtttctgcggtggatcagaatgtctctggttcagccatcactgagagaaatgatacggagcatactgattctgatggagttaaatcggaaaataaaactcctgtgcagaaaccactactgtctgttggtgcgaagattgttgccagcaagaagaggatattggaagcagagcttgataaatccactgggagatcaccaattgctttgccatccatgaaaaagacaagaaatatgtcttctggtcctgagataaaccaacctgataagtctactggagataaacttattgagaataattgtgattcgggcaataagcgtgttctgagggaacggcagcatcgcaatcaaacaaatttgtcaaccagatattctaatcactctaatcaaaatgatatggagcagacacaggatcaatctgatgatgatgagatcagcagcgatacttcctacaggagaactcgtagcagacgtcgttgtggtgctgcccgtcttgctgtgccaaaacaagaggactctagtgattctgaagattttattgctgtgaaaaagaatcggcggaaacggaagaaatctgtgcataaacaaagggctggatctaagttgaag

SEQ ID NO: 194362 - DNA, 1230 bp, Zea Mays
gctacttttattggaatggttggactttctgttgcccttgcagttcttgttgtacttttggccaggtaaagttgcccttttattttagtgtgctaactgtctactttctttatccgcatctatctgtatcaccctgttctcttgtaggtacttcactgggcatacttataatcctgatggatctgtgcaatatgtgaaagggaatatgggtgtaggccagacgattcgtggaatagttaaaatattcacagtggctgtaagtattctgttctctgtttatgcatactgctagtgtttgcgatttttgtctcaccatcttgaggtgtaaataggtcaccattgtggtcgtggctgttccagaaggacttccattagctgtcacacttacgtaagagtcatttgtgtgttattttctgctagcgctttcatcacctgccactcaacatgctttatttttgtcaggcttgctttctcaatgcgcaaaatgatgaaagacaaggctctggtgtgttcccaactttctataccttggttttgttatgctactagctccgacatctaatgctatgaacactcacttcctatggaatataggtgaggaggctttctgcatgcgaaacgatgggttctgccacaacaatctgcagtgacaagactggcaccttgacgttaaatcaggtgcaatggtgtttattcactttatacacgcttcagatatttccgtttgttaaatctgattggccctgattttaaaattctcttcttcctgattgattttaagatgactgttgttgaggcatattttggtggaaagaagatggactcacctgataatgctcagatgttatctgctgatgtcacatcgctgattgttgaaggaattgcacagaacacttctggaagcatatttgagcccgaggttagtcatcttcattcatggagaaagaacaagcatatgtggttgcgtatgcatttgatatttcaggtggcatcaccatcattggtttggttagataaatggtgcatcctgccaatttttgtttgatttattgcccacacgtctatgtagtgatctttccgggaggagattttatgttcagttcttaagttcaattggttgtttctgtcttgagaattatcaggagagcatgaccatacatgtgctctcttgggggcatgagttctgacttatgttctatgtctcagcagggtggtcaagaaccagaggtg

SEQ ID NO: 194363 - DNA, 339 bp, Zea Mays
gccaaagaacaatggaaaattaagctatccaagtgttcctttgctcagaatcaggtttcttaccttggccatgttgtcagttctaagggggttactacagatcctactaaaatccaagcaatagttgattggcctactccacaatgcctcaaggaattacgtagttttctcggtcttgctggttattacaggaaatttattcgctattttggaattatttgccagcccttgacatccctcttaaaaaagggagtgctctttgtttggacagcggaccacgacttggcttttcacaccttacaacaagccttggtgtcggcccctgtacttgccttgccg

SEQ ID NO: 194364 - DNA, 902 bp, Zea Mays
cggcattctttaattagcacccctgaaaggaagttggctctcattattgatggtagatgcctaatgtacgcactggacccaactcttcgtgttgatcttcttggattgagtctaagttgccactctgttatatgctgccgagtttctccgctgcagaaggcacaggtaaataacgtttcttgcagagtaccattttcctcttacccactgaagaattaacaatatgggattttgttggaccccccaacacacacacacacacacgcactgacacacacacgcacaggagagaggccagaaaaggaataaatattttacgagatatattactaatcagtgaatgctttactactgtggttggtttttactctttagcatactgtgtacactcatgtacttctgagttgcatttctgatgtgtgatcgtgctgttatcagctgtcattgtttttatcgggggtctttagtttgaggtatcagctactgttgtgataccagtcctcgtgtttgtactagatatgtgcatacttacttaggatgaggtgttgattagcttggccattccattcatcaaaccaaaccagtaggaagagcggacttgcaggtccattatcaaagcaaatgggggcaatagtctctgattgattgcatggtttcattgcacagtcttgtatacgtgaaaatataaaatgctgacattaatgtgtatatgtaggttacaagcttagttaggaagggtgctgagaaaataactctcagcattggtgacggtgctaatgatgtgagtatgattcaagctgctcatgttgggattggcatcagtggccaagaaggaatgcaagctgttatggctagtgactttgccattgcacagtttcgttttcttactgatttgcttcttg

SEQ ID NO: 194365 - DNA, 279 bp, Zea Mays
ctggcatagcaatttaaagggcttggttctcaaatttttatgtagtaactcactaatccatctgtggcaaagttgatcttctacaaatcagcttgaagtttgtcatagcaaccagaatcatatactcactggatcctgctcgaaattgctcccaaagtctatcctagttcactgtcagtctagattcagtttcagggctgactaacagccagactttaagtccatttatccccaattcttgtatagcaccaatgcttagtcacttaatcaaagttgtac

SEQ ID NO: 194366 - DNA, 307 bp, Zea Mays
tcaagcaactaacgggagagtagagaagtagagaaccggagaattggggagaatggacagaggcatacctagccagatccagatcctcgtggtgccggcttgcctccggtgatcgacctacgacgccaccgctcggcctggagagtggagaggaacgaggtgggctaggccttcggcgccgccgctcgccctggcaagatccagtggctagtgcggagtggggacttgtgtgtgttgtgcctgtgtcaagtgcgtgctagcagctaggggcggtggccaacgaggtcaagtgcgccgtgcgtgctag

SEQ ID NO: 194367 - DNA, 479 bp, Zea Mays
ctgctccctccaagatcttcgttgcgtatgctccctggctgatggtgatgcctgtctcggtctgacacacctctagtccgagatagtaactgagtaaccccaagtcgctcatctgaaacgtgttcatcatctctctcttgaactggttgagctcgacagggtctgcaccagtgatcactagatcgtcgacatacacgccgacaatcagtcgttgttgcagcctcccccgggtgtaaactgcatgctcaaatgcactgcgtctgaaaccaagagatgtcaatgaagtatccagcttggcataccaggagcgtggagcctgacgaagtccatacagcgccttgtcgaggcgcatcaccatgtgctctttgccggcgacgacgaaccccggtggctgtgtaacgaaaacttcctccttcagttcaccattgaggaatgccgatttcacatccatgtgatgcacgacccatccttcagtcgcc

SEQ ID NO: 194368 - DNA, 350 bp, Zea Mays
tgaccatctcagcaagttccgggaagatggaaccggagatccacgacttgacaatgcaatccttgcgtgcctagtcggggaaggtaggcgagggagcatcgtcgaggatgtggctgtccagggagtacttgccgacgacgaggagaatctcattgcgccaatgagagtagttgttggaggcgaggtcgagggtgacgtggacgagactccggatgttctggacagcgacaacctgtgagtgaaggttgacgatggcagcagcctcgtggagaaggatggcgtcacgaagacccttggcagcatcacctgttggctcagagatgtggaactgagcgtcgttgtcgttcggg

SEQ ID NO: 194369 - DNA, 412 bp, Zea Mays
cttcaaggggggatgaacacacatagaaggactccacctacacacacacttatccattcccgcttccaagcaatacaatcaagcaactcagaggacatagtgtattacactccagcagcccgaatgtctttaaatcaggtgtctctcgtgcatcatacacactcccacgttgcatcctctctcgttaacctagagttctctaagtctccatagaagtcctcaggctattcgatttaaagccatatgttcagaatgctgctgctgcaatccatatatataaaacactgtagaagcagtataagtcggtacagaatatagccaagcgaacatgctacctcatatcgtggtgataactcaaacccttacagattctaaaaggagtgcttcatgtacccccaactgacaaacccgt

SEQ ID NO: 194370 - DNA, 1035 bp, Zea Mays
cacgagactcgcaactgaacaccacgggagagaaaggagcgagaggcggagttgtcaaactcgcgacgttatcgctttggagggcacaaactagaggaactgggtagagacccaagcgaagaagtgggtgagggtgtgaaaggtgtcgggcttgagctacagaggaaaaatctagagaaaacgagagaaatcatgaaaacgagagaaatcatccaggatgaccagatagtattggtaaccggagatgcttggaacaaggggtgtccaaaggtcacagtggatgaggtcgaaggggagcttgggacatagaagagaagggtaagcgagtatgacgcccgagctgatagagatgacaaagcgaggtggagttaccgtatgggcaaggaatggccgatagtcgagagaggacgtcgtggtcgaggtggccaagacaacggtgccaagtggaggtaggggtagtggaggcaagggcgtagggttggacaaaatgggcagaggaaggtggggtagggaagcgaatagggtataggggactggaactgtcgtagcgagcaaccacaacacgagtggtatgatcccgtatggtgagtccccaaggatcgaactccatagagcaacagttgttagtggtgaagtgacagatcgagaggaggttctggatgatgttgggggcaacaaggatgttgttgaggtacaacggaccaagaaggaccatgtcacctactgaggtgacaggcagagtcgacctattgtcgatagtgatggaggaaggggaggtggggttatggggatggggtaaatcgacagctccagtgtcgagagtggtgtggaatgaggccctggagttggcaacccaatcggtgggaggagggggcgacgaagataggggtgcgagaagagaggcaagggaggcaccctatagagcgaccgggaggggagttgaggctaggagcgagagtggcgccggctgcagggaggaacgcaccaggaatgggcgacgcggtatccgaggcgagagcgccgccggggaagcac

SEQ ID NO: 194371 - DNA, 685 bp, Zea Mays
cctgggcatgaaatcctttggcagtgtcttcttttttctcaaattgcacctaggtggcgagagcagcccgttaatcggtttgatgataatttgtttgaaggcctccaggggcaaagactcaaccggctcctccagaatagatggatctgacccaaccttcgatcttcgagaatagacattgagacaacagcgatcaggacgccatctctgatcaaacaagtcctaaataggaggaacaagaacagggctgctgctggccgaagcaatagcaaacaagggtacaacatccatcggtccatggggctcaaccggagcaacctcctcaacagggacaacaacgtcctggaagagcattgcttctggagacacggtgaccgtctgtagcataccatcaaggacaaggcctgagctgatgagggcaacacctgtgctgtccatgacaataacaaggctgctgctggttgaattaatagtatacaagggtgcatctccctccagttcaaggggctcaacaggaccaacctcctcaataggaacaacaacgtcctgggggaacactgcttctgggccacggtgaccgcctcaatcacaccaccaggaacaatgcatgaattgctgggagcaatgtttgtggtgccagaaaccgatccatacatctccacaggaacaagctcctcgacaggga

SEQ ID NO: 194372 - DNA, 518 bp, Zea Mays
gttttgtatagaccaaaatgctcccatgggcttgtttctatctaccttcataacttctttgttaccctcctctatgtatatcaagcttgagctcatctgctttcccaccctaaatgatgggtgttagacctccttgccctttcccgctagtggcccattgcgatcgccgccgatattggtctcactatgctatactcctcgtgcttcacttggcatattcgcaaaggtgttgaacccatagagcacaatgatctcacgtatggcgcgacgatgaaaagcgcacaccacttggtgagctcaagtgctttgtccctactaccactaagcgagatgcaagagagcaccacaacgaagagcatagagatcagggaggtttcaacaacgtagatgtcacctagcatgaggcaaagagagatgaggccaacaatgtcatagagcatgggcttggtcatcgtcatggatgttcatcgagcgttcctgcctttctcccattctcataggcttctcaatctcgctcg

SEQ ID NO: 194373 - DNA, 356 bp, Zea Mays
taggcggcgacactgctgtaggtgcgcccgcgacaattgcattcttacaattgcctctgattattgacaacgctctgcagatcagtttcctcttgcaatataacaaagttcaatcctggtagatgcacgaaaagacactccgcagaggaaatttaccatgaaactcaaacccgaacagcctccatgtatcctcacagcaagaaagatatctagatttcatatattcagcaatttcatcgataccatcagagctagtcttttcttgatctactgtaccgtcaccctttgtagattctgaagcagatgactcacgattcttgaacctcattctatgcacagtcaaatcctttgttgac

SEQ ID NO: 194374 - DNA, 906 bp, Zea Mays
gtcgctaatgatgcaaagtgtattatattatcatcatatcttgcagcacggaggacagagctggtggatggattcagttaactagagaaattctcaaattgccagaggccccttctgtagcatcaaagggtgttctggcaaaatctagtgaaaaatcttcaaaagcaaggcgccctcagcctctcatcaaacttgtaatgagaaggtacgtcgtacctttttaagtctaagtgattgatctctcctgtttcctttatgcgacccccggtcatggatactttattatttgtctcttattctcagattggagagctcattccgtagcttctctcgtccggttcttcatgctgctgcaagagtagttcaggaaatgggcaaaagtagagcagctgcttttgctttaggtgcatatgatgagggtgccagtcttgatgttggatctcttgattctgattttgagaatccaatggctgaaggtatgctgatgttatcatagattttaaatatatgtttacatattcaaatactcttagtgttaactgaaaacttacatctttcatttacttttgcaccgagttggtattgcaatgttttttaatgcaactatgtgactttaatgtttatgctgtaggtacccgaaagcaaaatccgctatccaatggtcatggtggaacggacacaatagcaggattattagcatcactgatggaagttgtgcggacaacagtagcatgcgagtgtgtatatgttcgagcaatggtcatcaaagctttgatatggatgcaaaatccacatgaatcttttgaagagctaaaatctatcattgcatgcgagttgtctgacccagcctggccttcctcgctcctgaatgatgtcctactaaccttacatgctaggttcaaggta

SEQ ID NO: 194375 - DNA, 405 bp, Zea Mays
cgagtgttgagactaagtttcttgccatagcaagtatagctgtggaggtgacatggttccaatggcttcttgagaatttcagtgtgcctgctactacgctaactcctttcttctgacaacattgttgtgttctgtattgttcgatccccagtcaagcttgagctcaccaagcacattggcgttgttgcttcctacatgagatcgtagatgcatgatcaagttgtgacgctccaccatgtgccttcagaggttcagttagctgatttcttcatcaacgcacagacacgagcccatcatcgattcttactctccaaactcaatgttgtagatcccgtttgagggcaatattagatgtataggatgcttatgtatttttcctctacttcaagaacttctttgcatacg

SEQ ID NO: 194376 - DNA, 379 bp, Zea Mays
gcacgatgacatgtacctgcgtctcagctgacctgacggatgactggagaatagagtcgtatctcgttgaaacggcagttttgggtttatgcacggaagcaggattgcagaagagacagacgagctagggtagaagttgcggcaaagccaagaaagctgaaaaaacatcgtcatttgtcaaaagtcaagtagccaacaatttaattgacctgagaactggaagaagctagcagactattgtttgcattgtacaaacagataccacagcaggacccatttcaccttgataatcttggcacctaattattaacctgttttattcggatccacttgttgatagatatatagcaactaaaaaaattgtcaagtaagaatcgaa

SEQ ID NO: 194377 - DNA, 303 bp, Zea Mays
tgagcaactggccgttagatcaggatcttgtggacctgggtgtatatcggttggatgaagtggacttcagatctggaccgtagatcgtggattgcgcggctgaaactgcataccggttcgctgtttaaatctaggccctagatccttgaatggatggcccaggcgcacctaagttcaatcagtcgtggcactttcgtaaagagcccctcggttttcaccaaatcaacccgcaatccaccctgtgcagtccactgagtcttaggaatttttacgcgccagcccctgcgctttctggaatttgag

SEQ ID NO: 194378 - DNA, 955 bp, Zea Mays
tgcaggtatggagcagatattgctcgtggaatagcagaactccatgcagcgggtattgtttgtatgagcataaagccgtcaaacattcttttggatgcacatggacatgcattcgtttcggattacggtctttcagcaattctgaagaaccttactagtaggagagtacctgatgactccagtgctggcattgatgctacactgcttagccccaattatacagctcctgaggcatggggaccactgaagaagtcactgaatatgttttgggatagtgcaaacggtatatcaccagagtcagatgcatggagttttggttgcacgcttgtggaaatgtgtactggtgctgttccgtaagtagcatgatattcaatttgttgtccttaatgttttgtgaatggtgttgttatatgctcattgaaatgcagatgggctggactgagtgcagaggaaatatgtaagtctgttgtaaaagaaaagaagccaccgcctcaatattcaagagtagtaggtgtaggacttcctggggagctgtggaagatgattggtgaatgcttgcaattccgagcttcaagaagaccatccttccaggacatgctgaaaacttttcttcggcatcttctggacataccacggagcccacctgctagtcccgaaatgtaatttcatctaattttgtattactttatgttaaagcataatacatggaagcttaaagctttggagaacttttacctgaaggtgtagaatcaaatactgaattatctttcagctaaccattcctgaagattcctttacctggaggtgtagcagcacatgttgagatatcttcgagctaaccattcttgaaactatttgcatattgtttccccgactgatttttgacctagttacttgcttatgcagtgattttgcaaatgaaaacttgcccaatggcatgcaacctccaacaacc

SEQ ID NO: 194379 - DNA, 440 bp, Zea Mays
ggtttctaatatggtatctagcttggttctccccttccttctctcccctagttgccaccaacagggccgctatcgctgcaccgttccccctcggctgtgcacccaccatggctgcgtgccctccctctttgtcagcaattgtcaccgacacgacaacaggactggagcagaacaagatcgcagaaactgatcaaggcactcttcatgttccggcaacagacaccgcttcatgttccgacactcttcatgttccggcaacaggcactcttcatgttccgacactcttcatgttccggcaacagacaccctaaaccctaaacaacgcttctccacgcccgcacgggccacaccaccagcctcctctccaccgcgcgaccgaccaccaactcgtcgtcacctgcgcagtcccctccaaacgcgcgatcgaccaccatcgcgac

SEQ ID NO: 194380 - DNA, 410 bp, Zea Mays
aagctcgcatcaatcgttcccatgtgtaataaagatgctagctctcctttatgccatgcttgtcagttgagtcgtcatgttcgccttccgttcgtacgtctacttctcgtgcggttaacaatttcgatcttattgactgtgacttgtggacatctcctattttaagtgtctcgggtttcaaatattacttagtcgttcttgatgattgctcccattacttatggactttccctttacgactaaagtctgatgctttcccaaccctcacttagtttttcgcctatgtgaaaacacagtttggtgtcacgattaaagctgtgcaatgtgacaacgggcgcgagtttgacaactccagctcccgcacattcttcctcacccacggtgtcctactacgcatgtcctgtccctac

SEQ ID NO: 194381 - DNA, 1504 bp, Zea Mays
gaatttttatactagctgaaccagcaacacaagttgaaggttgcagcgaggatgctgtccaggaagcaaaaagaagtcgagttagggtaataaacttctgatgatagctaagtgatttttgcaattaatgttggatccatgcacaaagtgattttttttttgtttccacaggaaatggagatcaaattgttggagcgccaacagcaactgaaatctgaactagtatgtgccaatactgtaatatcaaccttccctatattttttacttgctgccgtgcggtttggatccaatcatcttagataccttttcatttctcattatgatttcccccccttttttgaagagttcatcatggctagggtctttcattggcactgtaattggaaatatcaagttatccattggcaatattcatatcagatacgaagacgtagagaggtaattcagttctgctcagtgcatttatcctttaggatgcatattgttaaggagtataagagcaccatgacttgtttcctgtagcaatcctggccacccttttgcagcaggtctggtactttcaaagctttcagcagttacagtggatgaccttggcaaggagacttttgccacaggtggtgatttggaccgagtgaaaaaggtacattattcctacattttatttccatggttagtttgataactcatggctgatgtcaacttctggagtccagttatgttttttgtgatcttgtagaaagcaaagcgagcacacgaggaaatgcctattcttctggcatttccttgataaatctatcttccatctccaagaaatggtgattgctcattgtctacttagtcgaatattagatttgaaagtaaaaaataacaatagctcattttttattttctaattttggcgatcaattaatttgatttaaagttttcaggacctagtaatgaattcttttcgcttcacacatcaagcatttttcacatttggtgtgcttatttgttttagtttgaccttttttacttttgatcaatttgcgtgacttctttaacttggcattttgcagtctgttgaacttgagagtctggcggtgtattttgactctgatagcagttcttggattgtggataaaccctgggaggatttacttccatcagagtggagtcaggtgcctcccaattttgtttgtgcgcaaataaataccctgggtttgagagaataaattggcatggagacaattacctttgtcaatttctgtttgaaaaaacatgtggtagagtgtgaatagacgcagtgctgtaatgaggttttgttgggatcttttattcttctgttgcttgcatccagcaacctaacaaatatttattggtttgtaaactacattttcaggtttttgagtttcaggagcaggatggttccagatctgcttcgaaaaagcatgcctacattttacagcctgtatctggcaaagcaaaatatacaaagatacaacttactgaggcaaagaaaac

SEQ ID NO: 194382 - DNA, 452 bp, Zea Mays
agaaaaccaccatccgtagttaaggttcttttgtttgccgtcctgttcaattgagtgcgatccagactaaactcagtaaactacactagagatctcgtgtcgatcaaatcgaaaataaatatacatggcatttcggcttgacctagctaaacaaacgcggccttatcatctgcataaataaataaaaggatggctgcatgcatgttacttttgtgatctgtgccaccctgtccctgtaccctcccccgtactgtactgagccttgctgttcgattcccttccgctctcctgtcccgattataaagaatctccatcctcgtcggcatcttttcttgcaatctgtacttccatgttctctctaaactctaattaatagctagctgttcttctactgtctttgggagaaaagaaggaacgaacgaaagcagccattgatcgatcgaacatgtgac

SEQ ID NO: 194383 - DNA, 432 bp, Zea Mays
caagccatctatccttgctttaggttgatagtgaagctcgtggactctgtagaaccctttggcattagcactttttccttgacttcgtaaagcccatatgtacacgctaagtctgactatagcgtttgaagttagttgatgaagatagatttcaaacatctttaaaacttcagcgatcatttcgtacagagggaaccgaagtcccgctctgaagaagctcttaaacacaacaagttcatcatttcttagctctggagctacttcatcccaaccgaaccctatcaattcatcatcattttttccaaaatatcctaacttcttcattaaaatcaaatattctaccttaatagtggattttctaaactcaatatggctaggcttgcttgggctcaaaatgccatcatcttcttcgtcgtcactaccagcttcggc

SEQ ID NO: 194384 - DNA, 344 bp, Zea Mays
gttttggttatggatccttcaaaaatcttgatatggaatgtaaggggcctgaactcgctgatgcgccaagattctgtgcgtgaaatggtggactcctctagggtggatgtggtctgttttcaggaaactaaaatgcagtcgttctcaattcacaccattctttccctgctcggatcagacttcagttcgtacatttgtctaccttctgctggggctagtggaggtatccttgtggcttggagaagaaatgttggggtttcaggccagaaaagacaggacactcacagtgttttagttcagttctgcagtgaagatagaagtgcgtggtggcttacttgtgtgta

SEQ ID NO: 194385 - DNA, 555 bp, Zea Mays
caccacaattaacttcttcagaattcagagcacgccacagttcaatatttcttcaagagtaagactagaactattagtttatatgctagaatgtttatttatggtcactccctccgatcctattttgttgtcattttagccattcacatggaataaggattgaacttcttaggctttcacatactttgctcctatgaattaccttatatcatagactccctaacagtctcctctaacaccactgccattctacagagaagcaattaataggggcattttatggaaagtgttgccttgaaaaaaatgagcagcatttactgaccaaattcacttcctaggatcacatatattttgaactgcaggtttccattttaagcttgctctacatgctttagcaattagcatcacctatatccctttccccccttgcccctgattatcaatatggaatatacatgttcttgtgagaataggaatctcagcatgattataagtcatctcctatctctttctgcagggatttaagtaataacaacttgagtggttcgatacccc

SEQ ID NO: 194386 - DNA, 307 bp, Zea Mays
attattcacaacacgaacacagttacacgccgcattctagtttctaacataatccttacataactcgtaatccaactacccactaacaataaatcacgcacgacaactacacaacaaccagttaatttatttggacaccgcctgcccagcgtaccactagtaccccgtattttgactcaacacataaacatagaggaagcgatgactacttcggcatgtcaccacctctctatttaagcaaagacaattttcacctacaacgactgaacatccccatcgagcacaccttattttactatgtctcgca

SEQ ID NO: 194387 - DNA, 643 bp, Zea Mays
ctcaagggcttatcaagtggtcaggattgtcatcgtcgttggtaacttgggaagatctcgagacattgaagcaaacatttcccaatgcacctgcttgggggcaagcaggttctcgtcgccggggggatgctaccagcagggcgccacaagctgctgaacctgaaggcgcgggagccaaactggacaatgtgggccgttcaaaggagaaagaggagccagctgggccaaggagaggtacacgtgagtgtaagttgaaccagaggctgttgggcccggagtgggtgaactccatgtaacgtgtgcgtggcctatgggggataagatgccagcgtgttgcctggttgcataaaggcgtgagtgcatgagagatggggttatgaaaaatgtaacaaaattatattcctctagctactctttgatcaacgtgttcttcacgttgctgcctatcccttgttcccttctatctctactgatttctggaattccgctgtcgttgttggagatctcacaatttggtgtgttggtgttgaatcgagtaggtagacatgtagacgacattgatgttgtcacagtacaccaagatggcatgacgtattggagagtggagctcacaacggagaatggtgcaacctgaggccttgac

SEQ ID NO: 194388 - DNA, 311 bp, Zea Mays
acgggagcgatggtgacactaggggagcacacaacggcccaacaatgatgcagtgcagggccaagtgggtggcacgccgcgacgtgtgggctaccaggcgcgtaaccatggtggagcagggcaaggcggcgatgcacgcgcgaggcacacataagatgagtggcacgaggaaggcagatggcgcgggggacgcgactaggtggcatacgagagggaggaatatgatgaccagacatgtgagagaggcgacaaggcgttgtattgggcaaattttgattaacttttgatgcttaactctatgaccatcgaaa

SEQ ID NO: 194389 - DNA, 428 bp, Zea Mays
cgattttgcggcgtaatcggcggcggcacggcctcaatcgacggccggacgcgaccgggaagggggtggattcggtgcgggtgaatggggaaaacagagggtaaagtgcgcgagaacacacggagccctagaagacgattcgcggaaatagctactgcaacaacgcgaaagcaaatcccagtgcggaggcaataaaaaagaggagtcgtgcttgtggtggtggcgaatcggcccacgcccccatcacgatccagacaaacacacacggcgcaatccacagggggggagaggcggaaaaaaatctctctccaagaaccggtacaagaactgaagcgggattaaccggagacggcgaccacggggatcgggcgggcgggcctcattagcagcggcaaccaaccaactggcaacaatcccgcacgcatcac

SEQ ID NO: 194390 - DNA, 373 bp, Zea Mays
ggtacagctcgctcgagttcttgaaggagctccttggcatccaccgcgtcatcgagtccatcaagcacatgctagccatccggatggacctcggcgaccccgacttcgtggacgtgaccagcgacgtcgccgagatgctgtccacgacattcgccgacaaagtccggcagaggatcgtggacaacacgacgttccctcccggctactacttccccaagtacgtatgcctaatttggcgttgcggattctatcggtcgcagccttgcagccagcgggcatcactcattcctgttctggttattggcggcaatggcatcaggtggagccagctggacgaccacggcaccagccacctgtgcgtggtggacggcga

SEQ ID NO: 194391 - DNA, 408 bp, Zea Mays
atttctttgattatcgtgaatcccttgatggttgtggagaaggtggtggtgtcctaaatgttgatgcttgtggcggagatggtggattagaaagaggatgaggagcagcatgggaagattgtggaggtgatgatggatgtaaaggtactaaagtttgaggaggcggagatggttggggatgagatgacgacggagttggtggatcaaccaattcaacatcccttagaggccaaaggatgaaattttttatggcttgtccaagtgtctcgattccttcgggcccagggatgtctagcatgtcgtcctcagatccttggacgaccatcgtcacttctaccatgcaataatcttctggtatgtcggttccatgaaacttacgtcctgggatcgtaatgcatgttcctactt

SEQ ID NO: 194392 - DNA, 291 bp, Zea Mays
aaagaacgcagccattctaccccaagcaccacatcaaagccatccaggggaagagtgtagcaggttgtggtaaaattctcttcgccgacggtgagtggggtttgagaacagacgcccccactcaacaccttctcaccatttgcaaccttgacaagcagtcctgctgttggagtcacatgcagtcccagtcttggcacaatagcatcgcggatgaatgtatgggtggatcctgaatccacaagagcaatgagagccacaccattgatagagactttcagtttcagtgtgtcg

SEQ ID NO: 194393 - DNA, 435 bp, Zea Mays
aacaacgataccagcctagcagtaaggtctccagaccagtccaaccacgatgccagcccatatgatggtcgtcagcatctcctccaccaccagcccaccaggttgatggagtatagtatatggtttggtttggaacagagttggtctcgttgtacccccggaacaacgacaacgtgatggtggtggcgatgcgcaacgccgcggagccggcgtggcgacagcggcatcgtttcatggggaccccgatgccagtgacagaaggaggtggatacagggtcagggagaaaatgtcacttgctcctctctatctttttgagggattgattgataggagctttcgagggattaagaaaaaatgtaggacaaatggttgagaaaaaaaaagtatatgtttggtttgtaaccatagattgtggcaaaatctttcgcttgctg

SEQ ID NO: 194394 - DNA, 535 bp, Zea Mays
aaggcagcgtcaaggtagagagcacattgctcgttgttgccaaggaagtgttgttcccgggcaagctagacgtagcaggcggtgaaggatccttctggacggtctccttgagattgggggagacagtgtcgtagagccacgtcattacgacgtagtccgtcactttcaattagggtaggtatggtcgatggcgttagcgagaacatggtgttggaggaagaacttcccaagaaccagaatcatctggtggtgcgaacgagtgtagttattggactccacgtcgcggacaataggggcgagtgtctgcatgtttcagagaccgacgacctgggtgtgtaggttgacgatggcagcggcctcatgagccactgggacatcttggagcggttggtgagaaccaccattgttgggaagcaatcggaagttgtcgaggtcactggcaaaggaggggtgctgtaagtgggatagacggtggcctcggcagcctcatgctcgcaggtggcgtgtgcaagcacatcgtgggcgtgcgctgcag

SEQ ID NO: 194395 - DNA, 341 bp, Zea Mays
cgatcctagtttggagcatctcctgagtttggatgaggtccggacctctgagtattcattccgaagtactcggtaagctgttctagggtggtggggtgtgttggcttagggtgcaggaccaggctaagcggcgtatgggtcattgtagagaccccaatgctgaggtctctatggctgggattgtccgaccccactggtcagcggggacacatatctggcgtcgtgcttgatagacccttcgataccgcttccacggtctagacgtggctcaataatgtcccatcgtgccgacgtggcttgatagtaccgggttggctcttcctttcagcaggttgtcgtct

SEQ ID NO: 194396 - DNA, 354 bp, Zea Mays
acgccactctcgtaagttgaaggctgatctagagatgctaaaaaaggagtgttctgaaaaatcaaagcaacatgctgagctagcaggcgagctatctgctgcacaagctgaacgggattcctataggcatgaaatagaagaattgaagtcatccttacaagatgtaaacacacggcaaacaattacaggaacacctaaacgttcagactggatagacctgcagaaggaacttgaaggtgaggtgaagtttcttagagaatcgaatgcggacttaaccatacaactaaacaggactcaagagtcaaatatagagcttctttctattcttcaggaactggaggaaaccattgaaga

SEQ ID NO: 194397 - DNA, 279 bp, Zea Mays
gtttgccagagacacttggtggcagactttgcataaggtagggctgcatcgcctgactccaggattggcaacaacgaccttccaagactggtggagagaagctgagtgccaggtgccaaaaaacaagaaaagaggatttaattccttagtgattctggtggcttggtggctatggaagcatagaaatgaatgtgtgtttaatggtgcatcccgcaacatcagcatcatcatgcagcatattcatgaggatgctgttcggtggggcttggcaggggcaag

SEQ ID NO: 194398 - DNA, 746 bp, Zea Mays
ctgtttcgtctcctgttgagcatctcacacttcattatcaggtacatccttttgttgcttttatgtaaattaatcttgctgtgattgtcactggtaaaaaaggacagactcagttcccggaggctcccactttgtgtggggtcatggggaagggattatacgaggcaagacttacccccgcactgcggagaggctccgtcgaaccccagacctggtgactcggtggagtagctctcaccactgcgaccaggcccacccttcactgtgattgtcactgatgcttatgtaaaatcttgcaggttaggcaccttgatacttctgagaagagtgaattgcacaagctacaacaactgaaagatgaacaaggtaatccttgtttaactattgtgataccattatgccacaatcaagcattgttgagagatgtgatgtgcaaaagattattgagtgagtattcttacaaacatattctactatttcaggtgaattgtccagcagtgatgagaagaaatacaaggcactaaagcgtgccactgaaagagagatactgcagagtgccgatgtcatttgttgcacctgtgttggtgctggagatcctcgtctttcaaacttccgtttccgacaagtaattattctcacctgcttagattaactatgattcctgttgtgtaatatatccttaggcagtggtaaactttattgtcaggttcttattgatgagtccacacaggctacagagccggaat

SEQ ID NO: 194399 - DNA, 405 bp, Zea Mays
ccatgaccacccttgtttcctaatgatccatgagcggtcatcttattttgcacatacttggtgatcttgctaattccttgtaacttctttcggttatgaatatctatttcaactcttctgttggaaccttacttatcttatccttgattgttttctccactccacttcgtgactttgtaagtcttgccttaactctgtccatggactatgcttttcatcatcatcacctttacccttatcatctctatatcttactttgatgtttatcttatacccgccctttaaaacctcttcttttccatcttgatctgagcgttgtactttgcctacttttcccttggtcgtgtcctcttctttgtcacctgcgagtttttaactctatcatttgttgtgtttttgtttgtt

SEQ ID NO: 194400 - DNA, 538 bp, Zea Mays
ggctgataccatattggagtgaatattccatagattagggctaacccaacaggttagctatatagtgtttacatgggccacatgggccaagccttaacaggcctaacactctaacaaaaactgctcttctcccttgcctctctcaagccaccggtgaggaacccctcacggtgaaggtctggagcgcgactacgaactgcgtagccgcaggccagcgacgttgggcgtcgaggcgcttgacaacctggtatcagcgtcacgtcgatcctcacccacccgctcttgccctccaccatccccttccacgcccacctcctccaccgaccactccatcaccatggctgagcccaccatcaaggacctcatggagctgatgcagtctttccagaccgagttggctgctgtgaaagccaccatgaaggacaagtcgtcctcgtcgtccaccgacggcggcggcgagcgcgaggatccccctcgtgtggatcggccccccaggttccagaagctcgactttccccggttcgatggcaccaccgac

SEQ ID NO: 194401 - DNA, 290 bp, Zea Mays
tcttactcactatctcaaacttcactctgtaaactgtgcaatctacagtgcaaaacacacgctcgctcatatacacgcgtgctggagatggcccaaccaaacacaaagtaaagtagtcggaccagtttgcgccgtgaacctattacgggtaaaaaagccccaaccaaacgactttccaagggcaacgctcacccgtcactctgataggcgtgcatgggcattgtcgaaggtagaggagacgatcgagagaggtggtagcgtttagttcgttgcgttgtgaacctacggca

SEQ ID NO: 194402 - DNA, 327 bp, Zea Mays
cgcgcatgtcgacgatggcttccaccacgggaggacgggcgcgccgttgtctgggaattgaataaggaagcgtgtcctcgaccgttgatctgtctagtgatggtagagattagatcttcaaaataacatttcgaccgatgtaaatcgaggtgtaggatcgagatcgggttgttcagtgcatgtgcactcgagtcagccgagtcaatttgataaagagcccctcggagaagtgaaaattaacccgccatccatgtgaatagaaagatccctacattcgggtccaaacttttgtagggcagcccctgaattttcaaaaaagcttcaagc

SEQ ID NO: 194403 - DNA, 390 bp, Zea Mays
gaaggtgcaacattatatttgctttccatttcccttctacccccgtgttttctaacttgatctatttgtatagctgtcatatcatatctattatgcagacagttacaaattcgttttctcgctgctacacatgcaagggaggaacctgcttatagatctgtttccttactgtcacaattatttgggaaaaagacattgtctcccacccaacatacacattctacaacatatacttggatctgtggttggtacttatgtgttggtaaagctggctgatgtgaattcttctgtatttcaccattatggtgtcatgtagaaaccactggattatagggagaaaactgttattgcttgcctccttacgggatgactcatggtacaacgtcattt

SEQ ID NO: 194404 - DNA, 569 bp, Zea Mays
tcgaccacacctcgccgcccgcggccatctcacacccactccgcgcgaccgcggtcctctcctcacctatcggtcgttcctgccctcgcgaggaagacgacgcctcaagctatcctccctccctctcgatctgatccggagtggctcacgttttcctattcctcgccagcggcagaggcggcaaccctcgatccgtgtcaatcctctattaggtacgtcacccgtttcgtggaaccgaccaacccaagctatattgcatcaggaactgacccggtggctagtattggtagtatattcatgtttttagaccttttgaattaagtggagaaacggttttatgtacaaagacgctgaggctaacttcgatttttggcaaagaattatggcaccgatgtcctatatttagcccgttactgagaatttgagggcacaggtttctactaggaaggaaggagtggagcgagtaaaaaaaaaaaagaaaacattttgcaatgtctgtttggtcttcttgcatgtaaaaatgttgaattgggaaattggaggtgaaaatggctaccaaaaatctttgt

SEQ ID NO: 194405 - DNA, 503 bp, Zea Mays
ctgaagcatgagccaagcgaagaatctgcacttcatatgcagactttgccatgtactgaccatcaggcgaatgtagccaagtgaccgtgccttattgtgattgcagcaggtgtatatcctgtaggcgcacccataaggccacaaattccgtgatgatctgctggctcatattgtgatccacatccatcacccacttgttgtctgtcaatgcctccctcaccgttctatttttcctcaagctgtgtgcatacaaagctggaaaaagtgttggtggcacatctctttggtcttgactcttgagtcttgccatgtgttggttagctgttcatttgtgatactcccgacatccaaaacaagtggggccttaaaacgcatgcagtcagctcaatctgatcataggtataatttataatgtgtacgtgtgtagtttggatatatagaagtgatatgtgtaaacatgacataacattatttcataaatcacaatattgcactcttgtgac

SEQ ID NO: 194406 - DNA, 388 bp, Zea Mays
gtgagccatgtgggtccttttatagcctcaaaagaccccatagacgttgtcccttctttctaaaaagataccaaaaattgactgactgtgggtgcaccggaactgaaccgagttttgtagcaatgcgcccggtatatgattgggcaccttccaaatggggtggtcaccggaccgggcaccacgtcagatagtcattaggctgatggcacgcccatgaagtatccgttggagggcggtccggtgctccactggactggtattgtagacggtccggtgaattttataataaaattcctaagacctcgaagttcggtcgtactggcgatccactgcacatcggaccggtttggtgtgctaggtcgcccaccgtcgaagtccagggcctcta

SEQ ID NO: 194407 - DNA, 347 bp, Zea Mays
ttaccgagagaagttatatggaaacgatgagatcattaaggatgtgaggaatagaacgatcgctcatggatcatgaagaaacaaaggtggtcaagagtatgtaaactgaaatgttttaaacagacattggagtgcaaaggtaagcatttatatacaaaagtaaaagtatgcgatattacgaaggtgcgagcacaccaagaccaggggagtacgaattgccgaaaagatagcgacttaacaacagaataagaaagggtctcaaaagacaggatgatcatggacatataaactgaaatgtttaagtaggcagtagaatttccgaggtaagtacttgaaacaagagtatt

SEQ ID NO: 194408 - DNA, 325 bp, Zea Mays
gcagcgtgcgcccttctggacggccaattcctcgctactcgcgcagctgcgcctctcctaccagtgttgtccccacccccacccattccatggcgtcacccccgctgtacatgagctttccctcgcccgtcgctcctgtaactgtgcgtgccctcctccacaacgaccagctcatccggggcctgttcgtgtccttcgatcctgtctggaaccttattcttcaggactgcgtcgagatccaccctcaggcgggtcgtcacgtgcctggaccgctagtcttcccgtgtgctgcaatcgcctccctagcggttgagcccgtgtcatc

SEQ ID NO: 194409 - DNA, 292 bp, Zea Mays
agtaatggttccactcatctagggtctggtattttccatcatgaacccttggaagatttcaagagctccaaccaatctctattgcacagtgtaagacaaagaatggcaccaaattctcttgcgaataggcacgtcaacacggaattggcaaagcatcatgcgattaagcatgctgcagttgctgtgtcagcactgaccagtgttgttaatgatgaccttaaatcagtgaagaggcctaaggaatctgaagtggaggttcattggtctaatggccccaagtttcattctcata

SEQ ID NO: 194410 - DNA, 470 bp, Zea Mays
cgttgttctagactagcgtaggtcgaccggattgatggggtagggattgtggctcggtaatttggtcatcggcgttagtttttcgctagatgtcgtggcccgcgctaaccggaccttaaacctttccgtggggcgtacggtcgagtccgccgtaccctaataccagtgtaaccacagtttagtgagggggaaagccatgggggaaccgaattggctatcgccggccaccctccgccgcgctcaggggtagtagcgccgccgcgctaaagactcaggtgaagacgatggatccggaccgtccgatccgtctcgggcggccgggatttgggtcggggatgcctttcggccagggtgaatctggggcgttggatcacaaacgagtggttccgatcgcattgcgcctaatgcctggtcaggtgtagggactacttaatcttagcggccgaatcttgatccgacggccagttatg

SEQ ID NO: 194411 - DNA, 357 bp, Zea Mays
ttttgtcaatatttggctttttcatcaggacagactatccgactaatatccgttatctatccgggtaatatccgatatccgtttcttacccgccctatttattacccgatcccgtcctgtatccgtcccggattttaactatccgtatacgatcctgtatccgagaaaattgtattagggtaggatatgagatgacctagtatccgtccgtatccgtcccgttttcacccctagtggggtatgccaccatatccatttgggataccacagtatcccgcttggggggcaccccaagtatctgtattcaacaggttggcacctccagtacaagaccgattgaacgccactcaatccggt

SEQ ID NO: 194412 - DNA, 700 bp, Zea Mays
ctcggttgctgcgcaggttctgaggtttgggcctgcgcacgcaaccgctactgacaatgctatttttgtggcggcttcgaccgtggctgccgatgatgattcgtttggctctgtgtctaagtgttttgagtctgatgattctgggagttcgattgcgtggacggaggagtcttcagatgaggacttggattattttgcagcgttagatgtggctgcagcggagccttcgccgcgcgtggagggttccgaggggtgcctgggtgcgagtactgggtataggcggcgaagggcggtggcgaaacggagagtgagtgaattttcgcgaagtggtaggcgtcatcgtagtgagatggagagtggtcgtcttcgcgtggacgggactggtaagcgagaattgttgtcctcgccgattggggcgagtgtaggtgagggggagctgcgaaatctttttgagggtgaggaattgaggataatgctgtccaactacagggagatgggtatcatcccaaaggttgagccaatgtaatatatgatgccctcgctgtgtgtatgtgaccgcaatttgtatgataaggcttctgcacggagtcttttgggaaagacttcaattttgtatgataggtcgatctttacgtatttgttgtgctgttccggctgcacccgtaagcgacttttgcacggagagtcttttggaaaagac

SEQ ID NO: 194413 - DNA, 331 bp, Zea Mays
atttgttgtgtgcatggccatgtcttttagtagcggtgtgtgggagaggtgaaaatgggagcatgactgcaaatcatagtccatgagaaattgatacatcaaaacatgaaaagaagagagggaaataactcactagatatgaacgaagctaggctcaggctacattttggggtgtcccacaatcgggaaatcctagctaccctatcacgtcacctctcaaatcctctgagcaatctcattgtcccaatgacacatgtcactgatcgagatcctcaccaatgagagactagggaacatctggtatatggggaacagacgcaccatcagcaat

SEQ ID NO: 194414 - DNA, 323 bp, Zea Mays
ctcgaggggatggttctgcagccggatgttcctgatgtgcatacttggaggttcagtgaatcgggtgaatactcggctagttcagcttacagggctttgctccttggctctgttagctttgagcctgctgaacgcatttggaaatcctgggctccaggaaagtgtaaattcttcctctggcttgtggagcacgatagatattggacggctgacagacttgctaagcgtggcctggatcacccagagtcttgccctttatgcgaccagatggaagaaactatcaaccatttgctggttcagtgcagttttgcaaaacagttttg

SEQ ID NO: 194415 - DNA, 347 bp, Zea Mays
cgtggccaagccactagcgcggtctcggcgtctatagatgacgctggtcataacatctcttcccacctcttccaacagctcgttctcgagctggacatcgagcttgaggtccttgaattcttgaagcggctcccaagagatatcgttgttggataggccacaccactgaacaaggatgtgccagatgccttggtatagttgggtgtgcaacacattctctagcgtaggcagtagttagccatcctgtacgagcgacacaaatggtagagtcgtcggagtgtccccacaaaatggcttgaacaaccccacgtggaacacgtcgtggagacgagcaccctctggaagct

SEQ ID NO: 194416 - DNA, 423 bp, Zea Mays
ctcaatcttggaacaagaatcgaaatctcagttggagattgaagccaaatcttggcaaatctgacatcaaggaagacattgtgacttttctggcgatggggccaatcaggtattctcaaaacccctcccctgctttgaaaaaagagattgataatgttcgtcgccctttctgtcaaaaatgcggggtggagggtcatcatgctagagattgtttcaagtctctgtggtgcgatatttgtcgcaaagaaactcatgtgaatgctcgttgtgtccttcccaaacaaaacaagccatgcatgcctattgttggtatggcggctgacgggttaaggttttattcttcccattttgcgaaatccttatctagaaaaccgaaaaggagcttcatcggtttggggaaagttgttgaggggttgatttctg

SEQ ID NO: 194417 - DNA, 359 bp, Zea Mays
ggggcaatctcttcatgtccctccgctcaggttgcatatccgaaggtggtctcgccaggcttttgcttctggaggtggaaagccgcttgtgcccgttgacgtcgaacttcgtggaattcctgcgcatctctgggggattgagactgctgaggctgttcttggtgctttctgtttgattcaaggttttttgcctggcttggtcatggaggaagacatgtctgttctcagactgaaggtctggtgccggtcacctgtgctgctgccggcggtggtggatctccttgctgaagagccgatggtctgtggagaggatgggagctgggttcctagcacgttggtgttccctgtttctgtggtgg

SEQ ID NO: 194418 - DNA, 550 bp, Zea Mays
ggcccattagtgtaacagtaaaacacacattagggtttaggtcaccttctcctctcctgttccggcggctttttgctcttctctcctgttcaggtggctgtgcctgtgcggcggctcacctctccctgtccaacaccggtgggtaccctctgccccctccttgttcctcaatgtgctcacctgctcacccttttcctcggtggcggcagccctgcaccttcctcctcggtgtcagcatctcaccgtcctcgacggcggcggcccagcagcagtctgcagcggcggcggcccagcagccattagcaccaagatgagtacatcaaccgacggtaacttcaatcactgcacctttcttttgatctgtgccccctcttgaatcccctctgcacctttctcttgatctgtccccccctcttgaatcccctcttcaatctgctgctgccttagccacgattagtcgacctagtcgtcgtcctaatcgcgattagtcgcctagtcgcccaggtgtgtcgactagcaagtcgctcgacttgaaatcattgcattggat

SEQ ID NO: 194419 - DNA, 516 bp, Zea Mays
gtcaagtgtaacattgttgcttatacaataattatcagtgaaatgatcaaagaagggaagcatgaccatgctaaaagcttgttcaatgaaatgatttcatcaggacataagcctagtgcaaccacatatactgtattcattagctcgtactgcaagataggtcaaatagaggaggctgagcatctaattggggaaatggaaagagacggtgtcacacctgatgtggtaacctatcatatattcattaatggttgtggtcatatgggatacatggatcgtgcattttctactctgaagcgcatggtggatgcatcatgtgagccaaattgctggacttattggcttttgctcaaacattttctaaaaatgagtttgatcaatgctcactatatagacacatctggcatgtggaactggattgaactgaacacagtttggcagcttcttgaaaggatgatgaagcatggtttaaatcctacagtagtgacatacagttctatcattgcaggattctgc

SEQ ID NO: 194420 - DNA, 549 bp, Zea Mays
ctcggtgagacatctgatgcaaatacggcaagagaacaacatcaacatgcaccagttcgtcctgctgtcagaccaaggcaagaacgaatggaacaacagcgagggctaatggggggcatgcaagggggacaggtcgaaccgcgtccacatggagaaccctatcatcctccattaccgaagttgccctttctgaagtacgctgaaggagatcctatgctatggttgaacaattgtttggagtatttctctgtttttagtgttcctactgcgatgtgggtgtcagtggcatcgatgaatttggaacatactgcagcccaatggtggcagtttcacaagatgtgtcatgggctgggaagttggcaagaattttctgcagcagtggtggagaaatttggggctgaagcgtatccaaatgcgttgaggaagttgttggaattgaggcaaacggatacccttgatcagtatattaaggagtttgatcggattcgatatggggtagcagtgcacaaccctgtgtttgatgagattttctttgtgactcactttgta

SEQ ID NO: 194421 - DNA, 1112 bp, Zea Mays
ccccctgaatgcagattgcatgctctctggaactctagcataaatgtgagttccatctattgccccaatgcagtcctatgtgttaacaaataaggtgagatcattgtatcatgaatgcatgcctatgtgttaacagaatcctaagaaattaccttaaaatatgggtaccatcttggactgtttctgattttaagtggggtttcaccagtgggtgccttaatcatgtcagcccttaattcaccaatggcatacaaaacttctttaaaatacctactaactgtctccacagacctcctccaactttggtgtatgaccctaaaacgctggttgtggccaactacatgaaggaacatggctacttgttcctccacactgctgtggatactatctctaagcaggctcctactcttaagcaactcacagagctggaaaaagggggttcttctcatgcgcaacatgttaacacactccacatcattgaagttgtaaattctattcaagttcatgtgcctctcttcatccattgcactcattagggcataagtgatcctaggtcgtgccatttgacactggacaagtctagaaacaaaatatgcatacacagcagcaacaagtccagctgccctcactattaacatgcgcctctcatcattatcatccatctctagatgcaaaggaacagagccaagtatcacataacagctcaccagcagtaacatgatgcagtactagatcataggcatggcaacaaaataagctcagatctagggaccaaatcataggcatggcaacaataagctcagattaaatgctataaaatcacaggcatggcaacttaagctcagaccattcaagaaatgaagggggaaaggggaggggaaggaatggcgtctgttataccgaacagcaacaggaagaaggacgaagcaccgagaggaagcagctacaaggcgtgaggaagcagcaatccggatgccctgtcaagaaatcaaaaggggattagaaaccctaggtcgcgaaatagaacaaaaaacgaagctccaaacctacaaagcacgaatccaccacggatctgaacaaagaagaagaaatagggggaggatgggaggaac

SEQ ID NO: 194422 - DNA, 453 bp, Zea Mays
gccacctctagtttttcccctgcaggttcgtcctccgccacgtcacatgtggccctggtgtcaccagtcgtgtcgtgtgcgacctcgacgtcccccaccatgccccctacggccccaccatccccagtcgtgttgtgcgcagcctcagcggcctctttcgggccccacacaacttcggtacctcgctaccaagatcttatgcatgtctatcggcaatgtgcacgggatccacacatgaatttgacgcctcctacgccacttgcaaccttgctgcgtttcgccggccccatccatgtctatcaccgttgtacacaggatcgtcatcgacccactcccgtgacgagccgttggtctaccaccctcccctcctccgttgagatccccatcacaaccatctgatgggactcgccacactgctggggtcctccagcctgttgaccgtcttgtcctctc

SEQ ID NO: 194423 - DNA, 496 bp, Zea Mays
gtggtatctcatttgtgttggcatatcgagcagacatgaatgaatgtgtagcaccagaatcaaatagtattgttgcaggaattgcattaatgtaaaacataccgagtacgatgtcggcaccatcgggagtatcatcgacgctgacttgattaaccctggctatagaatatcccttgccaggagttgttgcttgttcttagctagtgtaccagaatttcccatcggacaagcattagcatagtgcccaatctgactacacttgaagcatgtagggccggtcttctgtcctgcagacctggtcggggtgccagtgggagtagcctgacgagtaggaggtgtccgtggagacccctgtggagcatactgagctaggcgtggtcctcctggtcgagtcggtgtacccagcggcgaaacgtagtggggacgaacactactgctaccctgtccctgtgagatagccttcctcttcaaatcacccagttgaacacgcttgtgt

SEQ ID NO: 194424 - DNA, 486 bp, Zea Mays
gccaaccattaccataggtcgccggcgagctctcccggtgccgcctcagcctactcaatctgagctgcggccgggaacgcgctcttacaaccgagaacacccatatcacatgtaaagcactcgctaggctttgatatttgtatgatatgcatgatgtgtcttctgttttaaatttgcatcctctgctataccgatttgtatccattgttatggtgttccttctatcccacaatatggtggtatgtacacagactttacttaaaagtatattgccttatatcaactggacacttttattgtgacaactactgcaatagttttcttctcacttgtatatttcaagctttcgagtttcgacaactaaatgccaccaaaatgtacttactgcagtagtgcttttgcattcccttttggtttctgtcttacacaggtactccgtctgttccaaattataagacgttttagctttctagatacattgcttta

SEQ ID NO: 194425 - DNA, 1248 bp, Zea Mays
gaagttctggaagtgcatgttgactcacatatggatcctaattatgagtctgctgaagaaacagatgagaaaagaactggtatatatcttcctgtaatgttaatgcttcatgttgtttgttgattaataaatattggaattctcttggagctgtagcatgatttcatgtggtttgttgcagtatagtctaaatatacatctactatactgcaccgtaattttcttgcaaagttgcaatgcagtacatttaaattaatgttgcgataagcatcaactctattacaataaatcagatttctgaacctaacctttaattaagtggtgtctgagcatttgcttgtttattatatgcagttggaaagtcggtagatcggacaagaccagatacaaccatatcacgacgaatatcaagatatcttagcactatgcagaaccatcctcaaaaagtttctgattgtagccaccatccaaaaaacttgtcaacagaaagtacaatatgtggatcaggagcaagaagtttggagaacagcacagcaaacagaactatgtatgaagctggatcattttcatcttctggagtaacaatgtcaaatgacacggagccggagaaagtctggcactacaaggatccttctgggaatgttcagggtccatttactcttttgcaactatcaaagtggacaagttacttcccacgtgatctgagagtatggcttacatttgagagtgaggagagatctttgctgttgactgaagtgctttcaaaacagcagaaagatttcactcaggctgcatcacatacaagcagcaaggcaacgctggttggcactggacatacaaggaacaaccctagtgtggatcagaccaatgctttctcccctgctggtcatagtgtggttagttcttcaggaataactgttcagtataataagtattctgttccagaaagggaaagtgtgtactctccagatgatagcttgtcgctgtcaactagttcggttccgccgaaggatgcttgtactgtgaatagccaaacacactgccagaataagcattctgttttcattcaatctcctggaagtgcatatgggcacacagacttgaaccatgatggaatacagggaggatgctctggtgaatcaaaccaccatcacagcagcggagccctatggagtcctaccgtggtacaggtgagttgtggacatggtaatgtggaatctcatcagagccagcatgtttcctggtcac

SEQ ID NO: 194426 - DNA, 629 bp, Zea Mays
ctgctacaaatgagcatttattcttttatgcattagtacactcaatgatttcaagtcgagcgacttgctagtcgacacacctgggcgactaggcgactaatcgcgattaggacgacgactaggtcgactaatcgtggctaaggcagcagcagattgaagaggggattcaagagggggggacagatcaagagaaaggtgcagaggggattcaagaggggggacagatcaaaagaaaggtgcagtgattgaagttaccgtcggttgatgtactcatcttggtgctaatggctgctgggccgccgccgctgcagactgctgttgggccgccgccgtcgaggacggtgagctgctgacgccgaggaggaaggtgcagggctgccgccaccgaggaaaagggtgagcaggtgagcacattgaggaacaaggagggggcagagggtacccaccggtgttgcacagggagaggtgagccgccgcacaggcacagccacctgaacaggagagaagagcaaaaagccaccggaacaggagaggagaaggtgacctaaaccctaacgtgtgttttactgttacactaatgggcccagccgtccagcccatatcccaaacaggccgaaacaggagccctg

SEQ ID NO: 194427 - DNA, 457 bp, Zea Mays
gaagatggtcggtgatccgggggcgtgcggggtctggacaccgatggcgggactcctgcggtggattgtgccatgggcgcgtccgcctgtatagcgcacagccggccccagcaatggcgaatggaggaagaagccgctcggccgtgggatggacagtacgcggccgagatcgaatcgatgatacccctttgtttgatagaatcttaaccatagatcttggatccagtgatcaggaaggagtgcgggatattagctagctcaaatctaatcggatccgtccacctcagatcgggcgggccagattcgaggataccccttcgggctgcccagtttgcaaaagagccctcggttttctctcaaattaacccgccgtccatattaggggtgatctgagtcataggatttcttgcgcagtgacccctgagctttctggaattcggggcccagtccagaggac

SEQ ID NO: 194428 - DNA, 289 bp, Zea Mays
gccttgtccttgttatgctcgtcactgacgcccgtgccttctcctggctgcacccatcacccgccgccattctcctcctggacgccgcccgccactaacctccttttggtagcgcttgtggcctgtggcctgccctccttctgggccgtggccgtctgtactcgcttcctcggccgccagtccgccacctgccgtccctcaggcagcacggctctggatctgggggcatgctgcctatccactgctgctcccttgtggaacactgatgtttacttgtacacaactacaa

SEQ ID NO: 194429 - DNA, 393 bp, Zea Mays
caatgacaccctccgtctccgatcctcctgtgcatatatatatagaagcactcccgaaatatatattatgcaattcgaccgcgtggatgaggaaggcgccacggagatgcatgcaggtgtgcagatagagggcaacgcaactactaacccaacaaaagccaaccacccacttcgtctcgatcgtcagctcacgcgcacgcgggcgaccatgcccaagctcctggatgggtcgacgtctctttcctttgaaactgagcaacgttcggaccaaaccaaccaccgagacgagatggtacctgccatggcatgcatgtagtcgacggagcctttcgttccggcacccgctcaacgctggtctcatctagtcatctgctctctagtcatcagtcatca

SEQ ID NO: 194430 - DNA, 329 bp, Zea Mays
atgagaactgccactgtccactaagatgagcattgggtgaccctgaagaaatccctgaaacttcagtgtacgcacggaattcgaaccagtccaagcaacccgagaaactgacatgaacagttgttcttcatcaggagaagtatcatatttagggtcgggtggatccggttcttcaggtatcaacaaatcccacacctcttccagagcgtggagatgagcagcagccacacatttgtgtcccggactccacttctcagcacacttttcacacaagccacgagcacgcctgaaacgacgcagtgcagtcagcttgtcatcagttgaaccgg

SEQ ID NO: 194431 - DNA, 418 bp, Zea Mays
ctggtagtggcacaacaatctggggagggctagaggttctagtggctacaagaggccttgacgtcgctggtgtcgcctccggaggcaacatgtggaaacctctgcaggtggggaagatagaagtggcagaccagagggagccatggggccataaatgagaaggtccaacctggtggtggagttgtagggggccgaaggggaattctgtctcgtcaaaggcgacatgacgagagatcaaacgagggtgaagtagaggaagcaggatgcggtgtagagcacacaaacaaccacatggtgtacaggggctggggcgaccacgacgctagtggaggtgtgccacccatagaaggttctggccacagagagatgcgattggtccatgggttgtagaagatggccagggagtgtcccccttgcc

SEQ ID NO: 194432 - DNA, 390 bp, Zea Mays
tgtaaaagatttttcagattttatactatatatatggaaatacatatctcatatgtaataatcagatttgttttggttaatatatatatacaatttatacttgtttcaaatgaggttcatatatgagctgtgaagtgtttgttggtgcatgctaaaatgaaatttagtttcctgtctttgatatactattaatgtaatatgattagtttacatttgacgaccacattttggctattaacagacatgactattacagatgcagttttcaatactattgtaagtggacgttaatgttgacatgtggttgttaatagtcatgtctgttatagctaaaaccaaggttgttgatgcctcatatgtggtcgctaaaagctgcaaatttggttgttg

SEQ ID NO: 194433 - DNA, 476 bp, Zea Mays
ttcgccaaagtcactcatcaaatatgattatatgtcgtcacatacattgtactaatgtttttatgaatcatttgtgggtaggattggccattcagttttttaagaatcgattcggtttttgaattttacagacaacaggaatcgatcggtttattagaaaatggaaaattgattagtacgatttatagttttaaccccaaatattttaatgggaattcctccagcttccttaaaaaagctcaataaagcgcaattacatcccttcattgaccgcttggcgaactctctcccgggttggaaggctgatcttatgactaaggcaggaagagcggtccaggttcagtttgtgttgacagctaatgtcgtctatcatgttatggctctagatctccctccttgggccctcaaggccatggataaaatcaggagaaattttctttggcgtggcagaagcgagactaatggaggttattgtc

SEQ ID NO: 194434 - DNA, 286 bp, Zea Mays
ttttatatgcttctagtcatctgactggtccagctactgattggtgggattcttacaccgctgcccatgatgctgctaatactatcacatgggtggaatttgctactcagttcagaaactaccatattcctgctggactgatgaagatgaagaagaacgaatttctatcgctgaagcaggagagcatgtcagtcagtgagtaccgtgatagattcattcagctttccagatatgcaccggatgaagtggctgaagatgagaggaagcaggaaaacttcatcgaatg

SEQ ID NO: 194435 - DNA, 433 bp, Zea Mays
agccaccgtgaatcgctagcaatcgtgcaccagtgcgcttgaatttcggttttcccccaaatcaagtttccgccacccgaaatcaacctcaccgcggccagcctaactcaggttagttcaaggctctctgttacttgttctagcattcttggatcctccgtaagctcaccggtccacccaattgaattataccgccaccaatctttgggaacacgatcaactgtccgccacccattcggttcacgcggacagagcttggtagctcaccatttgcgcaattaagtgaggggaaatgctcgggcaggccctgatttggtgtccaccgctcgggagcgccggtcactgccccatttggccggtacagtggctcgccggagtttctccgtgcgctgccgtcgtcggggacctcccagtacgaagaaacagaagttgg

SEQ ID NO: 194436 - DNA, 340 bp, Zea Mays
gctcaaggggccaagtgccatggaggctagcggccatgggggctttgcgtctcggcgtccatggaggaagaagatgagaggattggagcagggggcatcgaatggaggagctatcccggggctaggcgagcgccctacgctagaaggagaagggggtcagagctctgagtggactggagatgggggatgtgtataaatggagagagagctttggacatgttaggtggcagtgagcagtggcaggtgtgacaatgccaacattgggcggcatttttcgtccttttccgtttggaatcgaacccgtatcactgcagaagatatgtttcttgatgtatactct

SEQ ID NO: 194437 - DNA, 282 bp, Zea Mays
ggacttcgcgccgccgcgcacctgatccctctcactccctcgatcactctctcgttgcgggaatggagagtagcacggctgtcgcgtctgccgccctcctcctcgccctgctcggttcgctgctgcagcagaccccagcggcgctcgcctccgtctccgggaagccgcggtcttcgtacgtcgtgtacctcggcggccacccgccgcgcgccgacggcgtgtcgctggaggtcgcgtcccggcgggccaccgactcgcactacgacctcctcggcgccgtcc

SEQ ID NO: 194438 - DNA, 325 bp, Zea Mays
aacctcatactccaaggagggggcgtacggagaggctcgaggcagaaagagccaagtaggtggcgctcaacctcagcgagctgcctggcaagggtatcagcagcaacgtgtccgcactcccagacgagagaaacgacacgtttgcgctcccatggagcaaccacaatggccttggcagttgtgagggccacaatgaaggtggattgggcagccacaacatccgagggtgggaggacggtcgacagaggtgcgaagcatagacctgcgaagcaaagacctagggcggaggttgaagcgccaaagccaagacgcccagtggcacacc

SEQ ID NO: 194439 - DNA, 331 bp, Zea Mays
tgttgcaggcctgttacccttcaaaggagactcttgggtattgatttccttgttatcttgatcagactgggtagaaatatagaataataactctcctagtgttgccatacagaatcgcctgagtttatcatgtttatcccttaacccatctgatagtgcattaaaaattcctgaacttgccagctccacatcaagagcagtggaatagcgtatcagcaaccccatgagtgaggcaatttggacacgcaagactgaagtttttgacagtcgaagcatttttattagtagcaacataattggtccattagttattttgttcgcagcatctgag

SEQ ID NO: 194440 - DNA, 280 bp, Zea Mays
cggccatgcgctccacacaaagttgcttcacattgacgcacccttcgttgtgactccacgtgctgccactagttccctctggaaacaccgccgctgagtatcgcaccgcgtgcgcgtcccccatgtcctggacacgtgtcctgccagtacttgaccatgcccacaacacagcctactccgccacgccctcacacgagtgcatgtcccacatgtcagccaccacgcttggctgctctggtacgtcaaccaagacctaatactcgtctttcatcgctctcgg

SEQ ID NO: 194441 - DNA, 449 bp, Zea Mays
tactttgtaggttactacaaacaattattaagtttcctcctacacgcaccttggaagtggatgagaagcaattggtgtggaagtttcgtttctctttgatgtctgagaagaaagctctaacgaaatttgtccgctcagtggattggagtgataaccaagttagtaaaagaaattcctatgtgaacgttctgtttttgttttgtaacttcatatttggttttgctggtctaagtgatggacataaaagtgtactgcaaacctgcaattagtttatttgatgtcaaatattttcgtcatgtcaaattcttttattatattctggaaggaatctagtgttttgattttttcgtcatgagctgttacgtaaatgtaataatgctatgcaggaagctaagcaagctgttgagttgattggaaagtgggaaatgattgatgtggctgatgcacta

SEQ ID NO: 194442 - DNA, 560 bp, Zea Mays
ctccacaacaggtgatgaattttcagaaacagaattttcagcaggttcaacagatggtggagcatgatcatcaacatccccccgtgctccacctgcacactaatacactcagaattctggttagtagcactggtagatacaaccgaagggaacatagcagattcattgaacacaacgtttccactaaaaatgccttctgtgtatcaggattccacaatttatatgctttaacaccagatccataacccaagaaaacacacttaattgctctaggctcaagtttaccattatcaacatgtgcatatgcagtacaaccaaacactctcaactgagaataatcatagggggaaccagaccaaacctcaattggagttttcttatcgatagcagtggatggtgaacaattgatcaaatgacaagcagtggaagcggcctcagcccaaaactttcggctcaaacctgagttggacaacatacacagagccttggagattattgttctgttcatacgctctgccacaccgttctgctgaggcgtatatggtatagtgtggtgcctc

SEQ ID NO: 194443 - DNA, 2549 bp, Zea Mays
ctctccctccgtcccgccaataaattttcccagcgcgacggcgccccgctctcccgctccgttcctcctcccttccccgaagcttcggcgccccctcgctccctccgccccgttttaagcgcgcccgcctccgaccgaccggccgccacgcgagcgaccgcttcggcaaacggggaggaggaggagtgtttgcttctctgtcttgatcggggaggcgccatggcggacacccgcaaattcgtgctgcccggccaacccccaggtacggctcgctcctcctgtctgcttctcctccggggttggggttttgcgcgctccccacgggagagcacggagaattcgatggttttacggccacagatgcgttttcgtttcaagacggagagaaaagcaactgcacgtgccgtgtcgatcgaggacgagtcatcttaaatgctttattaagtacatctggaaaaagggccgtgcgtcccatgttcttgcagttgcacttgcagtccccgcgaaatttcaccctcttttttttatatctacaaaaaaaaaaaccccggtccattcccggcctttgcaaattcgctctatcgccccgcggaatttcgagctggatgacgggatgagtttctctttcatcggccacgtattttgtttttcgaaagaaagcgactggggctagtctctctctggcgttttgctgacttttccgaccaataattcagagcagacaaaaaggggtttcggtaccaagaacgaggagtcgaggaccgtatgcgagtggtggtggtcgcctggtcggagcagttgttggcgttgactaaccggggactaactaactaacctcgtcgtgaatgaatctgcagacatctcgcagatactgcaggaggctcagaaccggtggctgcggcccaccgagatctgcgagatactgtccaactacaagctcttctccatcgccgccgagccgcccaacatgccgaggagtacggtttctctccctatgttttttgtgctctctttaggtgcatgctgtggcttctgaacactggcctcataaatatgcttattaaattccattagcaatcgtgatgtatttatgctgtgggctatggaagagttgttgtctgctggcagcttggcatgggcatttcggctgtgtatatttctttggagtagctagtgatacagcttatggtaaatttttcgcttgctttgcgggctcgacaggtcttcctctgcttgctatgaagccatcgaaaacatgttctcattctgaaacagaaatctggcacaacttgatgtgttgggggatctggtgggtaaattttatggtaaatagtttgtgattttcgctaggcaacacaaccacatggcggttttcctttcgagtcattgctgatgatacgtcagccacgcccagtgtcctctttcattagttttttaagaagaaacgtagttttgtttcggttagcacaaatagtacaacagttacattatagccctacagtttgattgctcgatttggtcaaagctattcttatagtagtattagctctacagtttgattgcttcatttggtcaaagctattcttatagttcggaatgctggccctctcattggcactgattctcattacttaacttccatctgatcgcaataggtggctctctttttctatttgatcgcaaagtactgaggtacttcagaaaggatggacacaactggagaaagaaaaaagatggcaagactgtcaaagaagctcatgagaaactgaaagtgagtaactattttattttgaaagaaaatcaatatctcgaatgctgcgcaaaaaagtttaactgtggatgctggaatgttctgtatcattttgggcatttgctacttgttattgtgcattctgtaacttctgtagcggtagtgataaatattttttgtgtgtatactgcctatccagtatagatggtgtccatgcttgtggagttttttttaaacaacttgcatatcgcaccgctatccatactcatagagctgttaacaatttccatcttatgctgccacattcaatttagaccttagcaatgagcattgcattgggggagaagctgttgcatgcagatgggaagtgttgcataccttaggctggggcataattccatcatctcactgactgagcatgttacctgttaactgatacttacatgaaagatgtgtttatgtcaaatttactgcaagcttaagtcctacttaattatctggtagtagtatagattgagtcctatttctttagtgccttcacttgttctctaaagcttgttattataggctggcagcattgatgtactccattgctactatgcccatggagaggagaacgaaaactttcaaaggcgaacatattggctgttggaagagtaagtgctgactgttgcattcatgtcattccacactcatttgggtggtagactggtagttaactcatactcagaggaaaagtgtgactgatatgactttcttatttttcagggatttcactcatattgttcttgtacattac

SEQ ID NO: 194444 - DNA, 345 bp, Zea Mays
cttgtctagcagcaaagtccgtctagaaagccaaatcccatttcttgtctaacagtaacgtccgtctagaaagctaaatcccattttcaaatcggcatcagtagaacctccgtctaggaagccaaatccccattcgtggtcatggaggagccgtcaaaggagaggagctcgtctagcaaggagtctgacccgacctgggcatatcgatctccagccgcgattgctgcacgagctggcagatccattcgtcgccgtcgtaacagcagcgtggtccggcatcgtccatacgtccgcaagaatttctccaagccacgaagaggtgctctgttgagagatcttgatgag

SEQ ID NO: 194445 - DNA, 559 bp, Zea Mays
gtgccctcatcgccgacaccgcccccgtcatcaggagcagccatcaccgctacccttgaccccaagagcaatgtccaggagagggtgcttgctccgcgatagacgaaggcggccgtccacctgtaggctgcatcacgcggtttcctagggcgtcggcgggtgaagcagatgatgggggtgctccattgcgggggagtcgtagctgcaccagcgcgcccgagcaacgtggtggttgttcacctccgcgtacaagaggctgcaagacatggcgcccctctgcaacgctccgtccggcgctggccctcatctgcggcgaccgtgcaactaccacgactactctccttcgtacaagggggtctgctggcctcgccaccatcttctctagccacaccaccctttgcgcactggtggccgcaggaccatgaggggctgcactacatgggattcacttgctgcaagcaacaccaacgttggcctccacgggcccgcctccaaaggctgctgtgtctttacctccatggttttagctcgcactctcctcttcactgtgcaacgtttc

SEQ ID NO: 194446 - DNA, 359 bp, Zea Mays
ctctagtctatgtacttagggaacaaagtgaacttcacagacagaggaccctcaacatgatttacaactccactgatgtagagtgcatttccatgcttaggatgaagagagcccctttttttgctttatgcacgacctttagagagaggggactggtaactgatagggagggggtgtcagtagaggagcaagttgccatgttcctgcatgttgttggtcacaaccaaaggtttagagttgtgcaccaggcctttaggaggtccattcagatttcagacagtacacaagcactttcatcatgttttgtatgctgttggagagcttaggaaggaacttatcaaggcacctagccctaccac

SEQ ID NO: 194447 - DNA, 727 bp, Zea Mays
tgagataagtaagagaccacgcttgaactaaggtgggagattggaggttttagataacgaacataatgtaatcgccaaggtaagattgagagatgagaagggtaaaggcaataagaaacaaaagcacaacaaaggatgaggttacaaactcgcgagccaaagaagaggatacgaccaagagagggaaggtatgagacggaagaggggcgattttaaagggcaggtatgagacaaacatcaatgtaggatatagaggtgttaagggtgcatatgataataattaaaagcatgacaaaggatatagttaaggcaagactcacgaaacgacaaggtggggaaaacaatcaagggtaagataggtaaggttccaacagaagggttgaagtaacagaaattattaccgagggaagttatgaggaaacagtgagatcatcaaggatgtgtgaaatagaatggtcgctcagggaccatcaagaagcaagggtgatcaagggcatattaaccgaaaggttttgaacaatcattgggatatgaaggtaagcatatataaaaatattagtatgcaagattccaatggtacgggcgtaccaagaccaacggaataggaaaagctaaaaaataacggcttcacaacggaataggaaggggggtctcaggagacaaggagttcaaggacaacgtctaagtaggcagtagaaattcagatgtaagtatttgaaacaagagt

SEQ ID NO: 194448 - DNA, 277 bp, Zea Mays
cggacggcgggtttgttttactaaaaccgcaggggttcttttgtaagttatcctggtgaaggggtatggctggctctcagccacaagattagatttggatggcccagatcgatcccgagcccataatctacgtagaccgctcgatcgaagatcaatgacccgcgatgcatcatcacttcaatttcccttgctcttaaccttcaccgtccgatcattaccgagcgccctagattcaatggttaaaagcgttctcatacccccagcccgagccgcggcg

SEQ ID NO: 194449 - DNA, 334 bp, Zea Mays
atgagggagctcaaaaggtacttgaagaaatattacctagagtacgagaaaatcatgaggagtcatagtttgcatgtctttattactcccgatgatcagatgagaagtgagccttctacctcttcacctctttgtggtaaaagaagggtggaacatgcatttgctcaatttgcatctcaaaatgcgaatgcccgtccagagcgaacagaaatggatacatacttggaggaccctaggatccttatcaagccagatgaatgcttcaatgttttaggatggtggaagaaaaattcagatgcttatccaatattgtctttaatggctagggatttca

SEQ ID NO: 194450 - DNA, 574 bp, Zea Mays
atttaggggttgtttggtacctttgctagctactgtttggatgtctagatagcctaccttgattcctgcgctagcgagcttttctttgctgcttcaattgcttgtttggattggaggagattgaaggggattggagggtattgagggggaaatgaactaatttccccttctaaccaaacaagccccaagcaagcccaattggctctccttagccgggaagcattcagttactcacgctggtgaagcaaggcaacctggttcgggaaccaagcatgcccttaattggttgtctggcaaggacattgatctatgcattgttaagattttccttgctagtgtggtgagcaaatttggctcgtctggacgggcaagatccttgtggcttgtgcgccttaagaaatgggaggtggcttgtgccagcccctcaatacctcaaccaactacttgtgtttatgggtgttcacctaagaatcttgcatcaagacaagggtgttgttccatgaatgcctacacattatgactatcattgtacgcttgaaatctttgttagataaaaaggacataaccagtgctg

SEQ ID NO: 194451 - DNA, 357 bp, Zea Mays
gcctactaaaaggactggtgcgatgcctgttaaaatgctgatggagcaggacatgtggaaagaaagacggcctgatgaggagccactgaatgttgttgcaagattaatgggcctacatgagcctccaggtcagcaatccaatttccctttaggaagacaattggataagaaatatcagtgtggtggttttgaagagaactactggaatctcaagtcaaagaaggaaagcaaatgccaccaaaaccaaaaggcagggccacgccatcagcacacttggaatggttctggtgaccaaccatcaagaatcagtagcagccagagcatgcaccaagaaaatgagacttgtgagaagaggat

SEQ ID NO: 194452 - DNA, 348 bp, Zea Mays
ggtggggcgcgagggctgtggcgagatggcgtcgcctcctctggcgttaaccgatccagtgacaagccgcggggaggtcttgctgttgattgtgccccctctggctcccctacaccggtggttggggtctcccggtcgtgaaggggtgtggttgagtacatgctttaactggtatgtagtcgatcacttattcttccttcctcgcccctattcgatgtttctgattctgtcgattttgtcagcgcgtacgtgctgggaaagatggttaatgtcgtggccctcgcggcgaaggggggcatcggcctcccgagttctcgcatctccggcgcatgctaggggtgcctccag

SEQ ID NO: 194453 - DNA, 362 bp, Zea Mays
acgcacggacgggccttctcttctccccgagcgaggtgcgagcctcgcgttgcaaggcgcactcgcccgagatctccctagcctgatttgtttatggcgataaccagccgcgttcacgtacttatacccgaggtcaggtgcggtgttcggtctcaagcgcctaacggctgacgagatacgcggcagcaagtccgcccagttcgcgcggcaagggatttggccaaggccgcaatgaactgttccgcgaaaattcttggcatcacggcgcgaggtaaacgatgacccagactatctaggcccacgtgtaggtgagtcggagctagcgccagagtaaagaggccgacgacgcgggcctatattac

SEQ ID NO: 194454 - DNA, 435 bp, Zea Mays
ccgccgttagctccgcaacctcatcacgtaccccaccgtccagtatcacccccaatcctgcaaccgggtgctccaatttcaaattttccccaactatgttctgaagcaccgcaggatcgagctcaccgcggccggcccgattcaggtcaattcatgttgcgctgttgctcgttctagcatccctaagctcttctcaaactccccgaccttgtagattgaactaaaccaccgtagatcacggggaacatgcgattctatccgatgcctccgctgttcccgtgggcagggcggtgtaggtcgccatccgtgcaattaacttaggggaaacggtcggagtagatccaagtttgtgtccgctactcgggagcgccgttcttggccccctccggccggtcttgctcgccggagctcggctccaagcgcggacgccgtcga

SEQ ID NO: 194455 - DNA, 595 bp, Zea Mays
gatctattgttttgaattcattatattccaactttttagcaaccgtatggtggaaaaatgtgccttacaactttaacctatgtttggatagttctctcactcaatttggctaaattttccatggtctttattttattgagaaacaatgtggcatattaatatgttgtgttttatttgagtagacataaacaccgtctaggtatgccttgaatagaggggattataggaaacctggtatcacaaaaggtcattagctagcccaataacatctttatccactaattgtactctaataccctctcgtgcgaatacaatgcccttgacatctgggaaacatcatttttagtttaaaaggtgatctattgttttgaattctttatattcctgctttttagcaactgtatagtggaaaaaagtgccttacaaccttaacatatgtctggaaagttctcacacacaatggctaaatttcccacggtatttattttattttgagaagcgatgtggcatattgatgtgcggtgttttacttgagtggacacaaataccatctaggtatgcattaaatagaggagattataggaatcccgctatc

SEQ ID NO: 194456 - DNA, 544 bp, Zea Mays
cgacgtcggactcgagactcagctccactcaccaacgaggaatctggatagggcgacaagggttttgtcccggccaagacgcaacccatcccgcggtcatcaacagcatctccgatcgcgccaggttcgttcccgttgcctcgcctcgcatgtaatttgttcgctcgttcttctactctatcgtggctccgctgatgtcgtggctccgctgacgtcgttgtcgtgcagacgtggccactgctttcgtttctagttcacatgtgctcgcccgccacacgttggtttgcgactctcaaaacttacgttcaccatcttgtctcgtatgcctgctgtgtaaatggtaagcactccgcacactcaggttgttcgatgaaatgtgccaacaatattttttttgctcgtctaggacatcaaagtagatctgttgtcagccgtgcacctaggttgttcgacaaaatgtcccgacatttgttttgtcataccaccatgcattacatgttgtccttaaaacatatacgctactacaggatatttagacttcgtt

SEQ ID NO: 194457 - DNA, 293 bp, Zea Mays
ccgcaagatcgtccggatcttgtagtgcgtgtctttcatgcgaaactacaggagctaaagcataggttgactaaacaggatatactcggtaaagtctgagcctacgtctacgtcgtggaatttcagaaacgaggtttgccacatgcccattttctactcatcatgcaaaggaagtacaagctcacgtgccctgaacagtatgaccttttgatctcagctgagatcccgtccaacaagtaccctgaactgcgaaagatggttatcaagcatatgatgcatggcccgtgcgggtc

SEQ ID NO: 194458 - DNA, 468 bp, Zea Mays
acttcttcccattcttgcaaagcacaggtagaagcgaggggacaaactcaaggtttaaagacaatgtgacttcgacttatagtgtgatcagcttcttgcgtgagtaccaaaggattgtggagcaagtgaatgtgtcagaggagtatgaggataatgaaagcaattgtaaacatccaaaagaactaatgtttggatacacaatagagaggcaagcacaagaagtctacaatagaaacatattcaagaaattccagttccagttgcaatcaacaccaaggctaagttacaacagaacatctaatctgcatactttcgaggtgtatccaaaatcaaaccaagaagaaaagccacataaaataaggaggtaccttgttatggctaacctaacatatggaatggaagagttcacttgtgtatgtggcaagtttgataaggatggcattttatgctcccatatacttaaagtga

SEQ ID NO: 194459 - DNA, 631 bp, Zea Mays
gaggcatgtggtggtgtggggggcctcaactcagtaacaagaaagatgggaggcttggaacaggagggtgcggaagaggttggtgatggtgcaaatcatgcgctcgactttgccgttctgaggggaggtgtagggacaggacatccgtagctgcaccccgcgtgagggaaagaaggcacgagacgtggagttattgaactcccgttcgttgtcacactgaacaacccttatggtgcaactgaactgagtcaacacccaagcgaagaagtgaggaagggtggagaaggtgtcagacttacgacaaaggggaaaagtccagaggtagtgtgagaagtcatccatgatcactagatagtactagttaccagaaaggctcggtattggagaggtccaaaggtcacagtggacaagatctaaggggcgagcggtataggacatggaagaggtaaaaggtaagctagtgtggcgaccaagctgaaaagcatggcatggcagcatggccgcgggggtagggaattgacgaggtggaggagagtctaaagaggatgtcgtggccgaggtgataagacaacgacgctaggtggaggtagaggcagtaacaatgagggcatagtgtggggtaaggccgaaa

SEQ ID NO: 194460 - DNA, 412 bp, Zea Mays
cacgcccctgcctcaagtgcctgaagctgcagtggctccatcgcgccgttcgcgaagatgtcgatttgcgccgagcggagccagctcccgacaccgtggctgccgttgtcgcttttgctggtgctcgctggtgggctgaatgctagctctggcaccctattgaaacgacgacaagatctctcatactttattgatttatcaaatattttttctcacggggttcggggagatttgggctttgggaatacacgtagtggccagggaacctgtcaggagacctgatgctggttgctgaagcaaggtttggtttgcatcgtctatgcttagcgtcgagattttctactgcttgcaagttgtgtcgtccaagaaagggtccgtctcgcaatccaagaaggcgacgatctgagctgca

SEQ ID NO: 194461 - DNA, 579 bp, Zea Mays
ccggcccactcagcccgcgcagcccatcctccaacctgttccattcatctgtaacggatcaaagcccacttgtccttgtcccttctcccctccggcctcagcttcccttccccgtcgtctatccgcgtcagtttcgactttcgattcccctcgccctcgccgacggccagacgccgaacgtctcgccctctcccgacgctccccgcctcccccttgatccgccgagcgcggcggccgccgccgccgccgaacccgatctccccccctcccgcgtgacaggcacggcctcccctcggtaaggatgccccgtgcccatggtttgccctaatttcccgacacgtaccccgcgatcccgctcccatacgacttccctgccgcctttttgcgtccttcgatccttttctacgtgtgtttcttttcgttcatccagcgattgccgatgtggagtgggatcgtgttatatgttcgctggaatttttctttgttttcctgtgttaggtcgcggagatttgtgtgctcgtacctgcgaagaattgatcgtgtgggattatattctacggttcggtagtttcagcgtca

SEQ ID NO: 194462 - DNA, 455 bp, Zea Mays
acctcaacggatccagacagctccagtgataacagaggctaaaccatggttggtcgcgactcgtcccacgctggcatgtcctaagctcaagggcccggacttacctatatgtcacgtcagatcaccgctgtgtcggttgtacgcatggccgtatccactcctccacctcggccgactgctatagcagtcccaatgcgtcggacccccttgtccacctcgccgacaatctagacccgaatcagtcaaaagaagaaagaggctgaggcccttgctacttcctgggccaacaaagcgtggtcgacaaccgccgtgatcactcgtcctgtgagcgtggcaattacagtcgtggtgccaaacctcccgctctactaccctaacgtcctctgcatcaacggggtagtggagaacgaccctatgtaacaccctaaatttgtgggtataaaatttcttttcta

SEQ ID NO: 194463 - DNA, 323 bp, Zea Mays
gatgtggatgccagctcgggcagctcaacgccggtggtccgtgtgaccggagttgggttgggcgatgggattcgtgtcgcggggaaatggattttgctgaccttggaaagatctccttgccgatgggtatgaactactgtagccccgctgtcttcaccttttacgccggcgacgtggcttcgtggccctcgccggagttgccgttctgcgccgcgatggtgccacgtttccactgcgttaaacacgacgtcacttgccgccctagctcgacgatgaccgccgtagcttctcaaccggtaaatgccactgtctgccgcgccgat

SEQ ID NO: 194464 - DNA, 282 bp, Zea Mays
tttctgcctggccatcagtttgaggatggtaagctgagcttcgtattacatgggtcccaagtgattcttgcagttgctcccaaaatcttgccacaaatggtgctcctctgtctgatactatagtccttggtattccatgcaaacgaactatctggtcaatgtagatttccgcatacttctctgtcctgtgggtggtgtgtactggcaagaaatgagctgacttggtcaatctgtccacaatgacccaaatagaatcatggtgcctggaggtattgggcaatc

SEQ ID NO: 194465 - DNA, 302 bp, Zea Mays
gtgactgtgcgctgtccggtgtgcaccggacaacaattgttcactgtctggtgtgccataaccagtttttaaaaacttttcctctcccgagacaaagccctggctcttcatttccagcgccagcccgagcagctctctccctcaaaccgccgccaccttccctcgccggcggccactgctgtcagcccatctccggcgagctgctccagcttctgttcccacgctcctcttccctctagtgagattcaccctctcctccttcctcaatatgtctctagttatccagtgaagcacactcacac

SEQ ID NO: 194466 - DNA, 535 bp, Zea Mays
acgagactctgttctaatggttcttgtgagtactaagtctccttctttgaactctcttgggatgacggtgttgtcacgccatgccttagtctgtgcttgatatttgttcagtgcttccagagtgaggacacggtctcatcgataaggtctttggaggttagctcatcgacgttaggggtggctgttgggcttgttcgtggggatccatgctttagctcttgcggtgtcattgcttcggatccatacatcaagtggaagggtgtgaactcggttgctctggattctgttgtgctaaatgcccatatgactcggttgcgctgaagatcttgcgcttggctcgctcgactacactgttggactgtgggtggtagacagaggcgaacactgccttcgtgccgatggagttgcagaattcccggaagtcttgggtgtcgaactgcttgccgttatcgactgttaatttggatgggactccgaaccgacatacgatattctgccaaaaaaaaaattgtgtcatcttggatgttattatgga

SEQ ID NO: 194467 - DNA, 360 bp, Zea Mays
gaaagaaccagtgctttattgcacagctcagcaaaggaagaaggcttccagcgttgcactatgggctccttttggaaactccttaaatgcagccgttactagaatgtcggaataaccgaacactaacatgtagggattcacatccatccaaccggaaaacagctctcgttgccgcgcgaacaacatgcacgttaaccaatcgtcggcaaccggcgccgccgtgaaaatgaacagttaccctagatcatcctcctcacttgtacccagcagcaagtctaacgccttgaaaacctaggaatgtcatattcgatgtacgaaatcgtatatcagggttaccatcgtggtgtgcagaattgcagg

SEQ ID NO: 194468 - DNA, 372 bp, Zea Mays
ggtggtcacagcaggtttcagtgcaacctaggcagaccatcttattgaaatttctcgccacaaataacgtattgaccattccccaaatgtttccttcctttggaaattgaccaaatagccattctcttgttggtcttatcaggtatatggaaactacaaactaactaacattaactaacattgttagtactttttttcttgcattagaatcaaaccttacaacttcacgctatcgaacccatttttgaatcattatctcatccatgaacctcatgttgcagaccatgcaactggtgctacctttgtgagataattttaacagtgttctcccagtcaaagtttcccctatcatgtctctagactctgctgcag

SEQ ID NO: 194469 - DNA, 279 bp, Zea Mays
tttgaaacgttgcaaaaggaatagttgtgctgctttgcaatttttctcttgggtttgtagacgtccttactacatgcctagtacgaaaacatacaatactgctatgaaacttgcgggttctgcaaaagattttaagcacatgtggtatctgtacagagaaatgttaaggaccggatgctccccaactgtggatacatggaatgtcatggtctgtcagtatggcaatgctggtctgtctgaaaaggccttgaatacattctgggacatgaagaagtgtgg

SEQ ID NO: 194470 - DNA, 738 bp, Zea Mays
atcacaatgaatattttccaacatctgacagtccacagagcattttggtttccttgtcaattgcatgccctctgagaggaattgtatgtaagcagtctcagctatttcgtataaagttctatggtacttttgataagccgcttggaacgtattttcgtgaagatttatttgttcaggtacttgtgttgtcatccataatctgctagttaactattatataggctttatagtaccttattatttttcatccactatattttcagacatcatgctgtgaatcctgcaaggagcctgcagaatctcatgtgcgatgttacactcatcaacaaggcagtctcacaatcagtgtcaaaactcttccatctgtgaagctacccggggagcttgatgggaaggtatggatgtggcacaggtgtctcaggtgcaaaccaaaagatggaattcctccagccacacaaaggatagtcatgtcagatgcagcacgtggattatcttttgggaagtttctggaacttagtttttcaaatcacacaacagccaatcgaattgcctgctgtggacactccctccaaagggactgccttcgtttctatgggtttgttgcttcttattgtatactattcagtttcttatctaataatgaccaacctaacagttagcgttctcaatcaaacaggcttgggagcatggttgctgtcttccgttattcaccagtagacattctttctgtcaacttgc

SEQ ID NO: 194471 - DNA, 634 bp, Zea Mays
gttcgaatgtttcatcctccaattcgtaagagtgaggaagcaatagcaaccattgcgccaagatacacacattctgtgcgtgtcttggatgagaggttcattaggatcctgaagatattcaagtggggccctgatgctgagaaggcgctggaggttctcatgcttagagttgatcactggttggtacgagaggttatgaaaactgacgttggggtcaatgtgaagatgcagttcttcagatgggctgcaaagcggaggaattatgagcatgacacatccacttacatggcattgatacattgtttggaagtagtggagcagtatggtgagatgtggaagatgatccaagaaatggtacggaatcccatttgtgttgttaccccaacagaactttcagatgtagttcgaatgctggggaatgctaagatggtcagacaggcaattacaatcttctaccagatcaaaacgcggaagtgtcagccaattgcacaggcatataacagcatgataataatgttgatgcatgagggccaatatgagaaagtccatcaactatacaatgagatgagcactgagggtcattgcttcccagacactgtgacatatagtgcattgatttccgccttttgcaaat

SEQ ID NO: 194472 - DNA, 593 bp, Zea Mays
ctggcgacggtgagctcggtttcacggtggcgaaagcttgaattgggggaaactccaaattcgagcagatgagtggacgattatggtcgattagcggtggctagttagctgacgacctcacggagctagtcacgggctcaatttataggagggtaagacggtggccgtgaatttttaggaggacgcgcggcggtcggaggaggaagaagggtactggtgcagtggctgggtgtccagcaccgtggcacttgctccggcgatcaacgaggagcaagggcgagtcacgggcgatgcggtggaaaggggcagacacgcggcgcaagaccgagcgacggcgatcaccggcgtgcctatcaccccaaccgcaaagcagaagggagagacgacggtgagtcaccggagtgacctccagctcatcggcggcaaagatcctttaccccgcgacgttatccatctaccccaagcgtgaatcctggcgccggtgacacgaatcacggcgaggcacatcggcggtgagatcttttgggggcgcagtcggtctgatcccagccgggtactgtaccatggcgatagccattcagtcaacctgacag

SEQ ID NO: 194473 - DNA, 346 bp, Zea Mays
gggaaagatgcgtgattaccagttggctggacttaattggcttatacgattgtatgagaatggtatcaatgggatattagctgatgagatggtatgcgataggtgttaatcttgattaagattatcttttactccattttgttgtgtttgacactttaactttgaatgtatgtttttttaaattgttatttagggtcttgggaaaacacttcaaactatttcattgctgggctatctgcatgagttcagaggtatagctggtcctcacatggttgttgcgccaaagtccactcttggcaactggatgaaggaaatccaacgtttttgccctatcttacgtgccgtg

SEQ ID NO: 194474 - DNA, 338 bp, Zea Mays
ggaatttggctctgcatcctttttcattgcctcaaacaagatcagtgcttgatcaacttcacacttcttcccaaggcaagtgagaatcgaattaaatgacacaacagatggaatacaacccctatcctttaactgatcaagaagcttataggcattctcaaactggcctgctgacccataacccatgatcattgtattatacgcatacgcacaaggcacagctctttctgtctccatctgaccaaacagctcctcagcctcacttagcttccctgccttgcacaacacccaaatcatgctcgtgtacgatacatcatctggcttgaacccttgcgact

SEQ ID NO: 194475 - DNA, 600 bp, Zea Mays
agcaaatcttgtaactgcaggtctcactaaatcaccccctatcttctccctcgtggcatcaagaagcttgccatgcctatatatgaaggttgtcacttggcgggcatgggaaatgcatttcttgaactctccaattttcccaatgtcctcaaacatgaggtccaaacagtgagcagcacatggagtccaaaacaagtgagggatctttctttctaaaagtcttctagcagccttgaagttagccccattatctgtaacaatctgcactaccttgtctctaccaatggcatcaattcttttctcacgtagtgcagctaacatctgagcatctgctgtctcatttgaggcattgacagactccaagaaaaatatgccagctggactattgacaaggaaattgatcaagtgccgacccctcctatctgtccaaccatcagacataagtgtgcaaccaaattcagtccaagccaactcatgagtctttttttatctcatctacactcttctttgccttctcaagcaatggcgccgtaacatcatgatatgaaggtttcccatacccaggaccatattgcccaaccgcctcaagcatgatctcaa

SEQ ID NO: 194476 - DNA, 768 bp, Zea Mays
actcctactctagtctaaatctttggatatattttaacctttcgagtctccttttactgcttccctatatcaacttcggtcttcctctcgtgcaatgagcggtaccgtttttcgacgacatgtgagaagtagcatcgaagtccatgatctagcctgtctgggatggttgcaccatgttgttgaacgccgcaatgagacctgtctgatcccattgtggctgggatggcgatcgctaactcgataaccaccgctcccgtgtccaccctcatgagcaccagtgttgccgacactggtgcagccgccaggagggcaaggaggtgaggaggcagccgcagcgagggccgtctcagagacaacctttgtctctttggcgagcatcgattcctttaaggcaagcatggattgggccttgccgaaggagggaaacggggtcaagttgatgatgatgtcgacggtatttgacaacatgggattgaacccgcaaagaaggttgaggacaagctaggtattagagaccccatggtcggtgtcgcggagagagtcggcgagagacttgacgtgctggcagtagtctgtgatggaggaatcgtcctgaacaatggtgtgaaactcgttgctgaggtggatggcgcgagattcttggttggtgtagagatcgttgatggaagtgttgaggtcgcaggccatctgatgattgcccatggcaagatcgagaacgatgttgtcgacggacatctagagccagctcttgatggcatagtctgtgtg

SEQ ID NO: 194477 - DNA, 901 bp, Zea Mays
cctacaaaccaaacactctctaaatttgtggccaccgtgaactatgacgttgcgatgtcttcaccataaccacgccatcccacgacctgaagacgtgctgtgatcgccaccacttctaacgctaagaagcaacgagagaaggaaaaactgagaaaaaaataggagctgtgcagggacagagcatgcttgtggctatacattgaagtgctcaatcgggctaaattgagcttcaaagaatatgcacacgtgatgcatagcaccatgtttatacatcggctggtataaagacctgggccggtccatggcttttagacatgtttggaagaagtggattaaaaaggttaaaatctctttctatttaattttgaataataagagattttagtccccttaaacccttcgctccaacacaccattagtgccaccacacatggtgctggtgcaaaatacgctcccgaacacgccttagtgccaccacgcatggtactgtgcaaaataatcatcagaagtacccgtatatgtatatggatagctgctatacctatgcctgtccatggtttcagcctactctatggttgtccgtgctacccggagaacacgaccattccacataaaacctttgccactactacaagcaaagcggccacataatcgcaagcatgcagtgctgattggcaatggtaatcaacatactaagggcatgtacaactctgaaacatcagttcacttttttaagtataaaatacgattaaaagactgtatgatacaatcctgagacactagatcagaaatacagataaattcgtgaagagacgggttcttcacgaagagtccgtcttttgtattttttcgcttagaaccttagactcctaaaaagacctcatattaaataaggttgtac

SEQ ID NO: 194478 - DNA, 717 bp, Zea Mays
atcctctctgtgctctacttccggagggctggatctaggagcggcgagctgacagtggagtacagtgaattacatcgtcagctgcagcactacttggtccacatccaggagaggctgcggtctcggatgcgagagaggagtcaagtgtgtgactctgtgcttctgtgaaaatgagtacagaagaggctgcgaagaagacagaaattgatggaagtggttcaggagggattacaaagagtgagatgatgagtgaaatgagaagtatgatccaggagctcatggggttagggttgataggtgctaaggccaatacaggtacatctgagttgaagctggaacttgtgcctaatgatgtgaagttagaaggtagtaagaattatctaagctggtccagaagagtgcgtgtactcctaggaggcaagggagtagagcattatttggaggagacatgtgttgagctgattgataagctcggcgcagaatggagaatctggcatgcgacaaactctgtgatagttgcatggttattggcatccatgtctcccactgttagcaagagggtggaagccatgcgtactgcatcacaaatatggaagaccttgagtaatatatactctcgaaaggggaatgtggtggtgatgatggaaattcagagcaaggcagatgcagtaaagcagatggggagaccagtggaacaatatgctagtgagctccagc

SEQ ID NO: 194479 - DNA, 402 bp, Zea Mays
cgcggatgtagagctgaaaggactctgtcatacatgacgatacgccctcgtgcacacccacatgtatgccctcgctgacttgaagggccagtcaaccccagtcgcaggggcctcaccaccggggttactacagtgactcgcataccgaaagggacgggacggtataccataccaggtgtatgcctacgcatgctcaaaagtggcgtaaggacacgacggaagacggagtcgcaccaaccacgaccttggaccccaccataagtctactctacgggacacgccaggcgccagagcatcagcatcgaacttgctacagggacttgtacaccggacgtatggaacaagtacgccataccaggagtatggaagcacacgaccctacagacggcgtcaagggggcta

SEQ ID NO: 194480 - DNA, 286 bp, Zea Mays
gttcaaacatacattccaaaaattcaatatgaaagaacagtacaccatgcagtataatatagtaaataagcagacgtcggtgcagggctcgcacctacgactaagcgagaaagagaaaacaatggtcgaggctacgatcgaaaggcaattatgttaagcagttcaggattaaagtacttgtctaaacataaccacattaacttgacaatcgcgctatgcataaactaaggttacgctacgtgtttaaatattataaacaattcaagctaaatttaaaaggttgtcg

SEQ ID NO: 194481 - DNA, 1174 bp, Zea Mays
agaagcttagtgatgagcttagcaaaggagtgaaccaagcttataggccgaaaatccttgacctggcaggcatcgtccttcttgggcaagagaaggatgtaggctgagtttagcagatctaaattcacccattttctgctccaaacagctgtagcagcagccataatatccccttttatgatctgacagcacgtcttatagaatttcccagtaaaaccatccgggccgggagccttatttagaggaagagataggactgttttccagacttcatcttcagtaaacggactgtccagcgatgtcagattatgggcagggatgtcaagctgagccaggtcaatggtgtgcgcccggtcaggtgaacatcccagcagcttgtggaagaaatcactgataacctccaacttatccccatgagatgtcttcaccgatccatcatcagaaatcagattgccaacaaaattcttgcctttccggtatttagcatggaggtggaaaaaggcagtgttggcatccccttcagccaaccatgagatcctggagcgactccgagccatagaacgctgcagcgatgagagggccacaatgcgaccatccagctgatccaccaaccacatttctaacaccgacaagggtctgaaatcttgagcagactgcaacttatgcatgatctcccttgccatcccaagttgagaggtaatatgtcccgtccttttttgagaccagctctgaagatgcttgaccgtggcactgaattttttggagagggtgacaaaagggcaaggggatgaagaaacagagttccaagcaacctccactgtcgacagaaaatcaggtgcctttgtccagtgagattcaaaatggaacctcctgcgcccaggagataaatcatgaagcccaaggagcagagggcaatggtcagacccgtcagtgctagcactctgcagaaggcaattaggaaagagttgttcccagtctggcgagcaaaacattctatcgagcttgacaagagtgggtggatcttgacgattagaccaagtgaatttccttccatgtaaagccaattccttcacccccaaatcgttgatgagtcttctgaatctgtccatgaggtgcctattaaaattgccagagctcttatcatcatccttgtagatgaggttgaagtcgccca

SEQ ID NO: 194482 - DNA, 399 bp, Zea Mays
caaatacaaagacatctccaaagtgcatgttgaagatggatgctcaataccgttatggcatgacgtatgggacaatagtattcaaagccaggcttaccctaagctatacccatgcaaattacaaagagatcaccttatcataggctagaatagtcgcacaatcctaagacatgttccggctgcctatgtagatggaagcatttcaacagttctagctcttgaatgatgctctacaaaagcatcaattcactggtgaccctgactatgtctagggaaagaaatactactctaaaaaatcctacacacatgatgggacacctagccaccagccaatcttcatgatgacgtggacctcaaaatacgaacctaaatagaaattcttcttctaactacttctcc

SEQ ID NO: 194483 - DNA, 633 bp, Zea Mays
ctattggacctcatgattgtgttcttggtggctagatccttcacagaaaaaccatacggatcaaattcaatggcacacgagttatcagtagtgaagcggcgaacagaaattaaattcttgactaagtgtggaagatgcaaaacagaacgtaaagcaaaagtgtttggcggggaacgaatagaggtatgaccagtgccatgaacaagaattttggatccatcaccaacaataacatgcgaagaattaggcaatgatgaagaataataaataggtaagttacccgaatggttggtcatgtgtgagctagctcccgtgtctagaaaccaatcactgggatgtgcttgctgttgaacagaagcagcctggagcgcgtgaataagccccgaagtgtcccaagacggagcatgcagcggcgcagacacaggttgtggctgctggaataccggataggcttgcgctggaggacgtgcaccaaggacgccagggccagaggtccctgtccatggggcgcgccaggtgggagcccagtgtgcaggccatggaggaagaaaggtcgccggagggtaccggccgctgcgtctagcagcgttgaagcgaccaccacgaccgcgaccacgaccacggccatagctg

SEQ ID NO: 194484 - DNA, 501 bp, Zea Mays
ctaaattagactcctgggactactagctaccctgaatccctgattctttgtgttttaactcaactctgcttgatgtcttgttccttagtttgtacctttttttttgctcttcattgctagaagtagatacgattttccactcctggggctccactcatccacagatctactctgctccatctccactcgtgcatgtttgcctggtttcctggcctctgctggcagcgcagtatccatgcatgttgtcctcagtgcctagctgatgtggatgcgagagtggagatggagatagtggatctgtggacgaatgcaactggattgctcctatggcctacaccctacagaaaatggtgtggccgtggttgcggtagtccgtgcaggtgtgtgcgatggaggtggagtgactggctgtgggatggggagtggagtggattggataaggctgcctggttaggtttacagattttatatgtgtttctctggttgctgtgttggtccagc

SEQ ID NO: 194485 - DNA, 395 bp, Zea Mays
ctgcagactcgggccatcgagcgttggtacttggctagggttttgcgagaggcagaggcgagaggccgactctctggcggccggcacaccacgcagggcacgacgcagtgcgcacgacaagcgccgagcagcgcagcggctgatggctgcgcgcaggcaggggagcaggaggcagtgtgcgtggcaatcaggcaagccgcaagcggcacgacgggctgggcgtagacgaacagcacggcggtggacagcgacgcgacgactccctagtgatttggttggtgagcctcgacgcttttcccttcctgcttcatatatagtatgaaattgatttcggtattgtttaattatgtcaactagcaaagtctatattcgttcaattaattgtattgccaaat

SEQ ID NO: 194486 - DNA, 641 bp, Zea Mays
caattgaggaatctaagtctgatctggaatcagagccatcaataaaacccttactggctaaaggtaaaagcagaatagtttttcatcttacatccagcatggcagaggcacagatattactgatgaatgaaaatggtgaccggcttgctactttatcacaaaataatctctcgactgatataaaggtaatgtgatcatctccagtttgtgtgatctattttgggttgatttgtttaatgcccacacgtgtatgactatctttggcattactgaaggtgttcacatcatcattcagcataaaggctgcactcggaaaccttaaaataagtgatgatagccttcttagcagccacccttacttttgggtttgtgatatgcgaaatcctggaggtcgttcatttgtggaggtattccatgctgtttgatttaacttgcttaatgtaggtcataacttattatgctttacattgttggttttagaaaagaaaccttttgtgaatcactgaagaataatcaatttcaaaaccattgtgcagatcgactttagttcatacaatgttggtgatgaagactattgtggttatgactatagccttgtagggcagctttcagaagttagaattgtttacctcaaccgtttt

SEQ ID NO: 194487 - DNA, 332 bp, Zea Mays
gggcgttgggtcccgatccgacagtgtggatttaatgcacatcgatctcacccgcgccacccgatctaacttcaatgccctggatcaattccccctgaaccggtaactcatgactaatcaaggccattgactctggatccgacgaccgagaatgactcgccccaaacagaccggaccacggcggcgcaccaaccatccacgacggagcactcgcccttccggtgacccactgtcgacgccccagagctcccaaactaaaattaataggtcccgacgcaaactataaaggaaagggagctgggccatggccttacccgcactggaaggtagca

SEQ ID NO: 194488 - DNA, 325 bp, Zea Mays
ggtgaccctgggccctggcagttcgtcctcgtcctccccgcgtatcatctgctctgcattctagaattgctcccggagtggtaccatgccatcttttaaatgcactgcacagggtagctggcgtgctaccccttagtctacggttgaagtgcctaactgcctatagtcatgggggtgattcatgttactactgtttagtctgcagcaggccagcagcggaggtgaagacgcgtgtttgctgtcgaggttggtcgatttggtatctctgtagcctgtaccagttcttggtggcctagtttgttggaatttaatttgatggtgcccc

SEQ ID NO: 194489 - DNA, 541 bp, Zea Mays
atcccagaagcttcctggtaagtagtgggttcaacaattgccacaccagctcgtgggaaaccatagcgatctggaggttcaatggtatcatgatcacgaagacgatatccctgattaaaaacatcgttagactcataattgttagtacaagaatcaggtacaggatcactatcaggaccagccgcaggaatagaccgggaacgacgaatgtaggtttggaacagtaagtagaggatgacgtggaggtggaaggtggtgttatggaaatgagaacatcagatgtggatgtagaagatgatggttcaacgataggaatggaaggaagacacatgaagtagattatgtgggataatatgaggagtgagtagattggttgtgaaagaagggacaattttcattgaaactctcatctctagaaattcgaatatgacgagtagatggatcataacaactatatcctgtgttcaggactgtatccaaggaatagacactctacagattgagcaatcaatttagtccgctcacgaggtggtaacaagac

SEQ ID NO: 194490 - DNA, 316 bp, Zea Mays
gtaaactgtttgggctgaaatctgatctttagagaattagaggacagtgaactatctaaacgaatgagtagatagcatccataccgtgaatagtagagaaatctgattgccatagtaggttctacttgaatattaaagaattataggtttaatgcagtggccatagtaggttctacttgaatattaaagaaggcaatacgaaagcaactcttatagtttctgccatagcaagagcaatgcatgaaaacaagccctacatatgcagattaatcaactacaattatgcagcaagggtaaaaaacgggttccagcgacg

SEQ ID NO: 194491 - DNA, 551 bp, Zea Mays
actataagtatcatcttgtgattcttgatgattgctctcactactcgtggacttttagttgtgtttgaagtctgatatgttccccacgttttctcatttcttcgcctaggtgtccacttagttcggttgcaccctccaggctgatcagtgtgacaatcggagaaagtttgataactcttctttcatgtcttcttcctctcccatggcatctagttccagatgtcccgcccctacacttctccccaaaacggcatgcgctccctacttttttaggcctcgattcttgttcggttctgggctaaggctctccacaccaccacttacctgcttaattgtcttcccaataaaacgatcagtgcttgcacccctcacactttgcctcatggatgctttcttgtttctttgcttttggccaccgcaaagggggcctttcctctccctgtactggtcctttatggaccttttcctttctcttcttaatataatgatatgcatctctcttgcgcgttcaataaaaaacctcactttgccttatttgactccactcctag

SEQ ID NO: 194492 - DNA, 288 bp, Zea Mays
taagcatcacaaagttatgagagtgctccaacgaagaagcaaggagcgtggactgaccggaaaaagggctggccgcagtgaggtgttcttcgcggcggaaaaccaatttgggggaaacgagaaatttgcgagctctagggggtgattcgaagcacgagttgcttcactggttgcgtaactacctaaaggagcgaatggtggcagcaatttatagcctctaacggcggtggcgcccaattttaccgggatgtgctggcggtcggagagaacaatggtactggcgcgtgg

SEQ ID NO: 194493 - DNA, 692 bp, Zea Mays
ttatattggaggtcttgatctgtgctttggtcgctacgatagtcctgagcacaaagtcgctgattctcctccagagatgtggccaggaaaggactactacaatcccaggtattttgttgttatcttctacccattcagatgtatggggcaaagtccctaaatgtcacttcatctctgtaaatagggaatctgaacccaattcctgggaggacaccatgaaagatgagctggaccgtgataaatatccccgcatgccttggcatgatgttcagtgtgctctctatggcccaccttgccgtgatgtagcgaggcattttgttcagcgctggaattatgcaaaggttgcttatatccttgtggtctgcttatcatagaaagcggtaaactaattgtttttttttctttcagaggaacaaagctctaaatgagcaagcaattcccttactgatgcctcattaccacatggtaattccacactacaagggtagaagcaaagaaacaaatgatgaggctgagggtaaacaatacaatgataaggatgttgatattggaaagccagtcttgacatcacgcacatcatgtcaggatgttccattgctcttacctcaagagcttgaacctcgtgaattatccagttcagatttaagggtgaatgatttagatattaaccattcagatcgtttaaacaagaa

SEQ ID NO: 194494 - DNA, 288 bp, Zea Mays
atcagtcaccacagtaaatttggaggaaattcgagttcaacattggctgtcaggttcatctgactgaaactcgcgatggtacagtagcctggattggatcaggctgccagcgcggaactctcaccgccgacgatacctccgccgtgattcgtgtcgctggtgtttgggttcgtgcgggtggcaagtagataacatcgcggggtgaaagtgcatcaccgtcggtgagctggactccactctggctagccgccgtgcccctcccctgcacactgatctttcggatagggt

SEQ ID NO: 194495 - DNA, 607 bp, Zea Mays
cggattcaatcaaacagggatagagatgggattcatcaatcaaggagatctcatggtattgtttccataaacctgagatctccctatctaccctacaaggtgctctgaggagactatcttggatgtccagcatatgttgccatgtgatattgcctccttcccctgcaaatatctgggactccctctatcccttcatagattatccaaccaactttggcccctggtggataagattgctgatagattacctaactggaaggcggacttattaaatagggcagggagaagaattctagtgcaacatgttctcactgggatgtgtgtttatactgctatggctattgatttccctatgtgggtcattaaggaaattgacaagataaggaaaggtttcttatggagaggcagaagagaggttaaaggagggcattgcatggtggcttggggaaaagtgtgtagacccttgaactttggaggtttgggaatttccagcctccttgagctctgctgggcacttaggatgagatggctatggctgcaaaggaccgaccctacccgtccctggaataatcttccggttcatgtcccaagcaaagctaaagccttc

SEQ ID NO: 194496 - DNA, 1059 bp, Zea Mays
agagtttctgcttcctgttgggattgttctcaaggtataacctgttgccatttccttaagaatgcttatcatttaaaacaagcaatatggtacataatcatgcattgagcattgtgtgtgcaatggcatgtgctgcatggataaaagctatgttacaaactagcttagtagcttatcgtgagttatacaggttagagcagtgtgcttactcccttgcctgtccacgttcggatcctggtacaatttcttattgcaacgtccagggggcatcttcccccctgtgttcgagttctttttatataagctttgtatcattggataccttttcatcagatgcaccctgctaatgtcgtatactcagtgtgcattgtataatcaataaagagaccttgggttctctgttgatgcattccattttttagctgttgaacttcgtttaactaaatatacaatccacaaacttattttgtcctgtgctccaaggttaccaatctgcttgtttaatagaatttatgtaatttagtatgtttctgcctctattctcatctactgttagactcagtctttccattgaagtaggtatcatgcaatttgtggacttgtgtttgacttgtcacatattatgcaaatcattatgcttctacctttgcaatattatagtttagttcaaaagtattgaattattgttaatgtagctttagcgttgcatttacatgatgatgaattaccaatgacaggcccttattgatgcaagtgaccgggaaatctttacaagcttgacttgctgctacagtgataaacatggaagaggaaagggagttgtcagtactcaactaattggtgaaagggcacaaatagttcttgacgaagtcagaaatctgtccattctgactcgcacacagtgtttggtgcatattggtacgttctgcgttttttttttctgtgcttaagatgccttgacaacctgttatgccctgacattgattttgatctttcaaatgcagggcaatacttccgatctgtgatggaaggatttgaaaatgatgactatataactgt

SEQ ID NO: 194497 - DNA, 292 bp, Zea Mays
agcaatgcctccgaaccataaaccatgaagaagggaatgtttccatgcaaagctcggctgggttgagatcttaggctccataccacatatggcaactctttgatccactttcctacgaacttttcattcttgtcaaagactttctttcttagtgcttccaatatcattccgttggctctttctacctgcccgttggctcttgggtgtgccactgatgcatatttgatctggatgcttttttgttcgcagaaatcaaagaactccgaactagtgaaattggatcccaggtcgg

SEQ ID NO: 194498 - DNA, 388 bp, Zea Mays
cagtgcaggcagcagtcagtggaaggccaagaatcaacaccgttcagatagtggcagtttaggcagtgtcagtaagggaaaattcacttcccaagggacaccgagaaggaagggtagatgcagaaattgtggcatatatggacactggagctaggactgtaaacgtccaaaaaaggataagaaggagcagaagcaacccgaggtaaatgttgctgttgggacagaaaatgcagcactcctgctgactgaagttgaagagataaaaagtttgtcactacagtttgttcatctatcagaaaacagagtggtgcccatgatttgtgctgctgatgagtgggtactagacactggagctagtaaccacatgacaggtactcgatctgctcta

SEQ ID NO: 194499 - DNA, 812 bp, Zea Mays
ttgggctggacatttgtgctgacgttattattggcgatgagatgatcagaggaatttctggcgggcaaaagaaacgtgtgacaactggtatgcatgcaaagtctgcaaaccatgtgcccttacgcagacctgtgatcaaatcaccaatttatagttggaaccctaattcattgcaaattatctcaggatttgtctattcttttttcccttttgtgcaggggagatgctaacggggccagcaagggctttatttatggacgaaatatccactggtctggatagctcgagcacatttgagattgtaaagtttatgaggcagttggtccatgtaatgagtgaaaccgtcatgatctctctgctccagccaccgccagagacatacaatctttttgatgacataatcctgctatcagaaggatacatagtgtaccatgggccgcgcgagaatatcctagaattctttgagtctgccggtttccggtgccctgacaggaaaggtgtcgcagactttcttcaagaggttacttccaagaaagaccaacaacaatactggtatcttgatcaggagcagtatcattatgtatctgtacccgactttgcagaacgtttcaaatcattccatgcatgccagcagatgcagaaggagttgcaaataccttttgaaaagtccaaaactcatcctgctgcgttgaccaccagaaaatatgggctttccagctgggaatcactcaaggcagtgatgtcaagagagcagctattgatgaagcgcaactctttcatctatattttcaaggtcacccagttgatcatcc

SEQ ID NO: 194500 - DNA, 308 bp, Zea Mays
cccaccgcttacatgagggtctcgcccgtcagcttctcaaggccatacgcgtgcaaactcccacagacgcgcgcccctgtgtgggtggtcatccacaaatcgctacgactaccgcatgggccgacacagtagtcacctaccatatatgtgcatcgttgactcgtgggaccaccttagcaggcgctccatcctcaaaatcgggctggtctccataaccgaacgccctgaccaccggagatcctctagccgaacaacacatagaaacttgagatccttcacactatcgccttctaacctctactatgagc

SEQ ID NO: 194501 - DNA, 462 bp, Zea Mays
gcatgttcaaggaaaaaatcacaaacaaaaaaatactacttacctggagagaacgaatgaaggaaagaagggagcaggaaggcaaaaacatttcaaaagctctaagtaatggtagaaacagttgttgttcgcaaagcactgctaccatgtttgataaagatgcaagcctttcatcaatatcaacggacattatggtttctcctgagattggctttcctattccctgatggtcaacaatactgataggattggaagttgcagcagaatctggcccacatgtgctatctattgagaaacataacttttcatgtgacgcttccaggaaccgtcttcgctttggattcttcctattgtaacgaaattcaacatttctgctagtgcttggcaatttatttgtggcttcaacagcagatccaacattctttgctattttcaaggaaacatcatccaccttgatcgagg

SEQ ID NO: 194502 - DNA, 333 bp, Zea Mays
caggtgctcaacaaaatcgtacacagggaactgtagcatcttgttcagcatgtcccatcaatgtacagtgcatgagtatttataggtaaccaggttggtgggtgtgcccttttaagtacaattatgcccccggttacctgctacagacttggaatattccccccctacagggtcattacaacgatgttaggtacagcctgatcaaatacacaattaaccctaacccagggaggggcttacaaatgggactaatgacagctggacatggcatgggccccaccattggaacccgtgtgtggtacccttcaccctgaggcactgggtcttcgatcc

SEQ ID NO: 194503 - DNA, 769 bp, Zea Mays
gttccatcaattaatgcctctttgacaatttgagcctcccttcctcttctccactggtttgcgaccctgatttgtgcctcctctggtcctccctcttctctgctggttcccatcttcttcagcccagcatcgcaagatcgtgggacaggtatgtaagcatctcttcctctcccttgggcttctctcctcttggatgtgcactgtctctgctctttacttggatatgctctgcagtcggcagtatgcagtctgcagtgctgcttctgtttctggatggatgtaaagttgtaaactgctctgtcttcatgtgtttgactgctagatgctcagagtttgtgattgtggtctattttgcactagtagcactgctcataaagttatattatgttaatagagactaatttattgctactgagagatgagagagctattttgctactttatgttgtgtgctagcactctagtagcactacttattatggtattatgctaaaaattagcaatataaggcacgattttcttctgaattttactggcattattgtattaagatgtccatatggagtcacctcaccatgcgccctaaatgcctggtggactcaaatgggcccattgttgcagctcgacttaccaccattaataaacatggacataccaaattacaaacaaaaacacagaaacaaccatccatgagacaataatgcagactatacagacatgagcatctaattactaatgccttgggtatcagacctttaggacatgtttg

SEQ ID NO: 194504 - DNA, 314 bp, Zea Mays
tgtcccccacgacgtggcccaacctccgagttcgactctgagcaggtgaaacttggatcacagcagctgctctcgggggctcatcaggacgtcttcaatcctatcctaggtcaactccctcacgtcacctctccttatctgcatgttgtttttgtttctcctatctagaatacgtataagtctctggaaatgttctatcatcctgtgtctctcaagccatcgatgccaaggccctctccacgcttctagcacatgccagctcctagaagtctccctacgtcctcgcgtggtggcctcaggctgttgaacgccag

SEQ ID NO: 194505 - DNA, 562 bp, Zea Mays
gggtaaagaacacattctatatgcccctgacatgaggttcagactgcaaaacccttactgtgacaggagagttgagagtaacacccaaagtagtgttgtgagctctggttttatctcgtcgatctcagcatcaatggaaagacatccatggatgaccaacagtcaacagttagaacaaggaaacactggagaaccatcagatctcagaaatgttctcttgaaatctcttgcataccgtcaccctttgttcaatgacaacacaaacatggttttagtgcatggcaaaggccaggtgccaggttttgttaatggtcatgggggttttgattttctcccagaaggtactatggtattcaagggtaacctgtatggcagcacagcaaatcaaattttagaccaaagatgcagttctacttctgagatgtcagggcacagaccaactatttcatacaaaatgccccaatctacccaatgtgttaggaaaacagagtctccaaagagagagacatgcgaaacttctgctgctctgtcatctggctctgatattcaggtttctggtggc

SEQ ID NO: 194506 - DNA, 429 bp, Zea Mays
cgggaatggaaaatacacattgccatcagcactttacacattaggtaaggatgagatgacatggttatgcaaatttctagaaggtgtgaagatgcctgatggttatgcctctaatattaagaggagtgtggatgtgaacaagtgcaaggtgtctggtctaaaaactcatgactgtcatgttatttttcagaagctattacccattgcagttcacaacattttgccagaaaatgttgctcttccattgattcagcttagtaggtacttcaacgttaagcgcagcatacaaggcatacaatagttatgctgaaaggatgaaaaacaagcctgaagatgtagacatcgtcgagtggcattacatgatgttgtattttggatctgagaaattccaggtttgctgtttcatttcctttactttaacgattggca

SEQ ID NO: 194507 - DNA, 306 bp, Zea Mays
ccttgactgtgtacctcatccatatcacatccatacaaccaagtgacacaacagggagggagtgatcttcttcagtttctcaacctaaatctgaatttacttcaccggtcctgctgctcccctttctctcctcactgtttagtgcccttttatttcacagattcacgtggcaagagacccatttcctttaaccaaaaatgttctctaaacatagctcttttactttgatataacactcctaggtcgaaaatacttgaaacagcagctatggtgcaccaaagtttgagcaagcactgaaatgtccaa

SEQ ID NO: 194508 - DNA, 450 bp, Zea Mays
gctggacctgtgctgacacgagtgcagccacctgctcccggtagttcgctgcaaggcctcgcagcaaccggcacgctgcccgtctgagcgtatctgcatcgctaccctcagagtcacgcctaacatattccacccaattgcactcaaacaactcctcatcctcatcccgcaggcgcaagttaggcacaacaacactatcacatatctgcttcattgcttcaggactcccaaataaggcatggtgcacactctcagcaactgtagtcaagaaccttatcgcagtaacagcaagctgtgcacgggatggagaggtggtctgcgccatgaggagcccccacacggcctcaacaaactccttcaggtatcccctaaactcctcctcgtacttctccatataaagctgcaggttatcacagacagcagcacggagcgcatcaggggcaccatctg

SEQ ID NO: 194509 - DNA, 321 bp, Zea Mays
cgagggactcctatgcctccgggttagggacacctcactcatcacccgccacgaaaagtgacccctactcgggaagccaccctgttactaacaggcaaagccggacacgcaaaataaaaggaagaggagtacgacttcatgcaacggaaacaaagtgttcaggcctcagcggccgcagaaagacacatgcgcatccaacagaaactgttccaacagagttaggcgtcgccttgggaaggagccgcggcttcagcttcgtccccgccttcggcaaagtccatctcggcttccggcgacggcgcaggtgggaggatctccgcc

SEQ ID NO: 194510 - DNA, 425 bp, Zea Mays
gtgaatatgactagaatgttggccactactataggtcactaaatgggattctctcttcttaaagaaagtgttggctatcaacatgtttaaagttaccgcaaaatccaagactttctctccctccagatttctactaccctatctaaaacctctatgaactgcctcgcaacctacacttgttgtacctacatgtccatcgagatctcctgtgaaaagcttttcagtagtaggtatagctccaaccttgccatctaagtgttcctagaaaattctcttggcactctcatgctcttagcactctcatcctgtcctactttgagggcatacacattaattacgttcaagaccaaatcacccacgacaagcttgactaaaataatcctatgtatcttgccttgtcacatccaccataccattcttgaggc

SEQ ID NO: 194511 - DNA, 1331 bp, Zea Mays
ccaaagaatgcctctgtgaagttaaaagctgtgaatgcttctgctattgttgacacacacagacatggaatggctcatgctatgcagcctgataatgtaaatcttgtggagcatctgcctgaaggcaatcaagagagcctctccaaagagccatatgacgtgaatgatgtagtagatctgtttcagtacaagtgttcagagtatttgactattgctgttgctgaatttgatgagcgggaaatttgaaatctactgcacagtcatatgagaactgggtaggcagatcgagtagattccacatttctcgctcatcaaattcagcaacagcaatagtcaaatactctgagcacttgtactgaaacagatctactacatcattcacgtcatatgactctttggagaggctctcttgattgcctttaggcagatgctccacaagatttacattatcaggctgcacagcatgagtcattccatgtctgtgtgtgtcaacaatagcagaagcattcacaacttttaacttcacagaggcattctttgggccctcaagatcaatatccagatctttgtgcatacctttctcttgtagcagcttaagaagccgaatctagcacatcctcatctgtttgacgtgtgacatcaattttttctttgctaaacgaatctgatcatatccagtagtaatgcactgaatagtattcacaacgtccaagagagtagctgtcagctcatctcctgaaataatctcaatgtttccttctgcggtagttcttttgccctcaacactgagcttcttgttgcccataaaatttctaactttcagtgggacattcgacgctttgagatctttagtgacattactaacttcagatgtcagcgcctcatctcctccatcttcactgcacacaatttgcttatttgccctctcaccatgagcaccagaatagctaattagcataacatttgtactgcatgacttcatgaagtcaaagattttctcttcaatcgtcaccatgattgcattggctgcagcactctgtccacgtgccgggcactgctccctcaaaagtcgatgcacttcgcagtacattatagagatcaaaagcttcgggaagagggttcgaccatatatcacacgataatccttgacaataggcaactcaagatacttcaaatgcagatcaagtgacttgggtagcttgaagattgcatcccttacaacatacttaccctcaagagccttgaagagcttcacgaatggtttgtagcaattatctatttcagactcagagcgactcatgttcagtgatctgaataccagtaaatccaac

SEQ ID NO: 194512 - DNA, 350 bp, Zea Mays
cccttgactcaacccaaactcttctgaagctatctttcggatgcatgtcgccatcttcctccacatgatatttgcgtcttcctctcctgcccaagggccctcctcgataactctcaagctttccgaaaaaaatctaagatcgtcaaaatcagagttcagagcctagggtatgacatttttcctaaggtggaaagtgtggcgctttcaagctgcagaagtgccacgaatttacgtggcaatgttgtggtgcggtagtgccacagttggagaattgtcgcaatctaaaggtcataacaactattttgacttccaatggttagttttaggagtgagagtaaatatcctcatcc

SEQ ID NO: 194513 - DNA, 363 bp, Zea Mays
acgtcatgtccctacacctcgcctcagaatggaagagttgagcgtatcattcatactattaacaatgttgttcgctccttgttccaggctagcatcccaccaaccttttgggttgaagccctccacacgacaaccctttttctcaacataccgccgaccaagacgctccacttctccactccccacttccctctttaggacgacgccttcctacaaacaccttcgcgtctttggttgcacccgctatcccaacctctccgccactgccagccacaaactcgctccaagatccgctaagtgtgtcttccttggctactcggctaaccacaaagggtatcagtatcttgatctccactccaaccg

SEQ ID NO: 194514 - DNA, 442 bp, Zea Mays
catcgatcaagtggacacagacttgaaaaataaaaattgcttcatgaggggactaaatgacagactcaagcgcaaaatggctacgtgtctggatctcacatatagcagggctgtcaacacagcactatcagttgaagccaataatgcgggacaaggaaagtcaaaaggatatgcgggtgaaagatcaactcagggacctgaaaagaggacaaggttggtaatccaacctttcaatttcaaattgtttttctcctcgtctgcctacataacccttcagacaacctgtgttcattcgtcccactcctgcccccgcctagaacaatcagtcaagtgcccctagtgctcgtttccctgcccttcccagttcctcgagtggttgcttcaattgtggcaagtctggacatttcaccaaagactgcccctacccgaagcagaacaaatc

SEQ ID NO: 194515 - DNA, 342 bp, Zea Mays
ctagtcttcccttgaaacacaataccatcaacctatccctgtcaaaatacaacaccatccttgtttcacgctcgctgtcacttcctttctagtataaatgtctaaatgtccttgtttcatatttgccctttgtgtatatcatgaaccttgtgaaatcttgtctcactctccctttttcccctacctagatgatgaatcccaatgaagataaagtggatgaggtcaacgacatgattccgaccccaatagtggtgaaaaggaaggatgagtcacatagatatctgctgaatggaatgaagaacaacaagaggaccagaaaaatgtttgggtacaagattaaac

SEQ ID NO: 194516 - DNA, 460 bp, Zea Mays
tagactgctgctatgggtcccatgtttgaccggtttgcctggtggtgtttcagttctactgtgtccggtgttttttaattgcagcaattaacgttgttgggttccacgcatgtgtatgcacatgcatggtttgcgccttttgggagttcctgcttgtcctattgctcctacatcacctgtgatttcagagaaggctactgacgagaaggtgctgcttgcagactatgatgatcgaatgtccccttatgagttatgactcagtttagtgcttacaggacttggttggatgaggatgtctgtgcccgtgctattcttgcctctagcatggaggatcgttttgttgctagagagatcctacaattgatgagttcttcacttagatgtatactatttgacgtcaacttgatactcttggtccccagttggccagttgtcaccgcatacttgtcaggcttgttag

SEQ ID NO: 194517 - DNA, 283 bp, Zea Mays
gccaatggatctatcagcgcccagatttcctaccaaatcggatgcctaccatcggtgagagacatgcgagcccaacaaagccatgtccagaagggaaagcaactgttggcttgtcttactgttgagttgatggttcagaattattcctcgaaatagtggattagtggttgtgattagtgtgccttggaggcagaatggtgccatcatttactaccaaaatgagcagggaaagtaagaggactgcaacagatgaatctggtaattctgaacttgtgtgggtggg

SEQ ID NO: 194518 - DNA, 533 bp, Zea Mays
aagacagtaaagttgctggagattcgggcaaaattgattatgaatatttttgtgattttgttgaggaacagagggagattccttgtgtacaagagatttctggagaaaacagtcgaatgggtgagaaagagagagaagaaacctcccatgaatctcctcaactagagattgtagaatgtgtgcaagacatcgttcttagggaaacagactatgatgttaatcaaaagatagtttatccagcagtggaggatgtagcaacttccgatagtatgagtacatctcttctgggtgttcctgaaccagaaaatgcagaactcaataaacatccttatctagcaattaaagatgaggaagatatacccatggaagctgcacgaggagaagtagcagaaatggaacaaattagtacttctgcaaagggaggtgccgaggagcatggggacttttctgaacttgatcacatgggccgagcagatgctaaattgcatttacacttaaattctgaagtgcctgagaaaattgatgaaatagag

SEQ ID NO: 194519 - DNA, 339 bp, Zea Mays
caaagggtttggtgttgtcaggctgagctagcatgggtgatgttgtcaaatgctgccttagtgtatgaaaggcatcctcacacttctggctccattcatacttgactcctttctttaataattcagtcattggcttggcaatcctggagaattccagaataaatcgtcgataataccctgccaatcccagaaaactacggatctgtcgtactgtggtaggaggtttccaatccattacttcttgtactttttcaggatcaactgataccccatcctgagagatggtgtggcccaaaaattttatctccttcagccagaaatcacatttggacagcttag

SEQ ID NO: 194520 - DNA, 274 bp, Zea Mays
gttggcggaggtatgacccgagcctgagcagagggggagctcggcttacagctgggtggcatcaatggagaagaagctcctgcgcacagaggtggtcaagcaggagatgggcgctggcttcttgctgccggagaacagggggacagagggaggcgactatggatggcgtcgagtgagtctggcaacctgcagggagggatcgagcccatggaggagcaggggcgtcggcaaggggctacaacaatggagtgctcggccttggtcgagctccaag

SEQ ID NO: 194521 - DNA, 407 bp, Zea Mays
ggtatccgcaaacctcggccgttggatcaccagccgagggctcggattagatcccaacccaccaatacacccgagccacggatcgcgagatcaacggccagaatcaatcgcgcgaaggggttatgtgtcatttaatcctggctgtctacgcggagatcaacggccagcaccagtcgatcaccaacttctaatcgcagctgttcaaatcagatcctacggtcagcaagactcatccccaacctccagccgagctggacgacggcgcccacgcgagaccacggcggagccacgccggtgaagtattgccccgacaacccaacgccccagacaaaaatccagggagtgcaacgcggtgtgcatggcatggagattacaatggatgtctacataccgtgattcgggcagcg

SEQ ID NO: 194522 - DNA, 313 bp, Zea Mays
gaaaaaccagtggggtcaaactcaatggaacaagaattgtcggtggtgaaccgacagacagaaaggagattgtgagtgatgtgaggggctacgagaatgtcgttgaggtagaacggtccaggaagaaccgaggcaccgactgaggtgactagaagagtgcatccgttgccaacgacgatcgaggtagcgtgtgtggaaggaggtgggtaggagtgagataacatgcctgtagtgggagtggtgtcgtaggaggcaccgaagtcgatgacccagtcagaggatggtggatccaacaccatggtgctgtaggcag

SEQ ID NO: 194523 - DNA, 455 bp, Zea Mays
cccgaatctctcgtcctactgcggctacccaaccctggggtcgatgcgaacatgctagaagcgaaattaccgtggattacgccgcgacgttcactggtcacgggcggcggcggaggatgaagtccggtgagcaattcgaagtcgcgctagtggtcgaacccgcacgaggatctcacgtgtggactcccagtactacgacggagctccccgacacgatttatgggcttcagcggtgacagaattgaatatgggccgcggtggcgcacaggcagatcacacggcggcagaggtggctatgggtgtgctggtccagggttacgaaagtcaaggtggccgcgcagagcttcactttataccagaccaaccatcctccccacatcccccgtgagctgagcatcatggaaatccgttggtcaaccacccgcgccgagacccccgagagtaagatacacagg

SEQ ID NO: 194524 - DNA, 361 bp, Zea Mays
tggaccaaaaggggttgcgttcaaacttggctgttcttgtctgtggaatggagactgggcatctcataaggagaatgacaacgacccagtaacgatagctaaagtttctatcagcccacttgcagtttccatatccaggttcttacgtatgaaaactttcgatttgttttggtagttgaatgtccaacacaataccttggactaacttgtttactggtgtgtttggttgaagagcgggggagaatagagtggtttcattccatatggaaatttactataagtagttggaacgctcccgcttcacaaaaatgaccggatgcgagcgctctctcggatgtgagcgctcaccctcctcttctct

SEQ ID NO: 194525 - DNA, 379 bp, Zea Mays
acagcttcctcacctcctatacaagagctgcaaaagcaggaagcaagagatgatttagttattggtggagaagcagacttaattggtaaatatgaggttcatgttcctgaattgcatgaaacacacacaatgctgaattctgtttctccatctagcaaagttagtacctcagccaaactcgctcggttgctttacaaccttttataacttaattaatttatattaaatggtctacaggtgtgcacagattcacgcaaggtgttgctcagaactatgtcttccccaactcaacaaaagtgtgaaaatcaagaagaaacaaaaaacactatcagtgttaaccagactgacaccgcatacaaatatcctacaaccaagccca

SEQ ID NO: 194526 - DNA, 278 bp, Zea Mays
tgggttcaagtgtggaaaatcactaccaggaagatggttttcatacttgatctcctatatatctggtcgagtcgccgcatggtgttcatgatctttttgttcagagacgttctgctaggtctagaggcgatttttctcatgctgctcggcctcaagtagtgagaccacatggtgctcatgcccgacggggtgctggtcttgtgccatatggccaaggaccccatgctaatggttttggttcccacttctctagcagattacagtttcctactcgtggt

SEQ ID NO: 194527 - DNA, 282 bp, Zea Mays
cgccgttgagttcgctcgcgattcacgttcagtttggttcccacgcaaacaggaaagcatcgcaagggcaggtgcgttggggaagagagggtgacgcttaccggtgagaaagcgacggggagggtggccgtcgacgctgcgtgcgccgccacgccgtcactggtgtagtcgtctctttgcctcctccacgccagtgctgcgctgtctcgtcgagatcggatccggaggtcagtagaccaggattcatgtcgggccgttgtggaagagaaaacttcaaaccag

SEQ ID NO: 194528 - DNA, 372 bp, Zea Mays
ctcctgggcacggataggggcattcgaggcggattaaggcatcctggccggcggcggtgagctggcattcaagggcggcgacagccgcacactcctgctctcagacaagggcgacagcctgagcgcgctgtcgggcggccaccaagacagcatgggtggcggctgggaagagaagcagttgagagtagtggaaggcgggctgggcagcagctaggagcaggggagagcgggctggacagcggctgggaggagggccgagggcgggtgatggaggagggccgacctagctggcggttgagaggagggttgacgagggcggctgggaggagggccgacgagggcaacaacgtccttggtggcagggtggggagg

SEQ ID NO: 194529 - DNA, 1120 bp, Zea Mays
ttgcaccggtgtccaagaagtcggtctgggatcggctgggctcgacgattgcgcatagcgatcggttagaccttctgtcttcgtcttctgcggctgcggcgcctgagagaatcccagtctggaggagaatcacccctgtcagtgatgcttcgcagcgtgccgaacctgctgtgctgactgggtcttctgaaggtggcccgactattggtggagaggctcgtccggctaagaggcgtcgtcgccgacaacggaaacgaccattggcacccattattcatgaggatgcccagttggcgccggtttcttccccgacccacgattctgcttcacctgtgctggaggactcttccccaccttctttcccttgtatcattggttggaaccagagtatgtcgcgggcggaggaagatctcgctacggcggttgtcatcactgtttttggtaatatggaagttgtgtctgccaatgatattgcggcacccctggcatcacgtctggaggttgatgaaggatccctggttattaggcagctctctacttctttcctgctgatgctgccttcagatggattggtgcaacaattgtgtggaagatggtcagttgtgcgtgctaattccttctcactttcttgcaaaagatggtcacgcctgatgaattcctctggaagcacccttgctcagttgttagaagttgaactggatggcatccctgtacatgcctgggaagtacccaccgtggagagtttgctcagcccttttgcatggatagagagtgtgcatgaagatacattgcaactaagaaatctcagcagcttccgttgttctgtttggtgtctggaccctgttagcatacctccggctagagatctttgggttgttgagcctctgcaactgggtattagggatggttctggtgtcagatcactggtctatccggttaacattcggtggaaggctgctgctgacactgaaaattcagctccccgcccccctccatcctcagtgatcactcctgcagaacctcgtcgtcatttgcgctcccgttctccgccggcatacagaggtcagcgtagtggagcttcctttggtcgtgctcaaggcacagatcactatgttcaggg

SEQ ID NO: 194530 - DNA, 633 bp, Zea Mays
ggtctcattgttggccttctgaattgttggcaaatagcacttctaactcttgccactggacccttgattgttgcagctggaggaatatctaacatattccttcatagactggctgaaaacattcaagatgcatattccgaagcggctagtattggtgaacaggtgctacctttattcactgtgcctatctttcttttgaaacttttaagtatacaacaacctaagccgctatctgatacaatgtcatggctgccgtatctccaatctcaagagtgctgtatcagagggcactattctgcactgatgactttgtagattatactatcattctggtttgatgtgcgattaataagtaaaaatatgcctggttctaatgtgacatgtgcatgtacaggccatctcatacatccggacactgtatgcttttacaaatgaaactcttgcaaagtactcctatgctacctcacttcaagccacacttagatatggaattttgattagccttgtccaaggaattggtcttggctttacatatggactcgccatttgctcttgtgctttgcaactttgggttggaagacatctgatccatcgtggaaaagctgatggtggtgaagttgtggtagctttatt

SEQ ID NO: 194531 - DNA, 286 bp, Zea Mays
gcggacgtgaaggagaacaagatgacggtgatcggcgacatggacacggtggccgtcgccaagaagctgaagaagctcggcaaggtcgacatcgtctcggtgggcccagccaaggaggagaagaagcccgacaagaaacccgaggagaagaagccggaggcggcggcggggaagaaggacgacaagaagtgagcgccgaggccgtctgaatacgtttccggctgatttggatttggatggactctctaataataatgggcccaatacatgatatagaacattacag

SEQ ID NO: 194532 - DNA, 333 bp, Zea Mays
ccataatgccgtgtagcctcgcccctggacgagcatgccctgacccgctcatttgccaactaacccgctcttaccgccatccaagctgcgggagttcgcgtgccgccgtcgcgcgtccactgggaagcagggagtgtggctgggctcgcacctcggcaagtgtcgccgtgcgcgcaacggaattgggggtggccggatcttcaccggaccggaatctcggcgttgaacaacgctggcgccaggacctcggtgagacccatccttccacctagtcgctgctatattactcgttcatgccgatagtaccttctgggctatgatgttggggaccgg

SEQ ID NO: 194533 - DNA, 453 bp, Zea Mays
caacctttgcccgcctcatctgttgctgatgattggactagaactatgatggaaaaggtctataccttagctgctgaaactgctttgcctgttgatgactataaagcgtggtttaaaagtttctctgctgatacagttctcaaagggatggataaggtctgtatctgtgttttcccactctttgcatattctctcttaagtctaaccatgtgcaattcatatattagccgtattaaccaaattaatattgccactacagaaaaccaacttgttctcactcaccgcacagtttttttaacatttcagtttttttctctaacattttcctaattttcctttggtgtcttatcatttttttctcagaactgtaacatttgcttctttattgttgcagttatctgacttcttatttgggcaattggggcttgtgtttggtagtaatgctgtgatcac

SEQ ID NO: 194534 - DNA, 308 bp, Zea Mays
gtttcaggtacacgttccgacggcgtgtgttagaggtgaggtcaagcagacgcctctgcggctgcgctgacctgaatacaatacaacggcgcgtcagcgtgaagccacaagaggaaacgctcctctcgcccgcagcccgctcacaccctgtccagtccacgggaaccgagccatgatacatagatagctgacgagaaaccgatcagatcagtctccacgatgcgtcctggcacacacgtactagctagcatcattggtatggtatatcttcgctgatcatcattgccttgctttgtctgcacctacgc

SEQ ID NO: 194535 - DNA, 390 bp, Zea Mays
ccctacacctcatctcagaatggtaaagctgagcgcatcatccgtactaccaataacaccattcgctctcttctctttcaggccagcatcccaccaaccttctgggttgaagcactccacacggcaacacttcttctcaacgttctacccaccaagacccttcatttttctactcctcacttcgccctcttcaaaactgtaccctcctatgaacaccttcgcgtgttcggttgcacttgctatcccaacctatctgccaccactagccacaaacttgatccccgttccgctaagtgtgtttttcttggctactcgtcgcatcacaaagggtactggtgtcttgacctcctatccaaccgtgtcatcctttcccatcacgttgttttcgat

SEQ ID NO: 194536 - DNA, 383 bp, Zea Mays
tcaaagcttcacataaatgttgagggctctactagtgctaaaaaaagctagaccggggatgtttaagcttggttaagtataaatctaaaaaggggttatggaaaattaggttggggaggggggcatggccttgttggcctcaatgatggtcttctagtgatgatcgccaacagaccaatagaagctagctttgagtttgacgaaagggttaagaggatgagaaattgctcttaggaagcaaaacacacaatgagttaatcaaccttgttggcctcaatgaaggtccactataatggggtcttctgtaatgggcttaggcccatcaattctattataaatacattacccaaccctggtttagggtaagggtttgagttccaata

SEQ ID NO: 194537 - DNA, 456 bp, Zea Mays
tatcagatccaacgtcaagtgacattcagagatgagagattgcctggatttctagcaaggttcatgcaacgtcgggaggtggaaatttttttttgtcaacctaaaagtatgcttcttattaccaactaggactacatcccagttaggttcagactctgtaaacaaaggccaataccctgtcagcacagctcacactactccaggtatatgcacaatgttaccagtgaagtataatttcagacaggtatatgcacaatgtggcacctgatagttcaaagaccatcatggaaaaaatcagtgagtatgacgagaccctgtttttcttctacgaaacaataggttctgatgcatgtgtgatattgactatgctttagatattagttctttagttcaaagatcacacattcttttctgatagttttgacatttcatcgaagataacttttttactttgtt

SEQ ID NO: 194538 - DNA, 594 bp, Zea Mays
cttccaagggcataagcttgtttgcctgcattgataacttctcaattccaactgatgccagaccatgcaatacatccataatcccagatcccatctccgctggcagtacaatcggagaagaagcctgcataaccaagctgcagttgttctttgcatttttgaacagggctgggttcattgatcgcagaaatcctccatctttggtctgaataaatgggcctaaaccttcagccaatggcggtagctccaggggctgctcaggtgggaggctaattgggctaccaaatccacttctactttcaggtggagaagattggaaggacttctcgtttagaccaaattgacgcattaaggcctcagtttcttcgtcttccagcgacttagctcgaaatttggtatcaatgggttggcttccattctgaagctcgagctcagcctcatgtatcattgcagagagatcaaaatcctccacaacattaccacaaataggtccttcaattccatcgtcaaagtccaagccaagaatagcattgccagatgctagggcttccttttcaaactgcttccaaagccgttctcttggcgactcggaat

SEQ ID NO: 194539 - DNA, 333 bp, Zea Mays
cttttatggaggcttgcaaggacgatggactcgaccggacgatgagtgtagtttatataagccaagggggctcagtatcgtaaccccctcctccgatttgtctggcgtctgttacaatttttgctgcaagtccggcttcgagaagcccctgatgcaaatgttgtcccacttgccagagataatgcgcgtacacatttggccacaatccgtgaaaacaagcttggatgagatcattcatgaggtcaccatgatgcaatctccggcaagggaataaagaaataggaaaaatatcacacatggcaaagacgtgtgggctggctagagccaagggaa

SEQ ID NO: 194540 - DNA, 449 bp, Zea Mays
tgcactagggaaacggcaggggaggagccaaccccgccttcttcacaccatcgctcggacttcgaccgtccaccaggcagagagacaagaggagagcctcccgacgccgaggaatggaagggggtggacgccgggcttggagtaagcgccggcgtgaggccgagggaggtggagggagctaaggcgttgggaggaggggggatgctaagaggcaggatcagaagtgtcatactgtaacaatcacaagtgctaagtgtaaggtctttatatggcttgctataaacaataaatgttggacaacacacagagtacaaaagagaggacttgattatcctgaaagttgtgttctttgttaccaagaagaagaaactgtgcagcacatcctaacaaattgcatttttgcaaaccttagctccaattggtctttctattgtgatccctgggtcagg

SEQ ID NO: 194541 - DNA, 290 bp, Zea Mays
tggtgagtgctgcttgtggggtgatgaattccctgctgcgcaagcttgccactctactggagaaggaatacatgctactgaaagatgtgaagcacaacattaccttcttaagaaatgagcttgctagcatgaacttgctcctcttcaagctggcagacatagaagatctcgacgtgcaagtaaaggagtggaggaataaggtacgagagctcgcctatgatatcgaggattgcattgataactttatggttaatgataggcccaacagaagccttattcggaagactata

SEQ ID NO: 194542 - DNA, 337 bp, Zea Mays
ctaaagaactccgcacagaagcctacgggaacagcctaatcaacgaaagcgcgcagcttcatcacacataattatggttacacacatacagcgagggcatcacacattacatcggctcaaccttcgggatgatacccatctccctatagttgaacaacattatcctcaattcctcactcgcaaacagacttcgcagctccccctcacccacactcgccccagccgacaaggacaacaattcccatttgccagtcccatccgcacgaagacgaccaccctccatctcaccatgatgacgcctttcaccacgcgacaactcacccactctccgtttcgc

SEQ ID NO: 194543 - DNA, 545 bp, Zea Mays
aatgcacgttttatatggggtttagtccaaatatgttttgggttgaaacaaccacataacacaatgcatatgttcagttcgtggcttaatgggattggaggtagattgaaacaacttctactagtgggtgcatcggcgatttgttgggcaatatggcttagtagaaatgatgtggtttttgataaatctccaatgaaaacatttatgcaggtaatttacaggggaacttattggttccgcttctagagtcaaatgcagaaggctgaagatgataaagagttgataaagacagcgtgtctgaagatggagaatgtcgtcatggagattttcagcaagcatggatggaggtttaccaataggatttgtagttaggtgctttttatccaaactttgtttgctgcaataacttgatcaatatggagtgttgagtattgttataaggggtcgtagcttctttgaagccaaggctggatgattacttccattatctaaaaaaaacttataacacactctttggctcgctcccctataatacaaatgcacac

SEQ ID NO: 194544 - DNA, 325 bp, Zea Mays
cgtgtcactcgcgcctcaactctacctcactgtgctctttcattacatggtggccatgtgctatcgatgcgttccgtggccaggcgaacctggtatggttccatgcatttgaattgttgttttagcagccctgtatgcccttaaagctcactatggcagtcgtttggccattatgggcacagttttgtgggaacgcgggatcgacgttgtgtaccctaccgtgtacaacgcttacgtcgaccaactaggattctattgaaccaacactggtttttgtgagcaccgtgacctacgtgacccccctgatgctctctgttcccttaat

SEQ ID NO: 194545 - DNA, 330 bp, Zea Mays
ggaagaagaaaaaggccacctcaagaggaaattccaagtcctccgagctcagcagcaagaccggcaccagagaactcgatcctttgggtttccacccaagggaccaagcttcattagaccagctggacccactccgtcatggttcagtcagcagagtcagagctcctttcatgccccctcggttgcaagcaaccaaccaccagtgaatgcgtgttggcactgcggagaccccagtcacttcaagaacaactgccccagttgaaggcatcaggacctgcttactccaactcggtgaatggccccaagaatacctcagcacccgcccccaag

SEQ ID NO: 194546 - DNA, 505 bp, Zea Mays
agacaagcagtgaccaaaatgtgaagaacttccaaaaggttttaaaaggcatctaccgcatcagaactactattcgccagcagatgggtcaggacatagctggcgcttgtggccagttggtggttagcctcccagatgaaagatcagctggtggagcaactcttttgtcagacatcgaagaccttcggatctgacctctcccccaattgttaattctaccattttctcaagatcagatcctcttactaattagcctcacatgatatggtaactggtgctatagtttcaagtcaagctttaaaacatgagatgtttagtttgaccattgttgtgttccccttttgttctgggatacacaattttgctgtacacaatggtgaagacccctgcagttctgctcttgtggataggtggccactgaaacggttggtaacttggtattgtaaatgggacaaccggacaatgttatctcaacaatgccatggtgatatgctatcgtcagtgt

SEQ ID NO: 194547 - DNA, 442 bp, Zea Mays
acatatctcaaaatcttctttttgttcgtcaattcaccaccgataattatcgttctattgagtttgatcttttttcttgtccgtgaaggatctcgctacctgcctcctaggggcgcccctacttcagcttcatcatcgtcctccgcatcctacttcagcttcatcatcgtcctccgcatcctacttcagcttcatcatcgtcctcgccacagccgcacgctctgactacctccactatatccagtacttggcatcatccacccggtcatcctagccctgtcgtgttgtccaagttgtgtagtagctcagtcatttcttgtactaagggcgcccctgagcatctttggcatgcctgtcagcttgtcgtcatgttcgacttcttttatcaagctcctctcaagttgtgcacaattttgatcttatacactgtgacttgtggacc

SEQ ID NO: 194548 - DNA, 982 bp, Zea Mays
gaacgggaaggccatggcttgggaaagggcttttattaatcttgttaaggttggccatgctaattcagtttctcttgtcgttgcatgtgcttagcaagtacatttgattgaagtatatactctaatacctgttctatacaagtcaatgcttctgtctattcttgaagcagttcctgtaacatattcagtatttcccgtagcaaacattgctcaaaaagaacgttttgaacacacggtcctatgtcctcataagatacaacagtgtgcaaaacttggataaggcgaccaagtgtattcaactttatatcttgttatagcttgccaacccatctctcatgttctaggtccatttggttgaagtttgtattatttgggtgggttatttgagaatatgccatctgtcaagagttagggtatgacattccttgccttacatgtgggtcctggtccacatgtcattgagatatcgggaggcattacctgaaattctacttatttggcattcctcaaattacagtattatacttgactgctaatgtcatttgtatgcacaatgattttaattcaaagcatgtataagttttagtgtatcgtatcttctgatttatccagtgaagttacttattcattttttttatatattttactttaaatatttcgcacaatgagctagaagacaaatgttttgttcaggaagaaatacgtccaatggtattagcacagaatctaacgttgtccttttcgtccgagagctctatccaagatgaattaaacagagaaagtacagctgatgcaattacaataatggtaaatgtctttgatatgcaaaactcctaaagtccttaatgttgatgaacaactgtattcttatttgtttcctttgattgtaatcagattagctatattgtgatgtttgcatatatatcattcacacttggagaccgtccttctcgttggctgttactatttgtttcatcaaagg

SEQ ID NO: 194549 - DNA, 738 bp, Zea Mays
ttgggcaaaattttccatggtctttattttattttgagaaaagatgtagcaaattgatgtgtggtgttttacttgagtggacataaacacaacctagttacgccttgaatagaagggattataggaaacctggtatcacaaaaagttatttgctagcccaataacgtcttcatcctctagttgtactctaataccctctcgtgcgaatacagtgccctcaatatcataaaaacgtcatttgtggtttaaaaggtgatctattgttttgaattctttatattccaactttttagtaaccgtatggtggaaaaatgtgccttacaactttaacctatgtttggatagttctctcactcaatttggctaaatttttcatggtctttattttattgagaaacaatgtggcatattaatatgtagtgttttatttgagtagacataaacaccgtctaggtatgccttgaatagaggggattataggaaacctggtatcacaaaaggtcattagctagcccaataacatctttatccactagttgtactctaataccctctcgtgcgaatacaatgcccttgacatctgggaaacttcatttttagtttaaaaggtgatctattgttttgaattctttatattcctgctttttagcaaccgtatagtggaaaaaagtgccttacaaccttaacatatgtttggaaagttctcacacacaatggctaaatttcccacggtcttta

SEQ ID NO: 194550 - DNA, 313 bp, Zea Mays
tttatattaaaaatggatttctatttcattttccctggattttctatctctggactgcgcctcatttccatgaaagcacagggggcccggtgcaagttatcctagactcagtgcatagtacaaatggacggcgggttgatttctccgtttcacggggactcttttgaatgtttgctcgggtgaaggggtacggtgcgcggacggacgtccgatcaagtgctgacggcccagattagatccgaaggggtacaggacagtgtccgtgggatcacagatcgacggcagaggttttaaagaggtaaggagggttctg

SEQ ID NO: 194551 - DNA, 630 bp, Zea Mays
ggagaaattcaaatcccaagccccacaagcaaattaccccagcatcaaatcagcggccggccggccggcagctctcggtcgatccactgcggtttccagtcccgaataatcccaattcccaatcgattcgaagcttccttccttcgaggagagggggaggtggaaggcgcgggggaagctctgcttagggttcggaggtggccggcgccgccgcggggcggggacggcagggggatggatccggagcagacgttcctgcgggtgcacgcgcgcttatcggggacgctttcccagctgctcacgccgcggatccgcctcgtcctcgagtacctctacctcgccggcgccgtcgcgctcttctgcctgctcgtcgtcatgcacacgaacttcgtgcagcaggtcagtcacggcccgtctccccagaattaccctcagtgggctgcttatcattctccatagctcctgttcctcctcctcctgccgctgtgatggattgggagcggatatgacgcttctcgtgggattttctgttgaaactatcaccgggcttggggtggggaatttgtgctagcttcggcgatctttcagcagtgctaccatgataccaattcaatgtaaattgtggaaaca

SEQ ID NO: 194552 - DNA, 1118 bp, Zea Mays
tccggtgccaggtgacatcgcagagattgaggcctactgccgcatattccgtgctgccgagcagctccatactgcagtcatgtcagcactctgtgatccagagacaggagagtgccctgtacgctatgatgttgaatcagaggatctgccggtgctggaagacaaggttgctgccgtccttggctgcatgctggcgttgctgaaccggggaaggaatgaggtgctctcagggagatcaggtgttgcaagtgccttccagggatctgaggacagcactgctgataggatcccaccgctcgccttgttccgtggagacatgaagcgttgctgtgagagtatgcaggtggcgcttgcaagctaccttgtgccaagtgaacctagggggttggacatatggaggaagctgcagagattaaagaacacttgttatgatgcaggtttcccgagggctgatggttatccatgtccgacattgtttgcaaattggtttccagtgtacctttcgattgtgtcagatgattcaggaatggatgagctagaggttgcattttggaggggaggacaagtcagtgaggagggactggcatggctacttggaaagggattcaaaactattgttgatctccgggaagaagatgttaaagatgatttgtacctttcagcagttcaggaagctgtctcatctgggaagatagaggtggtgaatatgccagttgagattggaactgcaccatcagctgaacaggttcagcaatttgcagctcttgtgtcagatggcgcaaagaagcccatttatctctacagcaaagaaggtgtttctaggacgtctgcaatggtctcaagatggaaacagtatgttactcgttcagagagattggctgtccaaaatcactctctaaatgggaatggtaacatcctgacaaatcacaagaccatgcagcacactggcataccaagttcctctccgaatggagctgaaaatggtatgataacagaatctgataggaccatgaacaatggggaatcaagtgagatagacatagatacagctcgtcataatctggaggtcactaatgccctttgtaatgatcaaagcactcaacaaggtgaaatgcctg

SEQ ID NO: 194553 - DNA, 287 bp, Zea Mays
caacagcctggttattatcgaagattcattccggatttctctcgaattgcaaagcccatgactgaattgttgaagaaaggagccaagtttgtttggggtcagaagtgcgaagatgctttccacacattgaggcaacatctgaccacagcaccagtgttagcgcaacccgacaacagcaagccatttgatgtgtactgtgatgcctctggcactagactgggttgtgttttgatgcaagacaaccgggtcattgcctacgcatccaggtcactcagtcctcatgagca

SEQ ID NO: 194554 - DNA, 496 bp, Zea Mays
tggtctagtaaccttgctccaggctaccatacaatgacctcccaaagcattcttccttcctctccacaagaaacttcttctgattttgtcaatcgctttaatcacccaaggaggtaaatccatggccatagttaagtaaatagtcattgacgacaagaccgcttggacaaggatcaatcttccagctttggttaataaatcagctttccagctgggaagacgacccgcaattttatcaatgaacggttggaggtgctgcttcccaagcctcttcaaggaaagaggtacccctaaatacttgcaggggaagctggcaacggtgcaaggcagcaagctgtgaatgatatccagattttcagcagcacaccggatggggaagacgctgctctttgccatatttgttttaagcccagaagcctctccaaaaatcctaaggatatccatggtggtcataacatcagatgccaccgggtgaaggaagattaccacatcatca

SEQ ID NO: 194555 - DNA, 291 bp, Zea Mays
ttctgactcggtatctgctgaaacaatggctgttgcaactatcccagagcttgagaaaaccgtggatactcgaaggcttgagggtactcgcctgaaacgtcttcgccaagtcagtcatcccactgctcctgctgaggggaagaaaaagaaaaagagacggcttcggcgagtgtcgtgcttggatcaggatgctggcccttctactcctgctgctaaaagaataccagtagaactctttactggagatgatcccaatgggtgtgatcctgctgatgctgatcccaatgggtg

SEQ ID NO: 194556 - DNA, 290 bp, Zea Mays
accaagataggttgtgggaaaattttttgaggcacatcccaaggtctgaacagccagcgcagtcctctcattattgcactgaattgggtaggagaaacttttttgcaagttagtatgaagacctgaggcaacaccaaaacacctcaaaatttctctgaccaccactaagtccccagaaactggttttacaaacacagcaacatcatctgcaaacattgaaaccctttggctaatgtttctgccagcaagggggtgtaataaaccacactcatctgccctgatgaataggc

SEQ ID NO: 194557 - DNA, 608 bp, Zea Mays
ttacgtgttagatggatctgactgcaaaagacagacacatccaaaccgtgggctgatttgcctatccagtcaaaccagtttttggagtgtttattctcagtagcaatggcttctgagatgggggatgggcggtccactctcttttggcatgatagatggatattgggacagaggattcaagacttggcacctcatgtatttagtatggttcctaacagaattgtgaaatggtgacatgggagatcattgctgatttcctcactcttacagatgctatcactaatttcgctcttcagcctggggttccagataagcacctttggagattctctagcaatggtctctactctgccaaatctgcctatgaactgatgttcagtggttctacctccttggctgccttcaagagaatctggaggacttgggcgccgcctaagtgccgttttttcctctagttggttacacataataggtgttggacggctgaccgacttgctatgtgggcttgggcgcttggctgccctttccccgggactggatgaaatgtgttttgaagattggtggagcagatcggccgagcttgttcctaaagacctcaaagatggttt

SEQ ID NO: 194558 - DNA, 740 bp, Zea Mays
accagacccagcaatacgttcatggtgctcttcaaggacagggaggcgccccactgcagcacactctgcagaccggccctctgcagggaagcgctccctagtctccctacggcatgctggcacagccgaccactccatcttgggacgctcagtcccttacatccgctttcagtactgtgtccctgactccgcctcagcagactaactggtacttcgacaccggtgctacctcccacatgacctccaacgccgataccctatccaatacttcaactccctctcttactgcaccttcctccattattgtcggtgatggctcgcttcttcctatcatttccactggctccgctactttacatggttctttacatctcaacaatgttcttgtgtcacctaaacttattaagaacctaatttccgttcgccagtttactaccgataataactgttccattgaatttgatccctctggttgctctgtgaaggatctactatctcgaaacgtgatcgtcaggtgcaatagctccgggccactataccccctatgcctccctgttgcacacagcttcatcgccagctccactccgtcactttggcatcgccgtctcggtcaccctggccacgagtccctctccaagctcgcatcaatcgttctcgtgtgtaataaagatgctagctctcctttatgccatgcttgtcagttgagtcgtcatgttcgccttctgttccgtacgtctatt

SEQ ID NO: 194559 - DNA, 569 bp, Zea Mays
cccgactggccccacagggcagagtcagggcatgtctcgaggtcgtgcttggcgtggccctgccttctgtcagaaaccctgcgtcaccctcctagcatgcgtacactcgatatggtgtattgctccgtcctgcccgacatgtgggttactgtggcgacttcgatacttaggttctccacgactggggttgatcggtcccacaaggcagagactgtatgcggtggcataccgtcacgttgatagagactgctcggcatcccttcgatatgtcgcgccactggtcctgatgtagtttggtgacgacacgtcctgtcgtggccgacatgggtcaatagaaccagattggggcctctgcctcgctgagttgctcggctaggacttggtcggaacctccgcctcaccgagttgctaggcagggacttggtcgagacctccgcctcgctgagttgctcgacagggacttggtcgggaactctgcctcgctgagttgctcggcagggacttggtcaggacctccgcctcgctgagttgctcggcagggacttggtcgggacctccgccttgctgag

SEQ ID NO: 194560 - DNA, 302 bp, Zea Mays
tggagatggacacaccggtcatggtgaagtgttagggcccttggccactggcttgggtgtgtcgggatgtgagcacctgcgccgacttcgaagacgataccttcaggtttgcgaggtgagtttcagtttgtattgtctttctgaattagttcatctctattacagactttataagccaactacctaggccggataaacctaggaccataccaccagattaaggactaatgacccaactaagcaaaaccaaacaaaaaatacgaatacaatgtttgaatcacactgttttatttctggcacag

SEQ ID NO: 194561 - DNA, 557 bp, Zea Mays
cttttaactaaagttaagctcatttgtttattttaaatgttgttatggccattattccataagatcattgcacttaagtacaaatccaaatcaaacattatgcaaacatcaccatcacatggttgttattataatattagtatcataaagagttcccatcgtctaatcgcaaaatagaacttattacatcatgacccgtaatgccctaaagcagcatagtgattgatcctggggctccatagtgtatcctcttgcgaggtggggacacatctaaggctgggagttgatcttcagggggttccttctttcaagttgagcatccagggctgcaatccttgcatgtgcatcctccagctcctcatgtaccctggagaggtccaaggtagcactgtccaggtcgatgttaagacctgccaccacacctacaagggtgttgatgcgaccttctccagcttcacctggaacaacaccagtctggctctctccacgaggacgtagaggaagatgcctgtacgtcgtgccgtgcaactgctgtcggtaggtgtggttgagggacg

SEQ ID NO: 194562 - DNA, 327 bp, Zea Mays
aggataaggaaggttagcggctggccatcaagcgccattgatggcgttggtttggtggggagagagtgggggagaggaagagggacgactggccgtttttggcacaatgacacgaggcggtgagggaggcgagtggccggggagagggagaggcatggggtaggctacgcagcggggcgacgctgctacatgctcacgcatgagtgcctaaggctggggtcaggaccgaggagggcacgaggccagggtggggcccgctagcagtgggagaaggggagatgaagggagggagtgggagcgtggctaggcctggtgggccgaaatggc

SEQ ID NO: 194563 - DNA, 852 bp, Zea Mays
agagcttggagtaggatatttttgtggtcatatggtagactacgaagaggttggtaattgtatttaatgtcatgagatatattgttgcctccgtactaatgttttgtttcgtatgcgtaggagaccaggaaatgcacttgggagtactacgatgataaagatgaagtgaagcatgagataaggtcgaacaaactcatgggagagaagatgcagtgtggatctcagctcattgattcgtacattaaacagtgcggacagaagatacgtaggtttgccgaagaacttggctgtaatagcccgatgcgtgttgagcggagaaaaaggaaggtggcttacgagaagagggcacaggaggctagggaaatgccggcggccagagccgaggaggaaatgctggacaatcttgctggtcatctgtgtaccagtgagtgacacaaagacgtgttgtttttgctcccaaattgtatttgtgctgtcgttgctagctacttgtctttgttaacttgcagagattggatgcaccgggaagcacatcgtagaggaggcccgtgcaagatacgtggagcagaaaatggcagaggtggagttgctggcggaggaggaaggcgacacttcaagattgagtgagcttctggagctagctgagactggattacatgtggaggaggaggaatttatgtctcaggctgccgatcaagcagaggccgctcattacaagcgaaaggcagatgaggcaagtgcaggtgtaatgttgttggcccaggaggaggagaacgagttaatatcccaggctgcagatgtggtggaagcagcatactacaagagaaaggccgaggagggaaatgcaggaca

SEQ ID NO: 194564 - DNA, 475 bp, Zea Mays
ttcgcccgcacctgtctaggatcaacacaccctctgtctaggatcaacacaccctcgccgccaacttccaaatagtcactcttcagcaaccacctcaacaagaatggcattttgatactggtgcctccagtcacatgacatctgatgctggtataatatctcacccctcttcttcccagcatcttcctgcccatattatcgttggtaatggtcatctcattcctgtcacctccactggcaccacccatcttccctataatctttcccttcacaatgttttggtttccccatccctcattaaggatttgatttatgtccgtcaatttaccaccgataataatcgttctgttgaatttgatccttttggctgttttgtgaaggatctacccactcggcgcgagatcttcagatgtaacaactctggtccgttgtaccccctgcggctcccgtcttctactctccttgcgtctacctt

SEQ ID NO: 194565 - DNA, 1397 bp, Zea Mays
ccttgagaatgaccgtgcagatttccaatcgacaccacatgaccctcattctgtggctggagaagctaatttgctgcaacataatgtcccaagggacagtgatctgagtcctcttggcttactttggtctgagctggaaggacgtccaaaacaacctctctcatctaatgtacttagtgtaaatgaacgtagaaatcccaagcctacaacacccaaggacattccacctgtaaacatgagacaagggccacttagcagaatgaatgaagtttctagtgtgcgcgatgagtggcctgcaaactttggtcggctggacaacatgaatgatgcaaacatttctggcagaatccatcaggttgaagcggagcatcatttgaattttgatgggcacctgctgcttcaacagatccgacgggagcaacagcaacagcggcaggagcaattgatggcccataataatttagagttttctggtgcatttcccgggcaggtgtttgatcctttgaaccaacaccgacagcctatgaatcaacagattcctgatgtggagcatcttttgagaatccagtttgaacttgagcaacagcagcaacgccaactccaacaagagcagcaccaacggcagctacagcagcaacggcaagcccagcttttgcaacggcagcagcagcagcagcagcaacagcaacaacaaatgatccttgagcaattgttgcagcaacagctgcagggttcaaattttggcccaacaagtatggttgatcaagtcttacttcgtgaacatgtattaaatgaactgcaccagcagcctcaccatttgcaaaggcagcatgatgcagctattgaacagctcattcaagcaaaatttggtcatgggcttcatagggagcaccataatgatatgttggatgttctctcgcgttcaaatcagagacagatgcttcctttagagcagcaacttcttttaggccttcaacacgagcagcaacttaagtctcaacaattggcaaatgctctgcggcaacattcaggccaggaagaagaaaggcacttaagtggggtctggccaatggatgctgctgcccagtttatccgctcaggaaccagtccaaatcagatacacagtcgtttcgatctccttgagaaccttcagagatcgtcatcgtttgatcatcatgaacatctagaccgcagcttatccttacacgaacagttgcatatgggaggtcaaggtattcgctccctagagcggactggttctttgcctggtggtggtcctggaccaaacccagatgtcataaatgccctaacacgtcatcatggacttagtcagttggaaacacatggtgatgtataccctttagttcaaatgcctatgcttccttcaggtgttcatc

SEQ ID NO: 194566 - DNA, 399 bp, Zea Mays
cagtacctgacgagttgggatcatctgatgattggtgtgacattgggagattagatggctttggtggtggtggagggtcttctgtaagagaactctgttcaagggcaatgactatagtttatgagcaacattataaagttattggggcttttgatggcactccacatattactgtcctcttagaccgaaccgatgatagggttttgaggcatcgtttgttactacttttaaaggtttgttgctctgtagtctaatttctctattttgtagtaatatgacataatatgtgctaatatcaacaagcttcattatgttgtcattttatgggcaatgggcactgtacagtaaaattgacgagtatctagacattagctttgaacatggacattaatcttggac

SEQ ID NO: 194567 - DNA, 785 bp, Zea Mays
tacttcataaaacgccgctcagaattgccttctatttacaagtccttcactcgcatggttcacaccttgttttctgctactattaaaatttttcgttcagattctggtggtgaattcctatctgataattttcgccagatattgaccatagagggtactctagctcaactttcttgtcctggtgctcatgcccaaaatggtgttgctgaacgcaaacaccgtcatattattgagagtgctcgtactcttttgatatcttcttttgtgccttcacacttttggagtgaagctgtttccactgccgtgtatctcattaatagacaaccttaatctaaactttctggtaaatcaccgggtgaagttctttttgggactcctccacgatatgatcatcttcgtgtgtttggatgcatatgctatgtcttgttaccaccacgtgagcggactaaattgactgctcaatctgtagagtgtgtattccttggatacagtcctgaacacaaaggctatcgttgttatgatccatctactcgtcgtattcggatttctagagacgtgagtttcaatgaaaatcgccccttctttcacaaccagtctactcactccacctattatcccacagaatctacttctttcatgtgtcttccttccattcctgcatctgaactatcatcctctacatccacatctgatgttctcattcccatcacaccaccttccacctccacgtcatccacctcttactcttccaaaccacctatcatccaaacctacattcgtcgttc

SEQ ID NO: 194568 - DNA, 278 bp, Zea Mays
caaagagtgaggaactctgctataactccaacagataaactaccctggatatctaaaatccatctcctgtccatgagggcctcttgcacattcctgctaatggcaatgcgtctaggaaccacctcaaacaacctaggagccaggtccttcgcacataaaccatgcagccatcggtccgtccaaaataaggttgaagcaccatttccgatttctgtcatcacagctacagagaagaaggccctgacttcatcacaaaactgcaatggaagagaggacca

SEQ ID NO: 194569 - DNA, 350 bp, Zea Mays
acaacaaaagaagaagagtaccataagccaaactcaggagtgaagcgcaggtaccccataatccatttcacagcatgtctgtgagaagtgcgtggggaggcttggaagcgagcacacagacacactgcaaagtgcatatctagcctcgtcgcagtcaagtataggagggagccaatcatgcttctatactccttctgctccatgggctcgccgtcctcatcgccatcaagcgtcgtcatggtagacatgggcgtagaatgagtcttggcctcgctcatgtcgaacttcttcaggtcgtcctttgtatactttccctgatgcacaaaagtcccatctcgggtctgcttgat

SEQ ID NO: 194570 - DNA, 312 bp, Zea Mays
agtttatgatcaccctcacaaatggaagcaatggttggctctagcagaattctggtataacactacctaccactctattcgggactgctctcctttcaaatttttgtatggttatgatcctcctgtgatggttgttccttggctgagagatggggaagatagggatgtcactatctggttgcaggagagacatgtgacttctgagttgctcaaggaaagattggcccaagctcagaacagaatgaagcaattagcagatagaggtcgaactccaagggaatttcaggtgggggaacttctgcttctcaaatt

SEQ ID NO: 194571 - DNA, 279 bp, Zea Mays
gatcaacataaatctcagcgtacttctctgccctgtgggtggtatgcactggtaagaaatgagcagtcttggtcagcctgtccacgataacccaaatagaatcatgatgtctggaggtattgggtaatcccactatgaagtccatgcaaatgtcctcccatttccaagatggtatgggaaggggttgtaaagggccagctgccttcaagtgactagcctttatcctttggcaagtgtcacactcggatatgtactgggcaatttccctcttcattctag

SEQ ID NO: 194572 - DNA, 313 bp, Zea Mays
ctgtgtgatccctcctcagtctttcttgtgtgtgattggtggtgatggcgtgagagaacttccaggggggaacaatgcagctgacttttgtagatttaagatatgtaaaatccatgcgatattatgattgtgttttggagttttggagcaaagtgaatctgctgtggttttatctgcaattggcctttgtatttgcacttgagaagttggtcagatgtgcctagaatctttaggtccgaagcaatggtgagatggagctcagctgctggttggtctctcaacttgatatgaaacaattgtcccagatctcaac

SEQ ID NO: 194573 - DNA, 473 bp, Zea Mays
tgacgttcagcttctgctggggaaaatatataaaatgaatattgtaaacatttacatgtgcataatcgcaacacaatgtttaactcagacagaaagacaacatgatttcacgcataaaaaggatatattgccatagacataaatatctaacctgtcggggtgggggcactgctttccgccgcttagtgactaccttcttcaaaactttcccagggctgtcgtccaagttacgcttcttggatgatggcataaagtcatcatcctcatcagcagcacgccttgtctcgggtctaacagtccccgccggagcacggggtatgtcaacgctgaagcactcctgagtagactggattatgatgcgttttggattggaaggtggtcggtctacgttcttcatcactgatgttcctaccaaaatgaaacaacacatatacataaaatacgtaaaggaacaaaaaaagataagcacaaag

SEQ ID NO: 194574 - DNA, 407 bp, Zea Mays
tcgccgcggttggaggttggcgaggtgtctgatctccccagtccaaggatcgagcgacagcgacgaaaagtggtttcgaagcatagtgttggtgagatgtcgtgaagtggtaggcgccgtcggatggggggtggagcggacccgccttcgagtagatcagtttggtaaacaagatctactgtcttcgctgattgggacgagtattggtgaaggggatctgcggaatctttttgagggtgaggaattgaaaataatgttgttcaattatagggaggcgggcattattccgaaggttgagccaatgtagtatgttgtgcccttgcgttgtccgacggtagtggagggcgcagttgtatttatttgtgcggtgggtctagtgacccttcgctgagtgtatgtaatttgca

SEQ ID NO: 194575 - DNA, 371 bp, Zea Mays
ctgaagccttgaagttagttcagaatatgaggcagagtggccttgttcctgacatttacacaagcaacattctaatcgacggtttgtgcagagaaggaaagctgaagatggtggacaaccttttattggatatgtgcagtaatggtctaaccccagacacagtgacatataatacaataatcaatgcatattgtagggctcaggatatgaacagtgccatgaatttcatgaataagatgcttgtagctggttgtgaaccagatattttcacatataatatttggatgcatagcctctgcaggaaccatatgttgaaccaagcagggaagctgctagatgagcttgttgctgtggattgttctccaaattct

SEQ ID NO: 194576 - DNA, 417 bp, Zea Mays
ctctgctgaacttgtatcaggcaggtcctgtggaagagtatgtgaagaattttgaggaggcatgttgtgcaacggcagtacataaccatacactggacgagacattttatgtggctcagtttatcaagggactgaagaaacagcggcaaaagtcgttgaaggtaattggagcgagtaagtttgggggagtgggcactaaactggaggcgaggggagtgtctaatatgcctgacatgtccaaggaaaggttagtgaaggaatacaagcgacagaatggactgtgttttacttgcggagaaaagtatgagcccgaccatcaagcctggtgttcaaagaaagttcaaacacagttgaatgccctgacaacggaggagctgggaatggctttgacagaagaaatgttgactcaaattagtc

SEQ ID NO: 194577 - DNA, 915 bp, Zea Mays
atggacgactggagaagaaattgataagtagctaatgcagacgatagccaagtatgaggacgggcagccatggtcgatggaagttgttgatgtcaccgaaaagtaggagccgcacaagtcacggacacactaggggtgtcgtggtgatggtgccacataggaggaagtgccatagacgaagatggcaacgtagtcgaggcagtcaatgaaaaaggtctatgccgaagttgacattgtcgaaccatcatggccaaggcatgctaggtttgccaggtctgagaacacgtcggggatgaaggcatgcaccaatgttgttagtaccagacgtactaggtagagggctccaaccatgcgtcaacgtctgaaggaactagcagagaaggcctccacgatgattgcgatgcacagaagaatggcgaggaagaaggtatcgatgccgcccgcggttgttggagtggactaagtagacgaggacgagaggatggcattgcagatgaggttgtgctggacaaagtcgaagtatttgggtgacatatcgaggctcctggagtgtcagggctggggcgagagagctgcaccgcacaagcaaagccgcgatggtgctggagtgtcacgacatcgttgctcaaagaaggcgatgaagagcgcgaatagtcggggtagaccatgtgctagaggcgcacaacgatgaagtcgacaatgatgtagggccaacaatgaggatgacaacgggcggtgatggtgcaaacccgatcaccaatcagttagaataaaaggactcacaacaacaacaaatttggctgcggatctagggcgataacagagcccgtgggcttgagcggcctctccacaatcgtcaccactgttagctgatatatcagacatgtgtttcctgccatatagacgcaggatccc

SEQ ID NO: 194578 - DNA, 517 bp, Zea Mays
gggagttgcaggagacgctggccacggaggatggcgggtccacggcggagcagcgagtacggtgaagaatcgtcggccaccaagtggttatctccctctgcgaaggtaaccgacaacaccgtggaggcgcggcgaagttccccgcccaggtgcagaaccaatcgcgcagcgtccgtgcgaatcaagcggcgacggcgaaccttctccaccccagctaatggtgtgcggcgatggtgaggtgcttctttgctcgggtccgcgtagggaggataggtgcgggaaggagaagaaacggggctctagctttatacaccgagggacgcgaggacttcggtagggagcaacgaccagggctggagcgcgcaccgatccgatccacccggcgaggcaccggagatcgcgggagttaggtgatgacgcgagggccccagccgtcagcgaggaggaaaacgagtatgcgcctggtgcacggttgccagtggatgaccagtggggccccactgtcggcgccgatccc

SEQ ID NO: 194579 - DNA, 567 bp, Zea Mays
tggcaccggcttcatccctcttcagtttgaacacccacttaagggtgatcgcgcgatgaccatgagggagatcagcgagctcccaagtgcggttcgtctcaaccgcgtccatctccgactgcatcgcggcacgccaagccgcgtgtttctcggcctccgctaaagaccgaggttcgccatcgtcgcatgtaagatgcaactctcccgccagaatgcgagacattgggcccggcaccgacgggtcgatcagaagaccctctacctttcgataccgcaacgactcgccgtcgtagcacgcgtcgacgcgctcctcgtcgtgggagagtggggtcacaagctccactgggtcgtgctcgacacgagctggcgtcggagaggacgttcccggagagggtaccgtcggtgctggagtacgtggtgatggagagctcgctggagccggagtcgtggctagattgcgtggtggcgaagagctcgttgtagccggagctggagagcgtggcgctggagtcggtggagacttgggggctggggtaggcctactcggagaagggtcgcctactcccc

SEQ ID NO: 194580 - DNA, 401 bp, Zea Mays
ggactgaccatctccggcgacccagggacgagcccagtcggggggagaacaggagttggcgcatggggcgatcccaacccaattaattccagcggcccagtcaccatggactggggcgaaatattcctgggagggttcagcgacccgcgtgcctcactcatgaagacagtgggggccatgcctagggtactgtttgtcttccaccttgggtccagccttgatgcctcgggaatacccaggcagttaagtccagccgccggcgccaggatatcttcatcagccgaccttgggtccagaactgttgcctcgggaatacacaagagatttcctccagccgcatccttcccattgtccaaggaatttaaatgccccagcttcaggaaatcagccgcatgttcccc

SEQ ID NO: 194581 - DNA, 378 bp, Zea Mays
atctagtgttctatacttctatgttctactgccttacttcaatagttcttagcttcatctccgccaaccagtttccatcagcccagcagtagcatatctagtgcctagtattgacttgacctctatctgttgacatgttcagagtttcatgctgccggtggacgaagaggtgatgacgttgaggtcttattccccgggtccaatgtggttggcattggcagtgcaactgcaagtgattttgttcctcccgtgacctcaaatgttgatagcacaggccctgcttcggcattatcagctggtgcagactcaaaaagccttgctgaaaaggctattgcagcactccctcctgagcttagtgcacaagcaactgacccaaaa

SEQ ID NO: 194582 - DNA, 316 bp, Zea Mays
caggtctccagaagtacttcttggttatccgtatcctgtgtgtcatctctataatcagacgcattgcctacagttacacaagcatctcataatgcatagttgttctgcttttgttagcctatgttgagggcttgaggcctcataatgatttgtggctttgtgaattttaacttgtcaacttgtgcgcttaaccaatgccagatatactactgccattgatatgtggtcattcggttgcatcgttgctgagctatatatagggctgcctttatttcctggtgcatcagaatatgatgttctttgccgtatgattgag

SEQ ID NO: 194583 - DNA, 316 bp, Zea Mays
gacaatattttcaattaatgcttgcataacataccaggttgtttccctaataatgaagccatgaccttcaagtctagcatgaatttagcttcatacttatgtttctactacggaccctaaatgctaatttagttttggcaagtgaaggatttcatcatttagaaagtggaggatttatgttgtattattgctagacccaaaatatatctctaaaactgtacattgcagattagcatcaattagaaagtagaggttttaggttgtattatatggtatagctagaccctaaatatatttgtaaaactgtacaatgcca

SEQ ID NO: 194584 - DNA, 538 bp, Zea Mays
tctatgtccattctctagttacatagtaaaaacgacgacttgtgccgcactgcactcacatgaatatgtattattcttgtattcaacagggacttgtgccgcagcaacctcagtttagcacaccgccggcacagctacctgcccctggagcacaggtttgtattctaactctatagctatcgccgatagttcagcagttaatatgtacgatttctgacaaattgcattctcgctccataggacaatcaggaaggaagtggaacgatggatggcttcgtcaactccctattcgcgtacccaactccggacggaggcagcggccaaagctccaacaaccctagccgcggcggttcgtgaatgtgcttcgatctctaccttttcagtaatgaacactttgatctctaccttttcagtaatgaacacttcttatgtggatgaacacttcttatgtggatgaatgtggatgaatattcttatatatgtgtgtgtcgatggatgtgattgaggccctggatgaatgtgattgatgtgtgaatgt

SEQ ID NO: 194585 - DNA, 403 bp, Zea Mays
aagtggaatctagtgtggtggagaaagtgggcgcattaggtgtggtggaaggctcaagaggggcaggagctgacatagtggaggaaggaggagtggtgactgggtctgagggatcgaatcgagcaggggtggagcgagccagagacgagaggcgatggactcggaaggcaatctgatcggaggcaatcctcaacgagcatccttgctctgcctgatctgctgctactgcggcggcaactgttgcacgagtggctatgtccaactgtctcttttcttgccccctgctgctcaagatatactgccttgcccttgtcatgtctgaaagggcgaggagggttctgatcatctcctcccctgacggtgtgacattatttgtcttcaccatcctgcactgatcaatgac

SEQ ID NO: 194586 - DNA, 455 bp, Zea Mays
tctaaggatgccatgaatagaggggattatagttaacatattatcacaaaaggtcattaccttgcccaataacgtcttcatccactagttgtactctaataccctctagtgtgaatacaatgcccacaatatcatagaaacgtcatttgaggtttaaaaggtgatatattgttttgaattctttatattccaactttttagcaactgtatggtggaaacctgttatcacaaaaggtcattagctagcccaataatgtcttcatccactagttgtactctaataccctctagtctgaatacaatgcccacaatatcatagaaacgtcatttgaggtttaaaaggtgatctattgttttgaattctttatattccaacttcttagcaactgtatggtggaaaaaagttgtcttacaaccttaacctatgtttggacagttcactcacgcaatttggc

SEQ ID NO: 194587 - DNA, 738 bp, Zea Mays
cgatactcatggtggcttattacagttactggcatgttgtaaagatgatgagctcaaccaggacagagacactccttttctcttgggccttggtatggatcaggtggatgagatgctggccagcccgtccagccttggcatgaatgaggacttgccatctgtacctgagacacatggctcgttattgcagcaagtggcatgggacaggaagcactttgcttatgaaatgtgcacgcttattgctgagatggtcctggaagatgttctcaccgatgttggcaacctcgctttcagcattgattcaagcatgcagatcagtgatcaaccttccaaatatgcgctagtcatcgatgcttatctgctgaagacgcagtacaaaaaaccatacatttctataagccaatgggatccaggaatttggtgcaaaggtactatggcccatgagcagcaacagcttgagatatataggatgtttgagaaacaatgggattcagttatccttaaatggttcaggaatccttttgtgctgctgcaatcatgcaatggggaggatctgaatgaacaaggcacagtgcctgtaaatgacattttcgatgtattggctgctggccaggagttgaattttggcaacgtcaccttgatcatttatgggggatgccaaggagcaatgggtctgcaggttctttttgcagaattacacccttggcaccacaatgtctttacctccatagaattagc

SEQ ID NO: 194588 - DNA, 283 bp, Zea Mays
atcaaatggtgcaactatctgcctcttcgtcctgtctgggataagtatgttcttttttaaaaaatatactttggtctcatctacttaattccttagtatggtttctttttatatatactttggtcttatctacttaactccttatgatcgcctcatttggttttaagatattgcatggttttcttttagcaatgattcgttgacaaaggaaaagaagttgctatatgtgtgtttatactacttgatgtggggagaagctgctaacgtgcgatttattccagag

SEQ ID NO: 194589 - DNA, 306 bp, Zea Mays
gtgcttcatatgatggagatctttgtggaggtttcattgacggaacaggcagtttcaaaggagttgatggatctgtatataaaggttcttggaggatgaatagaaagcatggaatgggcacaatggtttacgccaacgatgatacttacgaaggtttatggaatgagggcttgccagatggatttggtaaatatacatgggttgatggcaacatctacattggactttggaaatctggtaaaatgaatggcagaggagtgatgcaatggacaaatggcgatactcttgactgtaattggcttaatg

SEQ ID NO: 194590 - DNA, 638 bp, Zea Mays
atttcttggtcctccaaacgacagatgactgtgtctcgctccagtgctgaagccgagtaccgggccgtcgccaacactgttgctgaatccacctggctgcgtacgtcgtgccacgttggtctattgtgacaacatcagtgcggtctatatgtcttcaaaccctgtccagcatcagcgcaccaagcacattgagattgatttgcactttgttcgagatcgggtggctctcggtgatgtccgcgttctccatgtgcctactacctcccagtatgcagacatcttcaccaaagggcttccctctacagtcttcacggagttcagatccagcctgaacgtctgtggtaccgacgatcagactgcaggggcgtgttagctgatatatcagacttgtgtctcctgccatataggcgcaggataccctaccatacatgtgcaggcatccttgcctttctagctacagccgcatataggaagatatggattcaatcctcccatttaggggcagagatagtttccttccattccaggagatctcagggtactgtttctataaacctgagatctcctacctctctgtccctctataaatatgtgcgcctgtactcctctcttcatcaatcaatacagacagcaattat

SEQ ID NO: 194591 - DNA, 400 bp, Zea Mays
taaaatgaatgaattaatttttagtccctaaaaccaaacggaacgtggaatactgctattaagatctccatcatgatcgtgacaaaggtaagagctgtggttgagaagagcttgaactttgtcgtggttcagtttgatttttaactttttcgtgcagaatactcgagtggagccgtgagggtggggtgggctctgagaaaggcagaactccagagggcaaaagtgacatttcgcatggggttgtgtggtccgtatccttgaccatggcttcaacgtttgtcgtctcgtacactttcccctctctccgggggcggcgggcaccgcattgacggacctcaccctgttgtgctgccccgatcacctcgtcgactgcacggcccccttttgccaccggcgtttg

SEQ ID NO: 194592 - DNA, 534 bp, Zea Mays
ccaagaccaaagaagatcacgcagagcacttgcgtattgttctgacaaggttaagagaacatcaactatatgccaagttcagtaaatgtgaattttggttggacacaattccgttattgggtcatatcttatctgccgaaggtgttgcggtcgacccaagtaaagtcaaggacattttggaatggaaaccacctactacagtgcatcaggtccgaagttttctgggaatggcgggatattaccgttgttttattctagatttctctaagatagctaagcctattactgagttgctcaagaatcatgtcaagtttgtgtggtcatccgagtgcaacaaagcttttgacgagctaaagaagttgttgacttcagcaccagtattggctcaacccgatattgagaaatcatttgatgtttattgtgatgcttcgggcattggcatagggtgtgtacttatgcaagagggccgtgtgattgcttatgcattacgacaactcaagcgtcatgaagagcattacccaacccatgatcttg

SEQ ID NO: 194593 - DNA, 427 bp, Zea Mays
gttctctgcatattgtgatcttttaaaattcaaaaatacctgacctgttctctgcatactgtgttcttttatttatttataatgctacagaaatcctctcaaaatgattacaaattcttgcctccaatgaatacagttaaaataccttgcattctcctcgtacatattagtgttttggactaataaaactccctttactgcaatcttttatcgatctgcaaatgtaaattcagttctcattcccatatctgcaaatgtaaattaagttctccctttactgtaattaagttataaaaaaatataatgactgtgcatgagctatgtttatctattagttcatagtgtgtaccagttcatgaccatgcataaccatgaccagccatgatcgaaccttcctgttcatacaaatacctcaccgccaccccca

SEQ ID NO: 194594 - DNA, 570 bp, Zea Mays
cgcatgatggtcgcatggggtcacgccagtgggcagacggtgcgcgtagtggagggacgatagtgcagaggagtgtcgcacgaggtcgcaatggatcacgcgcacggagcgagatggcgctcgggggatgaggtggacgtgcaatcgaggatcgacgacgtaaggaagagctaggacagaggctaaaacaggacctaagtgtctgataccatgtagaagattagagaatacctcacactaaattagcaatttagcaaggtggctttcatatatatactcaagtacaacttggaatacaagtaagatgatatacatgtgttggactatacatatctctaatacattacctggtatggtttctttggaacaatagcttcacctttctcatcgtattccccagcttttctctttgcctttccttcacaattagcggctagatgccccacctgaccacataagaagcatttgtcctgctgcccaggtgtaaaaactacctgcaaacataaaactcataatcttaaactgaagattttacaagaaaaatgttaaaatgaagtgaatatgaaggag

SEQ ID NO: 194595 - DNA, 345 bp, Zea Mays
cttcggaggaaggtttggtactcaacctagaagattgttctgtttattctatggggaggataagagacacacaacaaggacatgccaagtcatgatccaaaagcagaaggagatcgctaaagccgaagcgcgacagaatcagccgaagcaggtcttgtgcactgcttcatgctactcgccatacatccctgaatatgtgggcaatcagcaacccatgacgtcgattgcttcggcaagtcattctcaagatgcttggactcagctaccaccaccaccaccattggcacctatcttggcacataatcagcagctagaagggcatcgccaagtgcagcaacaacgcgc

SEQ ID NO: 194596 - DNA, 406 bp, Zea Mays
ctgaaccagaggtcttacatagcaatgtacatgttagttttatttttgcggattaagatttataattgagatgttttgatagaaagcagtacctgtatatcttgtgtctttggctctattggtactaggggtggtagctttggaagttgagatgagcttgcgctgtggagaacaacaggctcttcttttttgaacacggaaaggagtaggtcttttccatgcctctttttgatactaagaatatcaaatgttggatctttgttgtccttattaggtcctctctttttaatactttttcctggaaacaacttggtcacaacagtcaatttctcacccacaattgctttaatctcttccggcaattcagatttgttgctttgtctcagtaatttctctacggttttcc

SEQ ID NO: 194597 - DNA, 414 bp, Zea Mays
gcaaatacatggcttgttcctccaattgctgcgcagtcaccatcaacgtttcctcctcttcctgctgaggatgaaacatggggaggcagtggaggtggttggggaagggatggaaagagcgacatggtgccatgggcagatgaatttctctatctcacatccatgccttgcaaaactgctgaggagagggaactccgtgacaggagagcattcctacttcacagcctctttgtagatgttgccatctttcgggctattgcagcagtaaggcatgtaatggagggtacagagttatcggcatcaaccaatatagatgaagtcttgtattctgagacagtgggacattttagcatcactgtcacaagagattcttcagatgcaagctgcaagatggacactaagatagatggaaac

SEQ ID NO: 194598 - DNA, 604 bp, Zea Mays
atcttgccttgtggtcttttaaattaggatgttgatagtgcttgttctgttagtatgtcattatgcaacctgttctttgaggcccatattttccagagagaacaatgttcttaaatcaaaaacttatttacctctctttgtttattcagaagaaggccatgcgttggaggaaaggggcaactcttgaatcattactcactgcaaactcagagtaagtttggcgccattttcttgggcatgactaatgagcaccagattcatccaaaacaaccaatttccagaagttttagctgatatgattttagacttttccatatacattacttttagcatcagatacattacttttgtgcaaaacctgcaggtctcaaattacccccaaggatcgaacttctagaaaagttccacctaggacaacaaagttgaaatccaggcaaccacggagtcctgatcataaaaccactagcagaatcttgagggagcatctgcaagaagtgattttatcgcagaaaaaaatcatctccagatattcggtgaggcattactatgtgaaatttggatcgcctgactcaagtgaaactgcacctccttttggagaaatgga

SEQ ID NO: 194599 - DNA, 906 bp, Zea Mays
agaggagtctgaagagagatatgggactggagcttcaacacatccaggttgtggttgctccccctgcttcttcgtccgctttcgatagtatactataggttgctccccctgtttgtcattcacctttgccccaatggaacaatcatgttgctccccctgtttctcattcaacttccctgccataggacatgggattgacccaacaatcactgcctcatcatcctctgtctcctcctgaatatcaatagttggatcatcatgatccccactactttcatcatcactcaatacctgcgtagttatccctttctccacttctcgtggaatcatacctccaacaatcactcctcctgaagctccactagcctcatcaccactagcctcatcaccacctcgaccactatcatcctccccctctctacggtcccctccattgaccggagagaagtcctccagaatttgatatggatcaactttctttctatagtatgggtcttcctcacgaaatgttacatccatactcaccaacaatctcttatcaatagggtcccaacacttgtatcctttctgagtagatgaatatcccacaaaaatgcacttgattgcttgaggatccaacttgttcaccataggtcgatgatctttgacaaaacagacacaaccaaagacctttggtggaacacgaaagtcacactttcccaatagaagttctgcaggtgatttcatattaagtattcttgagggcattcggttgatgaggtatgtggccgtcattactgcctcactccacagatacttaggcacattcatctgaaacatgagagatcttgctacttccaacaaatgacgatttttcctctctgctacaccattctgaggtggagttccaggacaagttgtttggtg

SEQ ID NO: 194600 - DNA, 555 bp, Zea Mays
gtcagccatggccaacagggtcaccgtcgcaagcgtcatcgccgcggtgggcatcgtcgccgtgatcggcaccatggccacggtgaccagcgccgacgacaacgatggcaacatgctctccagcgtgaaggtctccacggtgtgcgccttcacgcggtacccggagaagtgcgagcagagcctcaagcatgtcgtgagcgacacctccagcccggaggacgtcttccgggacgcgctcaacgtggcgctggacgaggtctccaccgccttccagcggtccgcgcacattggcaaggacgcccaggacaaactcagcaggaacgccatggacgtgtgcaagaagctcctggacgacgccaccgaggacctcagggccctggcacgggtcaagcccgcggacgtggtgcgccacgtcaaggacctccgggtctgggtctccggtatcatgacctacgtctacacctgcgccgacgggttcgagaagcccgagctcaaggaggccatggacaaggtgctgcagaactccaccgagctcagcagcaacgcgctcgctat

SEQ ID NO: 194601 - DNA, 486 bp, Zea Mays
atgtgacctcacgctcgtcgcattctagctgccagaaccatgtatgtgcgtggtcgatgaggtgatacgatgccagccaggccttgtcggacaccagagtgcgctggctccagaagaacttctcgcagccgttgaagcaccccagagggtcaccgctgtcgtcgtagatggggaaggaggggggtgctgcagctgcagtcgtcgacatggtagcagcagtgagggtcggtgccaggggctggtacaccggtcctggtatggttgcccctggcgtcgtcagccatgcaactggtgatgaagacggccctgagggcgcaacgcaactggtaggcatcgccgcccaagaagatgtaggtgccggagcgggtgacgacggccaggccgctagtgctggcgagctgctggaaagcgccatgttgattgcattgagcttcacaaacagattgtcgaagtacgcctggttgggaacccaaggacccacaagag

SEQ ID NO: 194602 - DNA, 389 bp, Zea Mays
caagacatggcaaccgagcgccattggctacctgcacctgctgtccagtccctgacgactgtgtgatctgcaccacagaagcagcatagctactaataaagttatgggtgctaccactatccactaagcccaccagacgttgtccacccatgactacaatgacctgcatagtgcgactggccttcagacccttcatggctatagcagatagggttggttcctcctccagtgaatcatcctcttcaccctcgctgagcacttccaaatggaacaggcgctgacaacgatgtccacgcgagtaaacctcatcacagttataacagagacccttctcccttcggtcagacatttctgcaggactgagacgacgacaatatggtggagcagtg

SEQ ID NO: 194603 - DNA, 511 bp, Zea Mays
atttttgtgtttatcaatccatcatacacaagagaaagtaggctattagtgtattacgcatagcatgacccaaacctctataaactgcccaactgtctatgtggtagtaaccaggttgcactcaagatcagtgtacatacagtaccctcactctatccacaaactcacatgcccctcttttggctacatacagtaccctaatgtcgtatcacaacgatatttggcgcgccaagtaggggaccacctctttcttgaatttcagggcgctatgttatgttgtgcagctatgcagacgccaacacatccgctcaactagcaactccattcgcgagtcgcaacataaacatagacgatgtcgcaatattgcctagtcatgtctattgttgactcctgtaggacatgccccaatcgggtcacacaatattgttcccgcataccctactttggcccacactcctagagtatgccatgccctatgggtgttgcaccgcatgcctccgcaagagatggc

SEQ ID NO: 194604 - DNA, 381 bp, Zea Mays
gccagctatacaagaaggggatcagttaacccatgctaaaatgcgtcacctaaaccgaaggcattcaaatccttcgtgaagtccacaacggaacttgcggctcccactcaaggcccagggccctcgctgccaaggtgatccatcaaggattttactggcccacgataatctgcgccgcgaatcgagtcaccaggtcatgggaagcttgccagaagttctctccccgctcgagtaacccttcgcagttcaccaagctgatcgcccacacatggcaacttcaacgctgggggctggatattgtcgggccactacctacggctcaagggaacctcaagttcacctttgtcgctgtcgaatacttcaccaagtggatcgatgcta

SEQ ID NO: 194605 - DNA, 335 bp, Zea Mays
gtcggagccttggagggagagaccgagagagaagggtgaagaagggagagggaagggtccaatcgtcctgggctccttgctccagagtgcaccacgcctgtagggattctagggaggcggggaacacgaagagataggcgtgatctggggcagcggctacctttattaatcatgggccagtcaaacagactgttggactactcgaccctgactaatcgcgactgatcagttaccaatcgattagtctccattgaacaagttgtcaaaatactctcgccatttatgattgatctcatccttcttcaccaagaggtgctctgtttcttccttaatac

SEQ ID NO: 194606 - DNA, 400 bp, Zea Mays
atctaatctggtagctaatagccgctgcctggcattttttccctaaaaaacataatactagatgattagatttgtgtggtgagatggggctttctaatcctatgtgtcgatgacgcgattgtgggatgcgggttggtttgctggatttggagggctgctatttcgcaacaacgtgcctattttgttgggagcgcctcaatgatgtggttagtggcctggtgggacgatgctgtagcggaagctgaatgtccgtgcggcagatgtgtttatggcgtgttgtcgtgttgatgctaacttcatgaattgcagctttgaagagaccaataggattataggaaacgaacgggttagaaacgttggaggttggaccattcgtacatgcgttcagctaggttacgtc

SEQ ID NO: 194607 - DNA, 322 bp, Zea Mays
ctacgagaagaatctagacgactggaaagcttggtcatgacgtaaggtcctaggtggccgagacgacgatgccaagtggtggtggtggcggagactaggacgggaggtggggacgcatctgtggatgaagggcgaagtgtgtagagtggcccggtgctgtcacatcgggcgagaggggtcctggtggccagatccttcacaaaaaaccagaagggtcaaagtcaatggaacaggaattgtcggtggtgaaccgacaaacagaatggagattgtgagtgatgtgaggggcgatgagaacgtcgttgggatagaatggtccggg

SEQ ID NO: 194608 - DNA, 509 bp, Zea Mays
aaattcactcgtatagataaggaacgttgtctagcaacaagagagatcatgtcacaaaaaatcctcaagctaaaacaagaacatgttacactatattttattatcctgttgttattaaatttggctcggggcttcggtaatacctgaatcggccactgcatagagtagtaaacctaaaaaaaatcagactcttattgttatataatttccatggtttcttcctctatgaataggagagaaaaattgatcctagattgcagtctactaagatgcatgcaatgcgttatctccttatacagttactgttacaagttcttctccatccagatcagtattgggaggctgcacttgatgtgactatatgttggaagaaatcctttcttgtcattgctcgaggtgataactccagtgactatattgtcgaccttcacttctcgctacaacaaagatgcggtccttcttaccatccttttactatctgatttccctaaaataattttgtttgacta

SEQ ID NO: 194609 - DNA, 464 bp, Zea Mays
cgacgcactgcactgcaaatacctatcaagagcaccagactttccaaatacaggcaaattcaacccgtgaagcgccaagagctgaatcgcccccagcctaccatttttgacaaatattcacatgatgaatacataataaacgcatggaacttttaaagatccaaactttgagctccaagacttgaattaaggcgttaaaccattccccgaggaaaaaagaaagaaagagaaggggatcgctcagatcgatgaccatatcacctgcaaggaactcgtccacgtgcccctgccccatgcctcaccgccgggacttgagcatgcaccggatcgaaatgctgctcgcctgctcgatctgggcccagatcgagccctccgcggggcagctcgggtctgcccgaatcgagaggcttcaaggcaatgcaggaggcggatcggcgtgagctcgagggcttttgtcctagatt

SEQ ID NO: 194610 - DNA, 368 bp, Zea Mays
gtaaagcaccagcacatttccaaaaattccccgagactacgacgacaaggcatcgatcttatcatgcatataaaagcatcacaagcgtgttcacggaacctacctgttaacttgatcgacacactacgtacccctgttctttgcctttcaaattttatcgcacaacaagaatcatccccatttgccaacgacaccaataatacctaccgacctatggtttaacacccgagcacagttacacgccgcacattagtttctaacatgattctcgcataactcgtaattcaactactaactaacaataaatcacgtacgacaactactatatcgaccagttaatttatttggacaccacccgtctagcgtac

SEQ ID NO: 194611 - DNA, 271 bp, Zea Mays
ggaagtggtactgcattttccaccctctagctcgctgagagatgtcaacttcacagggtgtaagaatctgatcctacccatggaggaaggagctggattctgtggcctctcgtcgctcgagtcagtgaccatacacaaatgtgacaggttattctctcgatggtccatcggaggacgagcaactcagactcagagcatcatcaaccctctcccaccctacctgaggaaactcttcctttcttatatggaaactctgcctcaggaagctctg

SEQ ID NO: 194612 - DNA, 502 bp, Zea Mays
cttgagcaagccgcttgttgctatctattatgcaatccacccatgcttcggaaatacggatttcacctaatcttagctgggaatagctacttcgtgtctgatcaggttcataataattcttttactgttcttgtaatccctttcaaagttcattgaatcattgaatcttttctaaatcgttttttcattctttaactgcagaaacaacatgctgttcgggtgtacagaaatgctttgttcgtttacaaacaaaacccttggagttacatcaacaatcatgtacactttaatattggaaggtagttagtattttttagctcctgtccaggttttatcttgtgtctgtctttatgctgtacttgactctgggtgtactgataggtggtatggagttctcgggatacttgacgtagccatcaagcacttgcttgaggtcattgcttgtagccatcagtcgctgactacacaaaacatgttcctcaatgattttttccattatgtt

SEQ ID NO: 194613 - DNA, 313 bp, Zea Mays
tagacaggccttgttcaccaatcagatggagatgatttgagcgaagtgagagaccggtgtaggatgtgcacctctgcacacggtggactgcggtgacacattggctatggctgtgttggatctaaaagcaaggaaaaaatgcaatcacaactagggatcaattgctacaatcttatgttagttctcacaggtactaacaaaatgattttcaataatcgtactttaatatgttttctttggatttaccacaaaactttgctggcacaggttacaacggctgccgcgacaactcctcggtccaggtctccttgcc

SEQ ID NO: 194614 - DNA, 518 bp, Zea Mays
tggtcgccggaggccggtaaggctatttttggcctctcgtgacacatgttttcgtcgtcaaacaacgatttcatgcctcccgtccgccacccatgatttggccactgagactgctaaggctgtttatggcctcccgtaagctatagcacacgtttttatggtcgagcgaccatttttaagtacgtgttccaccacccgcgttttggtccccagagcaccttaaagttgttcttggcctcccacgagctgtagggtttagggtttaggttttagggcctcccatgacacatgtttttgtcgtcgaatagcgatttcgtgcctcccgtccgccacccatgatttgaccatttagactagtaaggctgttttggcctcccgtgagctatagcacacgatttcatggcccagcgaccatttttatgtccgcattccaccacacgtgtttttgtccctggagcaccttaaagcggttcttggcctcccgcgagctatatcacacatttccgtggccaaacagc

SEQ ID NO: 194615 - DNA, 823 bp, Zea Mays
ttgcgatccaaactgctggtgcagttttacttgtcacaacccttggtggttcagcataaactccatgagcgacgacggcatggcctccgctgcggtggagccgcccaagcgggagcaaaattttctagtgaaggtggggatggaggcatggacgcagtcgttcgcggttgcacacaaagtcaggttggtgcacatcctcaagaatctccacacctcggaggtgaaaatctactccgacgcgtccaaggagttcataggagtactggatggtgagtctggcggcgaggtgctgcaggagtacgtgcaacagtcaccgcagcttggggagctgctcgaggcatggcggctccaccgggagaacccggggatggcgcacatacttttgctctttgcagctgtcctgggccaccctgatggtaagctgcggcgacatggttcggttaagaagagcttggacggtgtcgctaggatgatactggaggataaggagaagatgggggatgtgtatttggagctgaatagtggtgagttccgacggcagaatgcagcactggatttgcttgctgcaattgtcaggcgtggagggggtctagcgtctgaggtcgctgagagatttgattttaagatacctattttgccgcagctggctgggacaatgaagaagaaggggagcagggatggaaggaatcggcggaagggtgccgactttgggtccacaaggcggtcgtttattgggtttgccatgtcatttttggaggttgggaatccaaggctgcttagatgggtccttcaacagaaggaggtatattcaggggtgcttcgt

SEQ ID NO: 194616 - DNA, 721 bp, Zea Mays
cctgcatacaactccagtatttcttgtcgccgcaaatggacgagtagactcaaatttggccgaacgaaaatgaaaccccttaatgtcgtaacgaccgtaacttctgacttttacgattgcgtaagacatctgaagcaagtcctcgtctaaatttggaattttatcacactgtcaattagatagtgaaattagatttcttaaacataatatataaagtagaacaatagtgttaatttatttacatgagctcagaaccaattaatgaaattgggcttcccaagtcttcctcgaagtgcattttcatactgcctcgaggacaatttctcattaagtcgtgattggaattctctgttacaacaaataaacaatagcgtattaagtcacgactacatagatacacaaatgacaaatttcatcttacttgaaatacggagtcatctcatccatattttcatacatatagagcaaagcatccaacttttcttcgcgctcgggatgatattcggtggatgctccgacagtcttgccctcaatctcaaaaatttggagattgttgtgagtccctactttgtcatcatgatacctcaatgtaggggcattgatattgtgctcgtctgcaaagtatacactcgtgaacgctgctacctctttatatttgaattcttcagctatgcacccttcaactcttcctttgttaccaaccatagaactaagtttcttt

SEQ ID NO: 194617 - DNA, 360 bp, Zea Mays
tttcctgtgaaataacgcaaactccagtgaagacacaaattttatagagcagcataaataatacattataaaattttgttccatacctcgttcccatcatctaatttgcataaattgtctataactatgtcttctgtttcatacgcttcgacctatatcatcattacatacatggatcattatcaacatgtaattatgcaaaattcataataacacgatgtgcgtacctggatgtcatcaccagcacttgtgccacaactctcaccagtacctatatcaggctccacacgcatcaataaccctaataattcgtccatcatctctagggctttatcattcccagctttagacagactcgca

SEQ ID NO: 194618 - DNA, 305 bp, Zea Mays
atcatttacctgagtatcgagcgggtccccgacctagcggaaaaaaggagacatttaactatttgcattcatctctgcgtaatgtgattgaacgctcattttgtgttttgaagatgaagtggagaattctgttacacctacccagttatcctatggccaaacaatccaaaataatacatacatgtatggctcttcataattttattcgtgacagttctttggcagataaagaatttgaccgttgtgatgaagatgaagattatatgccaatgccatcatctcagcctagtactattcaatttggg

SEQ ID NO: 194619 - DNA, 826 bp, Zea Mays
gtggaattcttgcagatgatcaggtataactagctaacaccttccatgttgccaagacaaatggtcaattgtgtcttaaggtcatttggtatttttcagggccttggtaaaactgtatcagccatatcactgattcttactgagcgcccaccagttccacagtcatctactaagaacgagccatgtgaagctgtaactctagatgaagacgatgactgtattggacctcattcggaaaagctgatgcggacatgtagctctcaagtgacaagtaacacagtgaagcaagaaaatcctattgtagcggttaaggcaaggccagctgctggtactttggttgtttgcccaacaagtgttttgcgacagtgggcaggagaactgaagaacaaagttacaagtaaagctaatttatcttttctgatatatcatggtagcaatcgcaccaaggatcctaacgaacttaccaaatatgatgttgtgcttactacatattctatagtaagcatggaagtaccaaaacaatcaaatcctgatagtgatggagaagagaaagggaagcctgacccgtatggtgcacctgtgtcctcttcagggagcaaaaagagaaaggcatcctcttctaagaaaacaaaaaataaaagtgttgcagagagttgcttgcctgaaaaacctcttgcgaaagttgcttggtttagggttattcttgatgaagcacaaagcattaagaactaccgaactcaggttgccagggcttgctggggtttgcgagccaaaagaagatggtgtttgtctgggacacctatacagaatgctgttgaggatctct

SEQ ID NO: 194620 - DNA, 574 bp, Zea Mays
catcgaagataacacgacgggagatcatgagacattgagtggtgaagtcatgacatcggtacccattgtggtcgagtagtaatcaaggaagacgcgtcagatggagcgaagaacaagcttatgaggagcgatggcagaaaggttggggtaacacgcacacctaaaaacgcaaagatggtcataggagggagtggtgccaaaaagagcaaagcggggtgtgggggcgctaatcgtcgtagtagggagttgattaaggaggtgagtagcagtgtgaatgctcttagcccagtaacaagtaggaacaaatgcctaaaagagcaaagagcgcaatatgttgtcgctagtgcgaatcatgcactcagtcttgtccttctaagaagtataggggtatgacatctggagctagacatcatgaggggaggaaaagaactggaaggagttatcaaactcacagtccttgtcatactagacggtcttaatagtacaaccgaactgagtggaaacccaagcgaataagtgcagaagagataaaagtatcagacttggaacgcaaggaaaaagtccacgaataatg

SEQ ID NO: 194621 - DNA, 345 bp, Zea Mays
tcacaatatttatgtcgttcgaacttggttgcgtcatgtgattgctatgtcgcactcttgcttagtcggatcgctcccgttgagtcggaccgccattgccgagtcgcgtatttttcgcatgccctgcaggcactgtccgtctctcgtgaccattgagtcacaattgcgcctgttgcgcacattatgtggacttattgtgtaccccgattactgagccataattgtgcttgttgcgttaattaagaaggttggctgtgttgtcgtagccctgatggccacacacgcgttgacacgagacactagagcttgtactcgtgtggattgtggtgagttgttcaagcccct

SEQ ID NO: 194622 - DNA, 535 bp, Zea Mays
tccactttgatgatgttccaacaaaccttataaaacctcccagtaaaaccatctgggccaggggccttgtcagcaggtaggttcaagacagttgctagaacctcctgctcagtgaaaggggtgtccaagatggagaggttatgagctgggaggccgagagcagctaaatcaatggtattctccctggagaccgactgaccaataaggttggaataaaactgatccactaaatccgctttggcagcatggctagtaataatattatcaccgtctttcagcaaggtcaccagatttttccttttccgatatctagcatgcatatgaaaaggtgtttgcaccccctccttaatcctggatattcttgatcttaatcttaccatggtacgcttgaaggaggccagcagcagggactgtttcttgagtctatttttaagccagcattcagccggagatagggtcctgtgatcttgagcgatttcgagtttatgcagcaactcctttgccagacaaagctgcgagacaatatgccctacct

SEQ ID NO: 194623 - DNA, 1348 bp, Zea Mays
cgccgttctcgacgcccgcggatccaacggtccaacactgggtttgcccaacagcccaaggtatgttaagtgcaatttgcaaacctagcttgctggttgctgttgtgctctactggacagcacgggttgggctaggatttatgcagtttttcctgttggaattgttgattcatttttcaattgttgatttgttgcagatttttttttttgcattcaatgtattgcgagtacttctatttatattgctacatttttagctgttttatacttgtactagctcgtggtttactacggttgttatatatcatataaatatgtattgaggtattttgtttatttttaaacactaagatatatatagtctggtggttagggagaaccagtcgggttgggtggggtgggccaaaattaggtttttaatataatagtatagatgtatacggaactgttttgttttggattatatccaattatgtattggagcactggtttggcataccctaagttagtcttgctatagaaccctaagttaaagccctgctatagccgctaccattgttttttttggtgatattcatttcatggatcatgataccacttggttgattcaatttccttttgttcattgtggatatggacatgaatctctgtttttctctttgaagtattcatgttcgtatgtgttgcaattatccaccaacatgctgccttgttaacatagaatctcataacttgtttgctgtgtttcactagtgatggcagacgtccaggaatgccattatgattcaacgtcacaggccactgacagcttgcatgttgagcctatatatgagtcgttcctatgcccgcttaccaaacaggttatgcgggatcctgtctctattgacagtggtgttacgtttgaacgcgatgccattttgaagtacttcaatgaatgtcttagcagcagaaggaggcttgtctgccctgtaactaagatggagctcagcaacactgagttaaatccaagcatagctctgaggaacactattgatgaatggatgaaccgcaatgaggtggctaaacttgacgtcgctcggaagtcattgacttctgatagcacggaaagtgatatggtacaagcactccagtatgttgatgagatatgtcagagaagtcgatccagtaggcaggttgtgagaagagatgggttgataatcatgattgctgacttgttgaagaaaagcagtacgaaagtacggcaaatggcactagagactcttcgctccatcgcaaaagatgacaatgacaataaggttcttttcttgatgcttaatttgttagcagaacttaactttgtaatatcttt

SEQ ID NO: 194624 - DNA, 501 bp, Zea Mays
cagaaaatgctgatgtgctgggtcgaataatcccttgtgtgagcatagttgtgcactgtcgttccaattcatctttctgcagttgtggatacttgtacggtctaacagccactgactgtgtccctgtttttaggtgaatcctgtgatcacagtggcgggctgggggaaatccttgtggttcttgaaacactgattcaaatgactgcaatagttgctccatcatctgagggtctgccatatgtagtgaacgagtggctggttcatggatgtcattgcgtggtgacccaagtcccttccaaaagacccgccgacccccacgccagaatgccatacagaggtcgtcaaagtcccataagattggacccagcgtacggaggaaattaacccctggaatgacatcgaaactgtccaatggaatggcgtagcagggtattgcgaaatgctcgtggccgatgacgactggaatgccctctgtgaatcccttgcaggccactctttcgc

SEQ ID NO: 194625 - DNA, 295 bp, Zea Mays
gtgtaggttagcacccgattgcgttgagattggggcgttcgggcctaacatggggggatctgaccatggcgccgccgcgcccgtgcttacgttgtcgcgtcggatggctgggtggagaagaagcctcttcgtcgtccatcctgggatagacggttgtgataagaagtaggaatattgcttcgcaggaaagatcagggccgcgtattgagaatcgaacggtgtagattcgatcctgtggatcactatgcactttaaatcctggctgtcggacctaatctgaatggctctggatgcg

SEQ ID NO: 194626 - DNA, 511 bp, Zea Mays
ggcccacaccgccgtctgctccaccgtccgggttggttggttgggacgcgatcgccctggctgccttccagactcccactctgactccactgatgggtcccgagtggatcgcggacaccggtgctacctaccacaccactcctgaccctggtatactcacctctgttcgccctccttcctctctcccttcgtccatcatggtggcgaatggctcgtgtcttcctgtcacatctgtgggtgtcgccggcccttctggctcttttcgcattcccgatgttcttgtcgctccttctttgatccacaatcttctttccattcgccgttttactgctgataattcttgttctgtcgagtttgactcttctggtcttactgtgaaggactcggcaactcggcgccccctcctcagatgtgacagcaccagccccctctacacccttcggcttccgcacgccacctcttcttcgtcgtcgtcacctgccactgctgctgtttttgctgccaccacgtc

SEQ ID NO: 194627 - DNA, 413 bp, Zea Mays
agctccgtcgggaacgcagcaccagcgatgattagtggggctttgcggatgatgccggcgcaggtgatcttctcaccattagccaccatggccgttaggcggggacgttgttggagcggaagacccgttcgccgagcggcttcttcggagatgaaattgtgggtgctgccggagtcgaggagggctacgagctgagcggcccctagtgtgaccgcgagttgcgtggtgtccgtcatggacaccccagccaccgcctgcagcgagaagcagggggcgtccctgtccccgtcgtcggtgacgggttcggtgtcatcaatctccaccccgtccacgaagaaaatccgcttgcaaaacctgttatggccacgagaatacttttcgtcacagttaaaacaaaggccaaggcgacgtcg

SEQ ID NO: 194628 - DNA, 427 bp, Zea Mays
aattgggcgggtctaagagctttaggagggcctaaggacgctagaacaggcaacagaggaatgcgagctaaccggaatcgagctggccacggcgaggttgctcttcgcggtgttcttcaacggttttggggaaatctcgaattcacgtgctctggtgggggtttcgggatgccggtgggtgcagtagatgcttggatgcatggcggagctgggggtacggccaatttatagcgagggtaagcggcggtggcgaatttgaccgagcagtactggcggccggagatagggaagaatccctggcgcggtgagttcgtggcaaacggcgtggcaagcttaccagagctgatttgacggccgtaagaagccacggcgacacggtagaaaagttaggccacgcggcgcacggccgggaggcggcggtcaccgg

SEQ ID NO: 194629 - DNA, 548 bp, Zea Mays
agctcaggctccaccactgtcgtgggcagatagccattagggttgggccattcgatttaacttaagagaattgctcgggtagcctcagggatggatcccgtgtacttattaccgccagggagagtgatgaggacatcctccactattacccgttggcaaagacgcaattggcccagttggcccaattgtagtcggacgacgaccgtgtgagcctcagaattatcccaccttgcttaacttgggaggaggaagccactttaaaagggagagccacccttcccccattggactagtcttttggggcgattgggcctttccctgagttgggtgtgcgtaaagaactgttgggctctgggcaaccctaatttgttgggcctcgaccaaccccacctaggctgggtgtatcatctgatatcagagctagggcccattttaagaaggtgggaatgatgaggacatcctccactattacccgttggcaaagacgcaattggcccagttggcccaattgtagtcggacgacgaccgtgtgagcctcagaattatcc

SEQ ID NO: 194630 - DNA, 636 bp, Zea Mays
ttcagggatcatctgaaaaaagtttaagtgatgtgcccagtgcgctatgttggatctagctctaggccgtgataggattggagagctggtgttttgatctccggtgtcattcgattccagtttggcgcgcgtttcacgtctgagctgggttgggcggccgcgccgatcagttggagtgggaggtcggtttagactagggacacgcccatcagtctcattgatgcctcaggtttacgggaatggctcacgtgaatgggttaatgtaggagagcaggaggagcgttcatgacaagcgtgaaattgggtcgctgtgctttagctgtggttgataatattcacagcatgttattgagtgtaaaagaaacttgcacacgagttctagtcactagatgcgttacaaacagggcttatacttttggggttagacagctacaccattagatgtagctcgatacagaggcggcggttcttcccttcattgagtgcgcttaatcttgagggaggtgattgcatttgtggccccttaatacagaatcatagatgctccattaaatccatgccgactatgggcctgtttggtttcctgtctaaggcccctaaggttactggtttcctgtctaaggcgcctaaggttat

SEQ ID NO: 194631 - DNA, 672 bp, Zea Mays
aaataactcagacggattgatgcaaagtgcaagggataagagagtgccaaatggtctctttgtcaatgacagaaatgggcagaacaggtccagatttgcaaggacccgatcaagtcctgaactcacagactcgtctactgaaggatttcgtggtaggcggactaatgcagttggtatggaaaaatcttttggtgttgattacagcagaagaaacatcttgattccagaagtgtctagcaaccacagcactaagtcttcacaagatgaatcagtgtcttccatgaatggttcatctcaccctagtgcattggcagcttctgactcaaatagcgtttcaagcagctttcgtgatgataatggttttgtgatgaatgaagaactcccttctgtttctgaatcatcggatatgcaccacgatgaacaagttctggctaatttaatggaatccatgaagttgcatggattcaacggacagattcaattgccaatgcaaataccttctcatttgtctgtagcgcatccccctttactggctccaacaacttattcacaaaagcatttggctggggttccaccagctaacttaattgggacaccatggttgcccaatatgcagttcctgcatggatttgttccacctatggcccattacatacacaatccaaattttgc

SEQ ID NO: 194632 - DNA, 437 bp, Zea Mays
actccacttggtaattaattttctttacttcaaccattctgttgcaaccttacctatcttacccttgactgttttctccactttaccacctagcgagtcttgcctgaactctatccttatgcttttcattagtatcatctttacctttgacacctctatatcttacttgatgtttgtctcatacctgccctttaaaatcacctctctcccgtcttattctgagagctatactttacctatctttaccttggttgcatcctcttctttggcttgcgagtttgtaacttcgtcctttgctgtgcttttgtttgttactgcctccacctatcccacctctcaatcttaccttggtgattacattatttttgttatctaaaatctccaatctcctatcccaatttgagaacggtgttttacttatcttatccttggcaacg

SEQ ID NO: 194633 - DNA, 328 bp, Zea Mays
cgaaaaactggtcacaccggtttaaccactggatggggtcctccttgccatcaaacgtggcgaattccagtcggtggaaacggggaacgccgaccatggatgatgggaatgggttgctgggcatgtgctgtggaatgtttggcatttgtggcagaggtgatggcgagtgcggcaagggcagtaggtggattggcaggggtgtggtggtggttgtgtatgcggcggcggaggtgtggatgggctgcgggggtaaggatccctcagggactagtgtggttggcggcaggccgccgtaccctggcatgccgtaggggcagccagatggagg

SEQ ID NO: 194634 - DNA, 369 bp, Zea Mays
cgtggaggtggtctgaggggacaaccaaagtcgtcgacgatgggcattgtgaggagagtcggctgtggcgggcgcggcgggggaccacccgtggatgggccatgccacatggaggtgcgattggtccacaggttgtagagtgccaaccaagcagtgccaccaccaccacggccaagccttcgctgacgccgaccaccatcgcttccggagcctgagctagtaccacctctagagctagagctggtagagggtgcggtgctactgacattggtggagtaggtgagcgcgaggataaaccccttgaagcttgaattaaagtagtcgtgcgtgtaggctgcccagagctagagctgcgaaggaccattgtgg

SEQ ID NO: 194635 - DNA, 513 bp, Zea Mays
cacttccactctgggcccgccagtcggacgttggcacgacgctctcttcttccaggctcgcgacgaaggggcggcctccgtggtgtatccgctggtggtagatgggctataacattccctcccccttggaggcctgcttgaccccaagcaggggcataagggaagcattggcgtagagcttctaggtcctcccatgtagccaggtcgcgaggtaagccggaccattccacaagaacttgctgcacaaagcggcttcctttggtaatacccctggtctgaagcacctggataggaatagcaaaatccggtaagtcagtgggtaacgtggccggaacagggcccttgtatcctgcggccaacttgagctgggagacatgcacaactgggtgaatcttgcttgctgcacgtaatgccaggcgatacgcaaccttgcggactgtagcagtgattcggtaaggtccaaaatacttgaaacttaacttgtggtgagcacgcggcaacacagacgactgc

SEQ ID NO: 194636 - DNA, 320 bp, Zea Mays
gttgtttcctataatgtgcatgaaatcaaataacatataaatcttgttaaaattctgaccacgtacctaacatgtcagcacgggaccaagcctgcatacacatgagtgcttccaccattgatggtgcaagcttactacggcgtggactaattattcttcctcctgtgctaaacacggactcagatgccactgttgaaaccggaattgcaagaacatcacgtgcaatctttcttaaagtaggatatttaagcccagcatgctgccaccactgaatgatatccaaatcatgtgtcctaggaagcagtggttcctataagtac

SEQ ID NO: 194637 - DNA, 677 bp, Zea Mays
gcggatgttgtagtagcacttgccatacttttgggcctagagaagatgctcgcaaacctccacggggaaggtgtcacggtcgcacaggagggcgtccactgcctccacttgagctatccttgcaacgtgtggaagtagagacggtgggggtcggttgtacaccacctagaagggcgtggtgtggagcgccatatgtaacgaagtattatagcaagactacacccaaagaagccagtcaacccaggcgcacgaatgatcccccatggcgcaacagagtacatggcgatcaccttgttgacaatctttgattggctatctgtttgagagtggaaccctgtgctcaaacggaacttgatgtcgaccatcttgaagagggcgtgccacatgggataggtgaaggctgagttgctgtcgctgaaaatggagatggggaagtcgtgtagatgtgcaatgccctcgaagaatgcgtgggtgaccgagacattcatgtacgggtggctaagggtgatgaagtgcgtgtacatggagaagaggtcaacgacgatgggaacaacgaactttccatggaccttagggaggccttcgatgaagtccatcgatatgtcggcccacacctgggatggtacatcgagcggctaaaggagacaaacatgtagggttgtcatcttgttgcgctg

SEQ ID NO: 194638 - DNA, 404 bp, Zea Mays
tataccttgaaaggaaaaggccatgatgtaataactcaaacaagtctgaaccatgacattcctgaaggcagaagtaaagagaaactatcatctgaccctttcctgctagataatgttgttgcagctgattattttgattcacaggctgattatcaacagctggaaaactaccaggactgtgagttaagagctcaagaatttcatcgcatagcactcaacctatgcatgcaacaagaaccaacattagaagggcataatgctggaattgatgctttgctattagccgcagaatgttatgttaatccattttttctattgggattccagtctaatttagagcctctggacaagattgaacgtattcattcagagttgatgcaagggaatgcttcctctgtatcaaa

SEQ ID NO: 194639 - DNA, 330 bp, Zea Mays
agtggccgtattgttattacagaaatcctatcaaatgtgtttcgtacagtgatggcaacaacaccggatgatctccttgcaactgtatacctctcagccaaccggattgcgccacctcatgaggggattgagcttgggattggggatgcatcagtcatccgtgcacttgcagaggcatatggacgcaaagaggagcatgttaagaaggacctcaaggttgttaagttggttacatgtttgttctcagttcaactgctatggaattggaggcataacttgagttgctgttgtcttggtgattgtaggaattgggtgatttggggcttgtgg

SEQ ID NO: 194640 - DNA, 415 bp, Zea Mays
tggagcgggctagcatgtccatccgtatgccttgatccatgtttgttgacacctagggaatggtccctgacgatgatgcctccccccagttggcaacatgacggcctaccaaagcttcactgggcctctctagtacctcaccttcacccgacctgagatcgcctataccgtcgagcaggtgttccctcacatgcacacctcacaagagctgcacctcaccagtgtgaagcatattatttgctactccatgacactcttgaccacgaccttcttcttcgacccacctcagacttttgaactgatcgtttacactgacgctgattggggcccgacacgtgctagtcgacctcaggctatgccatgttcttcgacctccactttatccacaagcgtgtcgctgtcggtgatgtcaatg

SEQ ID NO: 194641 - DNA, 2256 bp, Zea Mays
tatgaaacaggacaatttaaactagttgatgggaagttctctccgtaagtatcattatatactttcttgacaagctttgtttttaacactttccaaatccctttgtatactaaattgatttaatatgtacagtatgcttaacttatgctatgcaaggattctaggaataccatgatctagtatagctcttagattgctacttgatctgatcaagctccataagggcatctttggaagcatggtttagacgtgaaacctgtgtaagggcctgtttgatagagctccactacctgattctaagttccagctctcttctctggtggagtggttttggggtgtgtttgttgggggtgggaagtaatttggagctattcatgggaagtgaccagactaaccggcattcgttttttaattctcttgaacctttaggcatcattttacttctctctacaagaatcgtgtgcagaagaaactttctggacgaggttaggttattgagttgcagtggtctcatagccttggattttcttaggtccacatatagttaagaatgagtataattaggaacactttaattatctttgtattgcatttctctgactgaatcgtaataggattgtagtatgagtagccccttttccaaagttgatttatcacattgattaattacttaatgttgttaatggaagtgaattaattatgtgtcatgtttttttattttatgctggatggtcatttagggatggtacatcacttattttatcagatgaagttgggcgagtattcattattggaactgggcaaggagagtcccagaaagatgcaaaatatgatcaggtacattagctgttactggactatcacattcttggtgattgctttgtgcaaactagtgtctggggtcaaccatacaaattgctacaatcccagcgacaacgtgaatcatttgctgagtagcagacattgtaatttataattcagttttatcacgtataaatttctgtaagagtgcaaatttggtgcctagggggctggtgttctcagctaaaataccatattgcaatatttaaaaaatcatcgcaaaaatcatgtatgcaatacacataaggttaagtatagctgcaataattcagtttgaaattcatcctacatgccaagaaacaaaataggcaaccaatcaacctggcactgttcatcatgtgctaacagtgacatttctgtttttttaatattagtgtgaaagatgaatttcaaaagggtcaccaggtcgtggtgagagctgtctgcatttgcagggtcgcgagtttgaagcaacctctctgcatttgcagggtcgcgagttcgaagcaacctctctgcatttgcaggggaaggcttgcctcagtttataccttttcgagacctcacgtgtgaggcactgggtttactctaatgccaaagatgaacttcaatctcaattgttgctgtcacacttaacttctggtgtcgtacatacatgatttttgtgaagatatttgaaatactgtaacattgtattttagtcctttagctaactagggcgccatatgattttcctttctataatgtggctggactgttgggttagtgttatttcacaaaattaaccacacatgtgcctatatccccactaatctacgtacttcatagagtttgcatgaatgcactcagatatgtttacactacatagtgcctcctccccaccaacccaccctgcaaagataaaagagtgaattttatcagcagaccctaaacctgccctgcggtctcatctggggtccacaacctctcaaattgcctattcgggaccttaatagttgtctttggcctttagattggtctaaccaggtctaaattggtccgctgcctatgtggcatgcaaccattgtgcctcctgcttggtggtaatctgaatcatattactgctcaccccagggtaatacttaacagatttgtttagtgctcccatggcgtatcacataggtagctaggactgatttggacccacctgaaaaccatgataagtttaaggtctgatatgcaatttgagagtttgttaatttgtatgataatgtgggacaagtttaagggccacttgtgaaatctaccaataatagtaataataaactatcatttagttgagtaaccatctttttatgcatttgggatgctgactatttgtgttcttcctaacagttcttccttggagactatcggcctctcattcgtgataccaat

SEQ ID NO: 194642 - DNA, 369 bp, Zea Mays
atccaaacaacccccagccacaccagcacctaaggccacaatctcgtaagatctcttgcccctgccaagccccaccgaacagcatcctcatgaatatgctgcatgatgatgctgatgttgggggatgcaccatcaaacacacattcatttctatgcttccatagccaccaagccaccagaatcactaaggaattaaatcctcttttctggttttttggcacctggcactcagcttctctccaccagtcttggaaggttgttgttgccaatcctggagtcaggcgatgcaaccctaccttatgcaaagtctgccaccaagtgtctctggcaaaaacacaagccactaaaatatgctgaactgtttcctcc

SEQ ID NO: 194643 - DNA, 416 bp, Zea Mays
tggttaccctttatgttggaagtaattgaacttggaatttatatcaagtggcacgagtttccgaagtacattgacatttttttcttagatttttgttgttgtactggtttaatagtgttagcatgctgtataggcccatgggcctttagggtgttcggttggcccaggagggtggtcggctgcaaccctagagcagtggcggctgcagcccctctcccctttttggtagtattggatctgattggcaaggtgtccctagattagcactttcctgattctctagattagcactttcctatttctgggacatccttgcctatatgtactgagccttgggctccctcaataatcaatccaataatcattttcccagccatcctctttcatggtatcacgagaccgggactagtccttcc

SEQ ID NO: 194644 - DNA, 748 bp, Zea Mays
acaggacatcgggaactagcaactgggctatttcaggcgcagatggagtttagcttatttgcccctcctttgtatctgacaacaagcagtaagcaaaggctctttgaacacttctggaacagtggtggtgccagaattggggaagatggagctcttggatggtctgaatggttagcaaaagacgaggagagtagacaaaagttgtctatgcaagaaaattcacaagagactgaaacaggaggctggagtggttggtttgatccttctctgggtaatactgagacaaatgatttatcaaacaaatcactggaaccatcattgaccgatggaaatgatgctgaagaccttgatgctgaggactcaccagcacaagatgatgttgaatccttgctgaaaaagcttggtatcgatgtagatgcagagtccaatagtgaagttaaagacgcagaaacctggaatagatgggcctcaatggagctgtcacgggacaatcagcaatggatgcctcttcatgaaaattatggtaattggagtttgtcccaattattactaggtttttgtttgtttgaagttaacttaatgctaacactggatttttttttcttggtaaaagtaggatcaattcattgtggtgatgctccatctggggaagacaatgaccagctttccagagtaattttgtttgaggatgtaactgagttcttgttttctctatcttcagaggaggcccgcttttctctgatgtgcc

SEQ ID NO: 194645 - DNA, 2110 bp, Zea Mays
tgaaatacataacaagatgaaaattctattcacaaactaaatatattgatccaaaccatttgtaacttactttggaaaagtccagcagaaggaacagcgtcaagaaaggtttctacagccccaagcacatacctgaaaataaccaaataagtttctaaggcgcggaagagtgactcctgcatgaatgcaccctacctacaggtagaaaaatattcaaaacatttgcagttccgttgagtgttatcaaacataattcatgtactcttctgtcatggacacgcttcatatggccctgaacccaggtaagaaggaccatgctgatgcccaatggccatgccacaagggtatggatagaaaagggaatgggacttttgatctatttcttgcttacaaccgaaacagacacatccccatctacatatcttcaacaatgcttttatttcatcccctatgcaggttttgttcaggagcaccttctggttcagattttggagcaatttattgggaaaagaggagtaacagaggatcaaggatctgtgtctgaagttggagacttgtttaatagagatttttgcaaggaatgggtggaagtttagcaataggatagggtcttaagttcaatagatctaagtgcgatgtctaaatttcagtacctttgctcactgtcttgcatgacagtctgtggctttactgatctctttggttgaatgctgttaagcagaaactgagttttttcattttatcaatggaataaatatcccttaatccaaaaatctatatatagatgagatgactttacctttaagaacctatctctaaaattaacgaaatactctttccatcccagaatatagataaaactagttttggcattcacataggtgctataagcagtctactgtaaaagaaatacccctcctatctccatgctcacaaaccaattgggcaacatgcaatttttttaaagaaaaaacttttatcgctgccatgtgtgtgtggcatgcacattttcatttctttaatttgatgacaagaaaattaaattggaaggaatcactgccatgcacagacgctggcaaacatgcagctcacttgtccatgcagtgggggcagttaatgattatgggatggagggagtaaataactgctcaacccaatataatctaatctccaacagaactaactcatccttggcctgttgttaatagtacgtcagtacctagtgtgaacagcacagcccagccttaggggaggcggtttggcactgttctttattatgggtcctaataggctggaatggcatcttctcacagtttcctaattggtttcccatctatctataaactatactaattcaatcgcagagttgagtggatccttataaaatacccaacaggtggagctgccctgcattccaattgttgacaggccaaatatacaacaacaagaataaagcctttttagtcctaaacaacttggggtaggctagagatggaacccaaacaaaagccaaaagggaggataaagaaaaggtaaaaatgaggtattagtagcagtaaaaatagtacatctggactaaaagacttgatcatggtttggacatgtgttctgatttccacatgctcttatccaaagatgattctttgggtgtattccaatcttcaagtctatttactgccacctcccatgtcaggctgggtttcatctccaaaatattggctggcttttttacgttggcggtgagcagcatgtcacacccccttcccctcctccctccctccctccctctatattgaaacaaaaagaggcataacagttgactactttatactcctttactcactacatactaatacatactatttatcacatgctgactagaagaggagttcacggtgatacctacgcagcaggtgcagaaagggtgcattaacatcataatggcattgtaccagaaaaatgaaaatgacaacctcaattagtggctgtaatgggctaatggcgtgcacttacatggatccagccactgcattcccgaggaagaagcataatcctatactaactccaacttcaggaccaagtgcacggcctataagataatatggcccac

SEQ ID NO: 194646 - DNA, 344 bp, Zea Mays
ctccaagagacagactaccgtctcccggtccagcgcggaggctgagtaccgggcagtggcccacgctgttgctgagtgctgctggctgcgacagcttcttgaggaactccatgtgtcgattacttctgcgacggtcgtctactgcgacaacgtgagtgctgtctacatggcagccaatcccgttcaccaccgccgcaccaaacacatcgagatcgatattcacttcgtccgtgagaaggttgctcttggacaagtacgcgtgcttcatgtcccatcttctcatcagttcgcggacatcatgaccaaaggcttgcctgtacagctcttcaacgagttcaaatcca

SEQ ID NO: 194647 - DNA, 281 bp, Zea Mays
ggataatcggtgtctggtgtgtggggccggaatgacagaatcgcctccctccttatcccttccagcgaaacggatgccgaagtcctcggccacgcgatcgtccgtggacccccttctaaactggctgcctggatgtatatatagacccgtccgcagcgtcctctagccattggagtgagttggggtagctagccgtgagagaaaagtcaccagaaccgaagaacggtgcgggctgcgtgggcatccggtgtctgcggcgtcatcgggacgtcaatgtggtg

SEQ ID NO: 194648 - DNA, 506 bp, Zea Mays
ttttatgtattcatcgttgatgtaggttaaagtgggttaaaaatataaattatgccacttgtgattggtgtttgacgacgagatgtgtgaataatcagttggtgtttcactcgtctagtcgataattgttaacataaataattgtgctaaaatttgtaatgagaatgcagggggcacgtggtgtgtttggatgcgacaagtaaattggaagtgtggggtttgtcgaagcaatgtgatgtcgaatgtgtatatcaaagtgcattgtagtggtaattgcgttaagttaatcggtagtgtctcgagtgcacaccacaatatggttgtatgtgaaacatagtaaaataaggtgtgctcgatggggatgatcagtcgttgtaggtggaaattgtcttttcttaaatagagaggtggtgacatgccgaagtagtcatcgcttcctctatgtttatatgtcgagtcaaaatgcgaggtactagtggtacgctaggcggtgctccagataaatt

SEQ ID NO: 194649 - DNA, 441 bp, Zea Mays
ttcctggtgacggttttcaacccttcgtcctcccgatcgttgcagagatgccagtccctagtggcggtcgaggcggtctccgagatcgcggccgccttccttggcgcctcggtgagtccgtgtcctttcctcccgtgccccacatcggttctaggtttttctgcaatacaatggtcactcttatgtgctctgtatgtaactatttactggtcaatgtgtatggtgtttgccattgtaggtggaggtgggtgaagaggaggctctggtatgctcaggttcactggtcgcagaagcagttcggtgtgagttgcgctccatgatgcttgaccatgggtggaggtgtctgggagagaatatttacgtggactcgaagtttgatcagaatgatgggaggactgatctgtgcgctgtgaacgtggtacaatgtttgtggcatttttg

SEQ ID NO: 194650 - DNA, 515 bp, Zea Mays
agcaagaagtatatggcatagatccatatacacacaatctactgagtgacattatgccttctgatcttgagttgtcacctactgacaagcatatctttattgaggaggtaattgacactaggttacacgctcctctctctatttcagttcaagctttgaacttacccaatattttcaatgcagttgcttctgaatgcattgaataagcaagttaggcatttcactggtttgggaaatacccctatgacttacaacattaggcctgtcattgaagaaattcaaaggtctgcggaggatagtggtgacagacgaactttgaagatgtgcttggggatgctaaagtccatgagaaatcgctctgatcagaactttgttgcttatagaaaggtatcccttcagcaacctattaactcagggtcatttcttgtgtctttttgacacgtttggtgcatcttttccagggtcttggtgttgtttgcaacaaaaaaggtggatttggtgtagatgactttgtt

SEQ ID NO: 194651 - DNA, 303 bp, Zea Mays
gagatggatcctccaaaggtgtcccatcagtcggacgaagagataagtgaagatccataggtgtggcaacagtgcgagtatcactaagaccagaacgatcaagaaggtcttgtatgtacttggcctgagaaagataaataccctttttagtctgcaaaacctcaatgcccaagaaataactgagtgcccccaagtcagacatttgaaattccttactcagagacgccttcacatgagcaatatggtctggatcattgcctgtaatcaacatgtcatcaacatatagtaatagcaacgtccgtc

SEQ ID NO: 194652 - DNA, 300 bp, Zea Mays
cgccttcctctcttcctcctgtgctcctccgcggcgctgctgcttactcgccacgccagagctgagcgaaccccacccaatctaatcccccacgtcttagtttccttctcctagccgcaccctgtctctcgccgtaggatggaagaagagccgagtctgctcgctgcccacgctgggagttagggccggaggcctggccgatcggcgggggcggagggagggtaatgagggctccgcaggagcgtagcatgagggatctctacgatcgcacgcggcacaaagatatggcagctccagagg

SEQ ID NO: 194653 - DNA, 363 bp, Zea Mays
caccagcgtgcttgtgcattgggtcacctctatgcatatggggaccaacaaggcagacacttatctaagccacgtgtgcaccacatagttccggcccaggctgcctgaagacactgcatgcgtgttgccatgactactcccgcatgaacattgtgtcatggtgcagtgtcagcatagttttgtactgtggccatcacgctatcggcctaggctgcctcgccatggttagcaacaccatgcacacgtggcatcgtggccgcaagttctagccacctcgatgtggtcgtatctcggatgtggctagaccgttaagtttaattccgcaattatttcggtcaccaaagcgattaagttttagaacag

SEQ ID NO: 194654 - DNA, 933 bp, Zea Mays
gtactcaaaacccttctttttgtccctattaaaatgttcaacgccaatcattagctttgtcttgatgcttttttgctggtgaacaaatttaacccactggtcaggatcattactgctctcacatttcaactgccagaaaggaaaatattcacttatttctggaactgtttgatcatgatgttgaggtgcattatcagtccgctgtgccattgcctgaatgacagcaaccaaaccatccaaagcaagcacatttaaagctgacaaaggactattcacaggaaatgcgctcttagacagaaggttagctaactcttcaaaaatatttgagcactgtagatcacagtccatatttgcatacatctcagccataaactctttctgccagcaaaaatcaattagagcctctagggcaacttcttgctgctgataacttgctccatatctactctgtgctaatcttaggataacacatgagaagaaagcctctatttgcagcttaagttcatggcgcagatggtaaaagagagtaaaaacaatgctgcacacagtcgacaggatcagagggctcattgacaagccaaaatgcattagattgcggaacaattcatcctgtacaaatgctaaaagtttttgatgtctgtgtatagacgaagccgaaaactcaatagccgaattaatcaaccccagagcaaagagcggcacatcctcatcaaagtcaattggactcatccttgggttcaactcaatgtcttctgctatgttcaagagggagcacaagaattgcaatatctctaccatacaaggaaccccaaagggctccatcaagtctttgtcttgcataacaccagaaccgtctcccacttcatcgccagagctgttcaaacatacgtagtcactcttcccgttctcagtctcctcagcacccaaacatgg

SEQ ID NO: 194655 - DNA, 433 bp, Zea Mays
cttggagcctataaattgagggcggggatagttgcgccatgtaatcgtcaagctatagcacccactctcatctccaatcgttccccgtagctccccaatttgggattacccccaaatcgatcgaagaacgctgcgaaaccaagctcgccgtggtcagctcaattcgggtcagctcctcccctctgctcccttgtttaagcattcacatacatcggtgatactcgccaacccatccaattgaattaggagcccactcgtcgccgggaacgcgttcatccacccacaacatccatggtcgtcgtggccagtgcaaaccatagggtcattagtgaaattaggttggggaaatggatcagggtaggtccaattcggtgacaggcgctcgggagcgccggtcttggccccctccggccggtttagctcgccggagcta

SEQ ID NO: 194656 - DNA, 748 bp, Zea Mays
atctgaggacgtgtgtggatgttcagtgacaggcactgggatgctagcttccacgactctttgaggatcttcacgttgtccttctcagctattgctgcatcaaacagctccctcagccctttccccttggcacaggctttgttgaacgtagggatcaggttgacgtccccatactttgccctcttccgagtcagtagctccaagaggactataccgaagctatacacatcgcttctcggcgacagacacccctcgtgaaagtatacaggatccatgtagcccatgcttcctttcaaggtcgtagtgaactgggtagtgccactgaaaaggaaccttgacagtccaaaatctgatacctttgtcgtcagattgttgtctagaagtatgttggcgggtttaatgtcgccatggtaaatatggttgtcgctctgcgagtccatcgaatgcatgtagctcagcgcctctgcacaccctatcgcgatgcccagcctcacgtccaaagggatagaggcgtcgcttctgtggagtatgtcgtcgaggtttccgttggagatgtactccgtcaccagcatcagagtgctttcgccaatgcagtagcctatgagtttcaccacgttgttgtggttcatcacgctgtggatgttcacttcatccatgaactcgtcgcgcaagtcctgtcggatgtatcttttcactgccaccagatcatcgtcggcgtcaaggacccctctgtagacttctccgaaac

SEQ ID NO: 194657 - DNA, 531 bp, Zea Mays
ctcgcatcacccgccaccgcgtcttctctcatgatgccgctcgctctaccgctccttcggcttgccactacatcgtcgtctcgctcgctcctcgccaacgctcactgccttgccgctgctcgcaggcttctccgctcgctccaccgcctccgccacatcctcggctgagaaataaagaaccctaactccccccgccgtggtggccgcgcaggcccgaccggcaccaatatcaaagatcttgcggtcgtggatggcgtagggtgtgacctgtactgggggagacggacgttcgacgcggccgccgagcagacgctgtcgtactggaccgtactcctctcttcctgtgctcctccatttcaattccatggctccgcctccgtctaactaattgatgatgaaaattggttcatcagtctcacggtatcattaaatttgattcctatactatgcttgcgattctgtgtcatctgcttgttttttgttggattggaccaaacttttggacagttggacgcatggagtatcgaagag

SEQ ID NO: 194658 - DNA, 406 bp, Zea Mays
tgactcctccagaagccttatggaggatatacggctttgagcttagtcagatatctccacctgtgatgcagctgcaactccatcttccaaacatgcacatggtgtcgtttcacgagcggcaaatggtcgagcgagtcgtcaaccgtccaggtgttgataggtcaatgctcacagcatattttgaggcgaatagtctacacaaggaggctcatggcatcctgtatcgtgacttccctgaatggtacagttggcagagtggtaagggaaaagtatggcaacagaggaaacgagatacgggtggacaagtcggtagaatagtctctgctcatccggccgagggggagcgctactatcttcgtgttctcctaaaccatgtgactggcgccacttcctatgtggatctaag

SEQ ID NO: 194659 - DNA, 551 bp, Zea Mays
tcataggctaaggatggggtcgaccaacggtggattccttaggaaggagtcactgggcgatggtaaaactaagcattctaccccggtgaagccgcgtgcgaccgtgagcctcggggtcgcctagttgtctcgtatactttatggtggatggcacaagcagcatggggcccgagcgccattatttgagctacactgacccttggacctcatggcctgggcctcagtgcggcttgtcttgttgtgccctgcaagtggcctgcgcactcaggcctagtcccggtatgccatgagtgtgccgtaggccgggggcgtgtggtccataaatgcgccgctgtctgagggttttgtaggttatggatgcgttgtagcctgagggtctcataggacatgagtgggaggcggaccggcatgtctgccacggcttagtgtcaggtgtagttaatgcggacggtcacttatggtaggtcaatcttgggtcgaacgagggaacctctcgagtcatttcccttcggtttgttcggcccccatgtccagctttaccacgccgaccc

SEQ ID NO: 194660 - DNA, 327 bp, Zea Mays
ggacgagtcgtcggacaacgatgagatcgaggtctgcagcggcaggtactcggtcgactcgtcaccccgccgcgacgacgtgacccgacgaacggccgttcccctctaccgctacgccaccatgcctgggcagcagagctactactccactgatgatggctactcggacttgagctcttcgcgtgacacggcactgccaagagctaaggcacagccgttgggacggccgcaggcacgggtcgttgagtatgctgatgaggagtactccgtatctccaggcacctccgaattttctagccaggtggaagggcagagcaatggtgtgac

SEQ ID NO: 194661 - DNA, 454 bp, Zea Mays
attttgagcccagcccatctaagcgcagtacaggaaacaaaacctagcggctagcattggtgcctggcgcgtcctctccacgccaccgccgtcaagactgcaaacgcaagtgccgtccctctcggcctctccctcgcagcctcgctagcgctaaaactctaggacgccggccggccgccgtgcgccgtccctctcggcctctcccagcctccctcactagcacgacggggcctccctctcggtcagggagtccagccgtccagggagcagggagtccactgtccatccgtccgacctcccactccctctccctcttaggaagtccagtcgtttgcccatccagggagtccaggacagcggtcccatctcccactccatctcctagcctccacgagctgccgtccaggggcctccctcgatgccggccacaggctcaggcttccatccacggccg

SEQ ID NO: 194662 - DNA, 308 bp, Zea Mays
cttagatcagtgaggcagtttgcagaatctggattcaggcccgattccggtggtggtgtaggtccagttggcatcacaacaggttctatattgttgtcagaactttgttgtgttggtgcaatgggaccaatattccgccgtccttctgcatcttgctgcaactcagtatttgttgtttcgtccggaccaatcggaccaatctccgctgttcgtagaagctcaatcccaggagttatcatgtcgatgtgcctgatagtttcagtgtatgctctatcagatttgcttcccgctcttcccagtcgcattaa

SEQ ID NO: 194663 - DNA, 297 bp, Zea Mays
gagaaatgtgatgaagatgaggactatatacctgaaggtgaggatgacattgagggacaacaagtggaagaacaaggagtggatgaagttcttgaggaggagaatgaggttgacatgaacaccattcgtgataatatagctaatgcattggttagttgaagatagtatcgttagatcgatggtggatcaatatatcttttgtagttatatatgtcatggtggtggatccaaaacatttctcaaattattatatatgtcaaacattgacaaacataaatatttcattttcataacagt

SEQ ID NO: 194664 - DNA, 761 bp, Zea Mays
acgggagataatggtgcgattggattggcgatcaaagcataggtagcctttgtggtggggggaatagccaaggaagacacaaagggttgagcgaggggataatttatgtggagtggtggcagaaaggttggggttgcatttgcagccaaaaacgcgaaggtgctcataggatgggttgcagccgaagagagcaaagtgtggtgtagagagtgcgagtgttttggtgggtaatatgttgaggagatatgttgcggtgccaagagctgcagcccaaaaactggggggaacactagattgaatgaggagggtgcgaatgatattgttgatggaacggatgacacgttcagccttaccattttgagctgaagtgtaggggcaagacatgcgtagatggactccatgggaggagaaaaaggtgtgggcttgaaggttgtcaaattcgtgaccattgtcgcactagatgctctggatagtgacaccgaactgtgtacggacgtaggcaaagaaattggttagggtggagagagtgtcaaatttgaggcgtaaaggaaatgtccataaatagtgggagcagtcatccaaaataacaaggtagtatttgtggccagacacactagtgatgggtgatgtccagagatcacagtgaattaactgaaaattacgggtggcgcgggaggaagaggtaggaaatggtagacggacatgtcgtccgagttgacaagcatgacatggatgagtactagtatttttattacaagaaa

SEQ ID NO: 194665 - DNA, 402 bp, Zea Mays
atggattggggtagaaccgaacaagcccttaggatcctccctcccacttttcggttttctgaaatccatagcttgccctcttacattttttttcatcaacgttgcagcatgccttgtatattgtctttatagctgctggtgttttcgtcgcaggatggataggtaagtaactattgtcatttaaattgcagttctcactcagcagaaacacaaattcctgattatttcagttctgcagaggtatcatgctggattctcactggggaacgccagactgctgtcatcagatcaaaatacgttcatgttttgctaaatcaagacatgagtttttttgatacatatggtaacaacggagatattgttagtcaagtgctcagtgatgtattgctcattcagtcagct

SEQ ID NO: 194666 - DNA, 292 bp, Zea Mays
cctttatctcctgcttaattgtttatcgtctaggagtaaaacagtctatttacatgtattagccaagactctaaacatatccagctaaatgtttatctctactcctattatgaacgtaaggagggcgtccacagcccctcgtgcccctgcttatctcacgcgcggctacctcccccacacgctgctttcaacaccggcagccgcaccccaaattcctccccacgcgttgctttctctccaccaatggcgcccttccccaacggctgccgagatgcacacgctgcggctgccg

SEQ ID NO: 194667 - DNA, 403 bp, Zea Mays
atattgcaggatcacttattcaccccctctaggttctctcaataacgtaatatcattcaatttcatgaagtctttctattgttgatgaaagcaacccaaaaaaatctatgaattgatcattgaaacgaagatctattatttaagaacttgtttaagtcaattttacattaaataacaattattgtgtttaaatgaagtttatatgtgacattatctatgcatttgcacgtttattttttagttagtataattttttaatgttatacctggccctagactttgagatatcttggctccgccactgtttctctccctcgttttcctcttcatccataccgtcgagaggtgctctaatcttcatattcgagttggaaaacttcgatttgatccatatagcttgaag

SEQ ID NO: 194668 - DNA, 320 bp, Zea Mays
ctaagtgtggaacaggataaagtaattaagtataagtatgtgttgcaaattagatttgccatagtgctttaaaaactgtagaacagaaactgcaggagcatggtcactggcatatggcctgcagtccagcgttgcagtgcctgaaccaaataccatgcttcgtgctatctctcctgcttaagattcaaggattgattcccctcaacctcgagtatttactccaatcccaacaaggcgtcagagcatctctgtacatagtgagcccaaaaggggaaaagaaacaccagggcctttctggcacaccaacacagttccggatt

SEQ ID NO: 194669 - DNA, 1874 bp, Zea Mays
gaaaatgtttctgttgtttcaaagattcatcaaacatacagaatcggctatcttaaggtcaggctcttcataattgttagctacagtaacttctatactccttgatatatgttaatatagtccttttacttagcctcttctatggcatgacattttttgggtgcatttgcaggatgttatactaccacgaatactggatgatgccactctagcaagtctgaacacaatgatacactcaaataatgcttcggttagtgtttctgcggttccgcctcaccccagtattggtatccttaaattgtttcccatgtgttacttatgatataatgatctgctgcaggttatttccctgctaaaggatgacacactctttattagacgactatttgccaggatgaggtcatcagatatttcaatggaatcaaaacgagaattggtgagaaggctttgttcttgttagtatcttcgctttttaactcaccattgtaaattattagttagcatcatcatagtgcaattgagttaggtagttgaaggataataaggcgagactgcccattgctgttggcattgatgcaaatgataatctaggactgaaaatgttactatcttcatgatttttgttgatttgttttgatgttaattttctaacaagagacagctggattaacagggctttgtttaagatctgtattatttttccttgaatgaattatataatttgctaaatttgattattacctgagtttagttgttctttataggaccttggatgtttaggttttgcttgccttgagggaattcaggttaatgctacacaaaagtttcatcacataaaaaatgccactcaatatctcccagacttttgtatgtggcttgcgcattttgggcccacctcatttctaatggaattgctcaagattttgtcacatgcatttgctatcacagagactctcttgtctttatgattagttaatctgaagcttgcttgctttgccattctgtttgtcttgcaattactggaacctggattgaaagtggaattccttggatctcgtttgttgaccctgctaaaatgtttctggtatttccaggttctgttcttgcatgaattttgcacacttagtaagagtctaccacttgttcagcaactgcgactgtttcggtaggtccttcaatttcattcttctttctttctacctgtaaaggcaacacaacactgccatggtattgtatcaattctccaaatgtgtaaatgcatggctgcaggctatctgtactacaaaaacaaaaagaaatatgaccatataataccggtgtgcctgagcttggtgttatcattgttttctctgcctggcagccctgtgctttgtctcgctatcatttgacttcagattgctgaggatcttgttataggtatatcaggggttaccattcagattttttacgtgtttgttacctagtacctataaccttgaaccgttgtccgcactacaattaatacttcaatagattgcatacaaccaacccaatataccttacagatttgaagacatttgtgttgctctgctttagatagctgtgaactctttttggttgccggaattcttagtagccaggagctaaccaccaattttttttcagggatctttcaggtgaaggagtttttgaaataatttctgatgtgttgcagagtcaagatagaaaaatcatttcagctgggtacttataaaagagtgcatttatatgagcatctttgttggcgaaccacattttgttcaatgttctaactgcagtttattgcgaatgcaggacagatatccttatactttttcttaatcaggaccctaacctattgaggtcatatattgtcc

SEQ ID NO: 194670 - DNA, 293 bp, Zea Mays
cttcaattctcgctccataagatggttgtagaggtgctgaaaagttcggcatatatcttcatcatctgacctccaaatgccttgttgaggcttgtgctcttcatttgggatgtgaggaggcaagacatggaatcgaatgtagaatgcttccgtcagattcatgaactgcattatcagacggaggccaccgggaaagaataacttcacaataactttggctgctgcacgttccaatactgcaaataggtttacaactgtcagtataaaaattatgtgtactagtgcttctcccc

SEQ ID NO: 194671 - DNA, 399 bp, Zea Mays
gtccaggtggccaacattgtggccgcctacaacgcagagcgcatgggcgacccatagtgaagggaggtgcgccgggggcagcatcatgggccaagccgaccatggaggaaagagaatgggggacgatcgtgttggctacgttggtggcgagagagagggacacgtggggcaccgacgtcggggaagaatcctgcgaccgcagaggaggggcacaagccgcaccgatggcaaaggagataaccacacataggatggcgctaggatagcacgctggtcgcgacaacagtgagggagagggccacaatgtcgtgtagcacgagcgacatgattctgcgagcgaaggaagaggcgccgacggcgttagtgaccgcggaaggtgctacatcagcaaaggaagtg

SEQ ID NO: 194672 - DNA, 1156 bp, Zea Mays
gagatctgcatgagaatacctttggtaggtaccttaatgtttggatggcttaaacaatactcttgtctgcaatggtactagacagatacccttaggcactggaactgaaatctattgcttttgttagctgtgtttcatatatgacataagcagaggggataatgaccatgttttcactaattattcttttctgtattaattactgatagactgaaaaggttgcaatgttgtgctcctaagtcctaacagaattaaacatgtaaatagctgaattggaataaagttgtgaacggttttagtttgtggttgtctgccattatcgtcattgtggtggatttttttattggtgctcttgctgatgcaaaacacacatgtaaacctgagatttttgtgcattctagaatatctggtcagatgtacagtttctttcttcaacttatctttatacttcatccactatggcaaacctgcagatgatgaatgaggatctgctccaagacctcgttttatacaaaaagtcccatgagaaagctgtttccattgctgctcgttcgctgatcacattgttcagagaggtcagataatttcttacaaattttccaatattttttctatatgttggaatcccctgtcgctaaacctctgttgattgaagttcagatctgtccttcattgttagtcaagaaagatcgtggccgtcctgtggatccaaaggctcggcccaaagcatttggagaagtcactgttgctagcaacgttcctggtgccgagttgctagatgaaaatatttcttcagaaggggaaagttcggacgatgagtctgatggttttcactccgatgatgagatggacttgacacctgcccctcctggaacagaagaaaatatggagggttcatctgttgcaaacaaacatgatgccgatggagataccaaagaggaagatgacgcatctgatgatgaagatggtacggatcaagatgactccaacagtgatagtgatgaactagacgatgactctgatgtggatgtgggtactgatatatctgatgaagacgaaggtgacgacggtgaactgaaagaaagcataaatggttcagaggatgaagctttagaccagaatgaagacagcgaagaggaagacaagtcaaaaggca

SEQ ID NO: 194673 - DNA, 573 bp, Zea Mays
gcggcgcgggacggaggtgcagctcggttagctcctcccccgtgagccccgtccggccgggcccgcgtcataggccgtcgtcgtcggcgttaggatctgggttaagcgcgttgtttagctttgcgattttgtgttttagtcgatctgcagactgggcttgcttttgggtcggcggttgtattctttcgtacgtgtcgtgtcgctaccgagtacgtacggaccagcacagtggtgcatgtgtgacataaataaatgctggttgtagcgtcgtcgtggtgtctagagtctagaactttgctattgctgcatgaggatttttgctgttgagatgtgagtgagatgttgccgtctctggctggctactagctagctagatctcaggacgcctgaactctgtaccttggcgactggagcccaccatgaacgtccttgactgcatgagcctcccagagaatagagatgcagccaaacgacttgatgatgattaaaaagaggtaggaagaaaggcctgccagagtggccgcgttgtccagaacggaacagggacatcactgcctgccaacgcgatctcgc

SEQ ID NO: 194674 - DNA, 2099 bp, Zea Mays
agcgttcttagaacctcacggcgatgatgtgaccgtatgttcgtattggctgtgagctgatcattttccattcgtgtgtcttgttttttctgtggtaggattcggcgacgtttgaatcggcgttggactggctatgttttaatctgcctggcgatgagctccccctcaagttctccagcgctggcgacagcaccatgtcgtctctcacaggtatgaaatttcaaggttttaaggtttaggcgatgaatggttctacatgtgtacacacatctctgtgcatgtgcttgtgttctcatcagtctactagggtaccctttgacatgaattggcgatgtgtgacttttctcatacatgtgtgcatagaacatatttgcatcattgatcatttgcctgcattctgcgatatacttttctgtgaagttgctgccacacccatggccaccgccatcggtggcatcaactagaccacgtgggcaatcgcaggaataatcagaggaagaggatctcaatggggaggaggaaaatttgcttccttcctctgtttgtcttctatatttatgttcggctccattatgtagtctatatgattataccttaggcttcatcttcatatgttatttgggccaatactcttgatggtccatgtactcgctagtttgtctcttcttttccaatatcgtataaatatgaagtgttgactttgtcttttcttttccactcatgaggctctgattggttgattaattaggtgtttctctttcatgctagattcatgtaatgattacatcgtttctatgtgttgtaggagctgaaggttctgttaaagtactgtccacagccaaggacaattgggtgccacagagtcgtgaacctgaggaggtgaaggtgagcaccgaggggttggaagttagaattggtgggcggagagatgagaatgtgtcactggatgatgggcgattgtcacaagctgcatggattcgtcaatacatggaacaacaagaggaggtatagatgagtgaacaagtatttttcacatgaattgagtcatctcttagtactctttgaaaaactgttggattttgttagtcttatgttttttttgtccgcttgcttagtctccaattgtatcgttctgtttcatacttctctcaggttgttctgaacttccagtggatactaagagcttctacatcatgaacctgtgcaacttacagttttagaagacaaataactgattttgttgtctaatctaagtagcacaatgttttgttctatttgaaaaaaagaacacaaaatggttacacaaattggtaactattgttcactgggaactatgtttcacaacaattcaagtctcttcttatttttattgcttatggtttatctttttgtttcaaaacgttaactatcctcactgcagttttagattttgacatggtctccaatgtgtagtttttttgtagaacgaggtaataccctgcttataaagataacatatgagtttttccaagttccaagccagggacaccagcgagcgataactctaatatgtagctttgactattacttgtaataactccatgccagtaaacattaagtaatagaatgtaagtccttgagatgacacatctactaatgttattttcttgtggtcaatctaaataatcttttttttacacatgaatgggaaatttatgaaaacatgacacctttcaccaatgtatctgaggttgcatgtacccaacatccgaatatcctatgcatacaatttcacaacctctatcaagtctttctgttaactgttattccttttcatttcttttaatatcatatttcttggtacattttttcttttggatatcactgatgttaggaagaggatgcaaattccaatgattcctctacatgggaggatcactgcttacaaagttttgaagttgtcgaagcaaagccaagtaggcggaagagcaagggtaactttgcttattgttttattggcattcatattgtaactatgacatatgttgtctactagtttttagttacatggccctgtggccctgacaactttttggaagtttacatagttgagatagttt

SEQ ID NO: 194675 - DNA, 583 bp, Zea Mays
ggaaataccccgtttttcatggtttatggatcaaaagtagtgttgcccgccgacctaatcttcggggcactgaggttgactttcgaaagcatagctgaagcagaaataactaggctagaagatatcgatgtgctggaggaagagcgattgaacacagtaattcagtcggctcagtaccaacagaccttgaggcgctaccatgataaagtcgtgcgacaccaatcttttgcagtgggagacttggtcctttgccgaatactaacggggaggggcggcacaagttatcaccactatgggaaggaccattcatcgtattagaggtcacacggccgagatcataccggcttactcagatggacgacacagaagtggggaactcgtggaacatagaacacctcagaaaattctatccttagcgaggcctcaaaactcttgaaggaacattgtactctgtaaatgtgaggatttcatcataaataaagttttcattctccaaaggcattcagactcttgacttacagctgacttcgattgggctggacttgaaatcaacacgcttacttgactaagggtgaccactgta

SEQ ID NO: 194676 - DNA, 753 bp, Zea Mays
tgtcgggcgttgtggaagaattgatcgggctgaggaggaactccgtcgtgcactgatcgtcagtgttgttggcagggaggattctggctgcgccgtggaggtgcgtgacgcgatcgcctcgaggttttgccttgaagcagggtcgctccgcatacgtcgtgttgcgcctaattctttcctagtcttcttcccctcggttgccgtggctgatcgggtgattggcgaggggcaatctcttcatgtccctccgctcaggttgcatattcgaaggtggtcgcgtcaggcgttcgctcctggaggtggacagccgcttgtgcctgttgacgttgaacttcgtggaattcctgcgcatctctgggggattgaggctgctgaagctgttcttggtgctttctgtttgattcatggttttttgcctggcttggtcaaggaggaagatatgtctgttctcagactgaaagtatggtgccggtcacctgtgctgctgccggcggtggtggatctccttgctgaagagccgatggtctgtggagaggatgggagctgggttcctagcacgttggtgttccctgtttctgtggtggttcttcattctgatggaagttcagattccggtgtggatccccctgcgccacccccttcgggctttgtcgacgaagatagtgatcatgagcatcatgtggagcggccggggcgccctgcgtcttctgttcgggttccaattcatttgcgtctgggtcagcgcagtcgttc

SEQ ID NO: 194677 - DNA, 482 bp, Zea Mays
cggagatgaagaagaaccttagcgcagtgaattcatgtccaccgtcgtggcaacttccccgacgacgatgggacagctatagggagtcacggcgacacggtggaaaggcagagccacgcggcacaaggccgagaggcggcggtcaccggtaaagttatcggattccgctgcggtgaacatggtacggtggccggagttgtttaatggctggagtctatccacgacgacgtacaccaggtgttatccacttaccccgagcacaagttggaccggcaacagcatgaatcgcggcggaaatcggtcgtcggcggtgagtctgccgcgctggcgatctcatccatttcagctactgtaccatcgcggagtgtaagtagtcgacctgacagacggagtttgggcctcattttctctcagatttctatggcaactagtccagtgatctgcagcaaacttgtagagcaatataccatctacaacattgc

SEQ ID NO: 194678 - DNA, 813 bp, Zea Mays
gtttatgacatttgaggccactggattccctccagagattctgagagaggtatgtcctctttagtttggctttgctacttgtggatccatggatgcattatctaaactttatcttaacctagaaattcttgacaatgtgggccgttgaaaatgatatctttgaaatggaaaattatcttctctcatagtgagtgcattgtatgcattgctcaatgatgtagcacaatggatttacggtgatgctgagtgccctaattcaacaataggttttcaatttctgggcactgtagtgaaatacttgtggctattttctgctgacaagtattgggaggattgatgttgtttcagattataaaatgaggctgaggcttcctgcttcttgtctctgccactgaatcaacaaagagcttcttcatgccttgagttgcttaagtaagcagccatattcacttaggatatttaaccactttctcattgtttgcaaccaatttttacttgctatggaaaataccaattatctgctgcaggtgggcatgcccttatgatgcttattcgttttttcatttaagatccatgcagctggtttttcaaatcccactccaattcaagctcaaacatggcctgttgcgctgcaaaaccgggacatagtagctattgctaagacagggtctggaaagacgctggggtacctaatccctgcttttatacatctgaggagatgccacaataatccgatgctgggccctacagtattggttttggcccctactcgcgaacttgcttcacaaatacaagccgaagtagttaagtttg

SEQ ID NO: 194679 - DNA, 944 bp, Zea Mays
gccaattaggagcctgagggtgcgacggcctagggtttgtagctactggtgtcgtcgcggcctgtggaggcggtaggggacagcgacatctgcagccatggacgacagcgagctccatgaagaggagaacccaaccaatagtgccgtaggtgagcttgacgatgcccaggacttcatcacaaccagttatgcttttggtttggtgttggtgcaagtgccgatgtcgggccgattagggttgtcaaatagctgggctctgatgtgttgggtgtgctatgttagctagtgtatttgctgggctttgtgcacggatctgtggtgcctgtttacaaatgggatttgataagccgatggcatgctgtttggtgctatataggattaaatgttctttttttatgtgtggaaaattttagttgctggagctacaggtagcacccatgtaagatgaggtggttagcatgctgatctgctatgggcttgtaattgtgaagttgcaacctttagagtcaggctttgagaaccataaaactgcaaaatggttttgagtatgaagatgatcctctgcagggttaatggttccatgatggtcttctgtattttatgtgacgtgttgaaattaatttgatgaaatgttggttgaaactagcattgcgattctccgatgctgcattttaataatactgaaaacatgtaaccctctgtttgggaatgcattatgtcatcattaaccctcagattcttagttatcttaacaatttcctgaggtcactccaaaactggactcatttgaagctaagtgcaattgattgattgaaactagcaatgagtttgtttgaataaccccatcttacttattagttattactgttgtcatccttacagatgacgatgacgacgaggattatgaggagcctggtggaggaaatcacttattggggtttatg

SEQ ID NO: 194680 - DNA, 1280 bp, Zea Mays
cgagacaccgctcgccggacctcttccgagtttgggaaactctggcgccatgaatccaatagtatagcacacgtcgcatgggagaaggcacattccaagagcagatgatccacacacacggtttcagcccggtggcccaacggcgcagctatcaccatccagtaacatccccggaattcacccctgccttctgttctgctgttcaccccgcgtgcgcgttcttcctctcgtgcgacaactgggcgaccgccgccgtcctacggcaggtggtcacttcttcgtcggttccttcgctggcgacgagcacccaccaagtatgcgcaccccatttcttcccttcctcctgtgcgaaaccgagctcccaatccctaacttgagctatttggctatctgtcatcggatctgatctatttacaagtttatgcatgccttctgatgcctgccactggattgagagcagtataaaatcgtgttttttttccaccaagggagaattttcttttccccaatattttagaaagatagaatggttgttgcacttacacttctgcggtttttttttttgctagaacaagcacaggaaggaatcttctagccttttcttgcgtgtgattttgtgccccttgtccttttgtcccttagacaactagctggaataatttgctcatctctttttcgtctttattattattttttctgttcagtaacatgaatccagcttgagtaccgcaagtttggttatcagatgcaaacagtttacaaactttgtatcaagtgcttttggtgtgatttttcccaggggttttggggatatttgagcacaattcgaaatgttgtggttatttatccgtattctgatgatgttcttcctgcaggccctggaagaagcaaggattcaccctcaagctcgaaactgaacgcaactcccgaagacccggtgaagccatgtctgcggggagaggcgatccaaacacccctgccaacaggcctctgttcctgagtgctggggtgcccaacttaggctgtcacaatgttgcagctccagctgcagcaggcaacagcggctcgatcgcctcgcaagtcttattctccccatgctccacgtctgtcctgaatactattcaggaggttcctgctccacaatctgctctgttgagtccgataaaccgtgcaactgaacaaggtgatgtgccctgcatccagccatcctggaatatgcctgggggttgcacgcaggtgcctattaatatcatagtgttccatagggaactcactagaag

SEQ ID NO: 194681 - DNA, 497 bp, Zea Mays
ttttcatccactatattttcagacatcatgctgtgaatcctgcaaggagcctgcagaatctcatgtgcgatgttacactcatcaacaaggcagtctcacaatcagtgtcaaaactcttccatctgtgaagctacccggggagcttgatgggaaggtatggatgtggcacaggtgtctcaggtgcaaaccaaaagatggaattcctccagccacacaaaggatagtcatgtcagatgcagcacgtggattatcttttgggaagtttctggaacttagtttttcaaatcacacaacagccaatcgaattgcctgctgtggacactccctccaaagggactgccttcgtttctatgggtttgttgcttcttattgtatactattcagtttcttatctaataatgaccaacctaacagttagcgttctcaatcaaacaggcttgggagcatggttgctgtcttccgttattcaccagtagacattctttctgtcaacttgc

SEQ ID NO: 194682 - DNA, 326 bp, Zea Mays
cgacgatgctggcaacaaggatatgctggacgaaggcgaagaggcaggcgtggcgacacatcaaggatcctcgagtcgcagcggcgagagctacgacacacaggaagaagagactcgacgacgccagtggagcgtgacgacggtacttgtcggcaaagaactcgaggacgaacgtggtacagaccaacgacgggtatgtcgatgtagtttgcaagtgtcgaacagctcgcagactgtgtgtaggagacgcgcactaatggagtcgacaacgtgtagatgtaacgacgaggatgacgacagacgacgatgttgctgcccgaggaggc

SEQ ID NO: 194683 - DNA, 311 bp, Zea Mays
ccacgtggcaaggaaagataatacatcctaaggtgcatcgatgggtccggacctccaagggacaccggacccttgtacgaacgggtccagagctcctagaaggacatgccgggtccctcgaataagctccaggctccccctagtaaggtccaggtcttggcaaggtcccgagacgaggaggaccccaacatgggtaggggtccggtgccggcacgtgtccaggccttgcccaacgcttcccgctcaggcgaaggcccgctgctgccgcgtggcatgtggcccgtgacataagctagcaggccgagcctgat

SEQ ID NO: 194684 - DNA, 287 bp, Zea Mays
tcagaagctgtccgccttcttggcaagcttcaggagtcccttgttatggatgtgaaatggattttacaagggcaagatgctattcttggccgcaggtcaacaagacagcagcttgttcatattgcccaacgaaaagggctttcaacaaaggcacaggtttggaaaccatggggttggtccagcttgcttagcgatgttattcctaataaaactgcaaaaaggaagttggaagtcacatcaattgaggaaggtgaagttgtggatgatactgttgatgctaaaaggcc

SEQ ID NO: 194685 - DNA, 307 bp, Zea Mays
gactcaacctctatcacgcttgacaactaccacatcacccgatttatctatttggaacaccgcctgcctagcgtactactagtactccgcattttgactcgacttataaacatggagtaagcgatgactacttcggcatgtcaccacctctctaaatcaagtaaggacaaattccacctacaacgaccgaacattcccatcgagcacaccttatattttcctgtttagcatacaaccatggggcggcatgcactcgagacatttccgtttaatttaacgccaccactattaccacgcatctcagcac

SEQ ID NO: 194686 - DNA, 634 bp, Zea Mays
gaaatatcaggaactccgactctgggcctcgtatagaggacagaccttagcacggactgttaggggaatgatgtactaccacagagctctcaagatgcttgcttttcttgataccgcctccgaggtagacatcacagagggtactaaacatcttgcatcctttggttcagttaggcatgagaatgatgtgtatcccatgaatggtggtttccggcggcaaccacaaaggaggttagacagaggaaccagtactgtaagccaactgtttaaaggtcaggaagatggtgctgctctcatgaagtacacctacgttgtcacttgccagatatatggaaagcagaaaattgctaaagatcaacgcgcagaagatattttaactctaatgaagaaaaatgaggcacttcgtgttgcttatgttgacgaggtccatcaacgaggctatactgaatactattctgtcctggtaaagtttgaccagagcttacagagggaggttgagatataccggattaggttaccaggtgaactgaagcttggggaaggaaaacctgaaaaccagaaccatgccatcatattcacaagaggtgatgcagttcagacgattgacatgaaccaggataatttttttgaagag

SEQ ID NO: 194687 - DNA, 558 bp, Zea Mays
gagggacaaccttttatcaagtttggagggcattgagattctcaagggggtaaaggtatgccttgtgttgtcttatcttatttatttattgtgggcctatctttctgttttttcccacaccatgtctggtcaaattgcttgtttattctagtattctacactactatagcttatgtttgtggtaatgtttgcaggttcttgatttgagttttaatgattttaagctccctgggtttgagcctcttgggaactgtgttgtcctccaggtttgcgctatccccatcatattaatcgagattatagaaggctcacatgcacttatttttgtgcaccataccatgtagcaactgtatcttgctggaaatcaaataacttcacttgctagccttcctgaacttcctaacttggaggtattctgctatcactgacttgatcttagcagttaatttacttattttgacatagattaacatcttccacttgccattcttgttgcaccagttcctttctattgctcaaaacaggctaaagtcagtttgtatggctcgacagcctcga

SEQ ID NO: 194688 - DNA, 1248 bp, Zea Mays
ccaatagtaagcgatgctgcattttgtacaatgttgaggctagcacgttgcacagcccctcctctttgcaattgggcgctcgacattgctgctgcgattcgtgtgatatctgttggtgattttgaaatggttttggatcttacacctgtgatcatggaagatgatagtaagaagccatcatctggcatctttgaacaaatagtaaatgggctgactattgcgtgcaaagcgggtcctcttccagcagattcatttactttcgtctttccggtatgtcctccactatttttagttcaaccataaattcactcctattccccttgacatttccctttctctttcaacatttacttttccctgtttttgtccttttatttatttatttatttatttatgttgctaccttttggttcagatcatggaaaggatccttctatcttcaaaaaagacatgtcttcatgatgatgtgcttcacatactatctatgcatatggatccaatactaccacttcctcgacctaggatgttatcagttaaaaatttcttagttctttcagacttaatgctgttccttgttttattctcagactcctagaatttactatttttttttctgtgcctaggttctttatcatgtgctaagcactgttcctgcctatcaaccttcagttgggcctatgctgaatgagctatgcctaggtctaagaggccatgagttagcacaggttgttattttgtagtctgttctccagcttatcctattttattttatctagtgctatgtattcttacctcttccttttttcaggctcttgtcggtgtatatgcaaaagaactgcatgttaggcttgcctgcttaactgctataaaatgtgttcctgtgcactctgtgcaacgagatttgcaggtgtcaacaagcctctggattgctgctcatgatccggagaaggtttgtaagataacatccctgtgaacttgacttggaactcctctatttttttacgttactcatgtgggagcttccagcactggttctgccctttttagtgaaatatgttgaacttttttcattctagagcaggaaatgatgtttattttcttgctcttcggctcatgtaccttctctaggtggttgctgaattagcagaggaattatgggaccgctttggttttgatgccatcactgattactctggtattttcaatgcactttcccataaaaattacaatgttcgtgctgcatctgct

SEQ ID NO: 194689 - DNA, 439 bp, Zea Mays
gcctgattcacagctttgtaaagttggtcaccaagatcctttctgctcgcttggcaccattgctgcccaagttggtctctaataaccagagtgcattcgttgaaggacggaatattcacgacaatttcctgccagtacaacagcttgccagagccgtgcataaaagcaaagagcctcacatcgatgaagttggatatttcgaaagcttttgacactgtgtcctagctcttcctattagaggtcctgcagcatctgggttttgggagatggcggtgtaaccttctgtgtttgctcctgtccacctccaccacataagttttggtgaatggtgtccctggctgccccattctccatcgccgtggactcaggcaaggcaacccctctcccccatgctctttattttggttatggacgtgcttaactctctgatccaactggc

SEQ ID NO: 194690 - DNA, 406 bp, Zea Mays
atttggttcacacacgccctgacattgcgtttgtagttggctatgtgagccggttcatggaggctcccacaactaagcactagagcaccgtcaagcatctgctgaggtacatcgctggaacaaagacccacaggtgtgtgtatcaccgcaggaaaggaacactggaattgatcgggtacagtgacgccgatcatgctggagacggtgatgacaggaagagcacctctggcgctgtcttcttccttggacagagcccggtcaattagcaatcccagaagctgcgtgtggtggcactatcgtcgtgcgaggcagaatacattgctagcaccaccgcggcgtgtcagggagtgtggctatcacgcctactggcagatttgttgaacacaaaggtcatcgtgtcgctgct

SEQ ID NO: 194691 - DNA, 1775 bp, Zea Mays
tgatttgtcacagcaatccccttcgctccgttattagcgaagacagacgtggcatcctggcaggggtttccttcaggagacgaatggtccagcactaggacacattcacaatttgataaaattggcattacagagccaaggtgatgcacaatgaccgtgttttgccccttcaagcctttgtggctgctcagggaagagcttctagcacagcaatccttcctttttttgttctgtaatgaatgaataaccagattgtctatcaagatctgaccaaagttctaggtctggatagatttgactctgagaaccttttggatgtctcaactacagttttgccactgaaaagtgttgctatggatcctacaaatttgttgcatctgaagactgtcccatctgagaatggactcaaactggttgaaaattcaagcgacaatctacaggatttggcttgtgaaagcccccttgctggaaaagtcaagttcatgtgcagctttggtgggaaaatcttgcctaggccaagtgatgggaagctcaggtatgtcggcggggagacacgcctcatctcgataaccaggaacttctcgtggaatgaactagtgcagaaaactctcacaatctacagtcagcctcatatcatcaagtatcaacttcctgacgaggatctggacgccctcatttctctttcgtgtgatgaggatttccagaatatgatggaagaatactgcagtcttgaaaaggccaatggctctgttagactaaggatgtttcttgtctccctcaatgaatgtgaagattcgtcattggacgcaaagagcttggagagtgaaccagagtatcattttgttgttgctgtgaacaatcttgcacatttgggccggagcattagtggcaacaatttaatgagccagccgagccatcaattggatccttctccacactcctttagagactcacctgtctgtcaagccaatacagaagttaaagccaaagattctgttggagcaactctcaatgaatcttcctctcagtttttccttgctccatacacacaacaattggtggtcgagccatcgacaactccgtccccaagtttaagtcagcagaggaccatgaaacaatctaggaagcaaccccctgcagatgaattgacaacaaaccaagaacatgtgagtagaagtgaagtttccagtagctcaaatttgaaaaccatgcttccgaaccatctagataagaagcacaatgatgcggacaagggtattggaactggatctcccttgaaacatcttcacattcgaaggcaggtaaaagattgggctggaaatggtattgacttgattccacataccaactatgatgtttctactccagtggaagcgtccttatattctgaaaaggttatcatgcatccagaaaatgcaggagggacatctgggctgcaggaacatgccggtcaaattctaggcatgccccatgccttctcagatcctttactaaagaatcttaatgacttgcctgcatcgaatttgtcattacctgctggttcttacataacccaatcattttcccagaaaatatgccatactaatgagttggagagaacaataagtaggactgggccagcttttgaatgtgtcaaaccccctgacattgcccgtgcagatgaatcaaattatcttgtttctaatcatattgaccaaaggtacaatcaaggaattattggcccagccagttcacagccaccagtatattaccaagatgaaagtttgtcaagtaat

SEQ ID NO: 194692 - DNA, 372 bp, Zea Mays
gtcctcccttctaatcccagttattgcatgtagggaaaccactgggtcctgctcttccttgtcatcatctgtgtcacccttgatctcatcgtcagcaaagtctgtgacctccagatagaatagcctgggacagcggtggccgcgtacatagggctcgtcacaattgtaacatagcctttgtttatgttgttctgccatctcgacgggggtgaggcgcttgaacgggactggtgattgtgttggtggctgctggggtgtattcttggcggcattgtcgtcatgtgtgtgagcactggtggtcgactaaatggtttggggccctaccagtctgttgccgctgttgagcaccatcaatgacctgagagcgacgtt

SEQ ID NO: 194693 - DNA, 758 bp, Zea Mays
ctgatgttttggaaattacagaaatgagtatacgaccctaaacgaaaccaatttcaagtagtcattacaaaaacgagaatgacataataaaaaccccataaagaaaagttcctgtgaagcaacttacctctaaatgccacccacagagcacccgttaggcctgcaatcatctgagttccattacatgtgtaagtcggctgcatgaaaacctcaacctatttagtcaaagaaatttgtactcataacccacaaacgtaattgcatcggtgcatgtgcaactgtaacctaaagttgttctgagagaattaaactacaacagtatgcggaaaaggcaggggttattcttggggtaatctttgatccatgctacgtcaccgtcttattgtcacagctaagcatggagtgaaccacatagtcttccatgctttgactttagattgttgttccaatgtataatatcatctcatctcatctgtatctatctattcttcgaatttgcaacgtcaattggcaactcattgaaccaaatggtttaaagttgcatatcataaaaaggccatctgagcatgttaaacactctccatttgggacaagtttgatcacacactaacccatggtaacgccaggttaaaaaccttgaggccgagctctagtcaagctataaatcacagctcagtttttgataaacgactttgtccacccaaacagcatgacagtcgtcttccccattcgtatccccctccccccaccaaaaaaaa

SEQ ID NO: 194694 - DNA, 1785 bp, Zea Mays
tctgataaggccctttcataaaaattccttttagttcaagaaatacattcagtattttttctttactttgctgttccaggtttcttgttttagtttttgtaatgttccatgagctagtgctcttttattatgttgctaattaccttagtttcaggggatcacttgatgaggcatatgcaggggatctatcatttgcagattctctgcaagcatttggtgctggtctggatgatcctattagtgttgccattggaggtcagcaaaccgctaatgtatctattgcttaaatgcttagttctgtccttccatcctatctatatctagtaaaacaacaacaacaacgccttttagtcctaagcaagtcgggataggctagagttgaaacttaacatttgtgtttttttccgtttctaatttctagttgttccactgccactttgagtgttttggatatttacggcatatttttttaatgtctgtagatcagaacaatggatccttagaatataaaagtacagatacatacatatccatgcactcattaattaatcaaattcctcctatttaaaattgcagagcatgataattgatagctacaaatttagtcatttgttggtgtttctctattgaaattctctcaaaactatattctttactatgttgcagggcccgtgatgtccaagtttactactgctttcagggagcttgggacatacaaggaactccttcgttctcaggtactataaatcatacagcatgaaaatggacctataatttctgctgcataggtagttcgtgtaacacaaaaggaatgaagaattgaaaggaaaataacattactgttttgcagtctgagttttcatttttgaactcaacacaagggcttgctcctgtgagtctgggcatgatttgtatttttttattggcatgatctgtattagtttcagtttacaatattcacatcgtttcttttcttatgtttttgagttatttctggaacttctatactcaatctgccacctgcagtttcacatgtttaccacctataaggttcttggattactttgtaaatttcaaagatattcaataaacagaaagcacaagtgataaaataagttggcatttgcagaaccacaacagaaaaagtatgactgatgcattttttatttgttgaaagatatatctaccactatccttatgactgtaatactgtatacttctccttgctcaggatgccacgacgctggttactgtagtgaatgctgtacagttttttttctcctcctttcatgctaggtagcaaatcgttttttccctcctgcgtggggttacctgctagtatttctatgtctataaataacacagataggaagaaattgccaattggggtccttgcgtccagtactggctgcattatctagaagcaggaattttgtgttgaatagaataatcatttgttctgcgatggagtttttgtttgtcctcacactgatgtctgtagatttattaaatttcttttgctcaggcatgctgatatatcacatgtataaacaggacaaatgatattttttgcattctaattataataagcattttccctccaaacagcttgagcacatgcttagtgatcgcctgtcacagttcattaacgtggatttaaatggtgtgaaggtaaactctcctctcttctctccacttgaaaccgcacaacatagcatacttgtaactataggttgtaactgaagtaaacaatatagtagttcaggtgctgattttcaatgggca

SEQ ID NO: 194695 - DNA, 902 bp, Zea Mays
cttgagacgacagaagtgtacattgtgatcagcttgtcgacgaggagagacacccaggtcgtatacgtcgatccgaccaccggcgccctgcgctacctggggaagcatggggaggacgtctttgattcggaggcggcggcgctgaaccacatcaccaacggatcaagggttctatccaagagcactacatatgccaaggcagtgctgggatacgcggtgttaggaagccatgctctgctcttggtcgcgacacagttgagcgcgtcggtccccaatctgccgggaggcgggtgcatatacacattggcagagagccagtggataaagatccagctgcagaatcctcagccccaggggactggagaacagaagaacatacgtgagctggccaatctagacattgatggcaagttcttcttttgcgagacaagggatgttaccaggcccttcccgagtcctattacactacgggaaccagatgaggaatttgtttggaacgagtggctgtcaaagccctttaaggacattggtttgccaggacactgtgtcattcttctgcaggggttcgctgagtgccggaactttggaggtgctgggcagcaaggtgggttagtcgcccttattgcacgccgaagtcggttgcatcctggaactcgctatttggcccgtggactgaacgcatgttcaggcacaggcaatgaggtagagtgcgagcaactcgtttgggttccacggaagggcggacagcgcatcccttttagctcgtatatctggcgccgtggaactattccaatatggtggggcgcagaaataaaaaacgcggtgtcagtggaggctgaaatttacgttgccaacgatccttacaacggaagcttacagtactaccaacggttgggtaaaag

SEQ ID NO: 194696 - DNA, 536 bp, Zea Mays
tgcggcgtggggctcccgttccacgaccggcagttcccgccgttcatgctcggcatgggctacctcctgtcctgggacctcgtggaatggatcgccacctccgacatggtcaggagggaggccatgggtacgcatcacttgcatttcatgcatccgttcttcacctttacttattgactagtactaacatatactactctattactacacttctcatgaagttgtgttttcaggacatgaatgacagtttttaacaatgtttaccaacatgtacatatatgcatattcaggtgtagaagatctgaccacaggcaaatggctgaacatgggccacaaggccaagaaccgggtgaacatcttccccaggatgtatgactacaagagtgccaaaggtgaagacttcttggagaacaccatcggggtgcaccagctgaagcaggacctgaggtgggcacacacactggagcacttcaatgtcaccaggctggagccctccagcatgctactacacaacttctagagagtgaggaatgagg

SEQ ID NO: 194697 - DNA, 538 bp, Zea Mays
atcgaaaaaagcatttatttcgcaaggagaaacctcaaaagcttccacctttaagccaaaacttacttcgtaggcgttccccgactcaggcgtagctttcctctctttcgatttcttcagtcttcattcagagccccaaaggagaagagaaaagcagccccagcaacaccaggcagtggcaagtcaaaaacatcacaccgaaagggagggggattcctagcacggatagataggctaagctagcgcggcaaaggcgcaaagcaagacccccaacgcttggtttgcttgctcgatacacttgagcgagctcaagctatgcgcccgaagcttccgattccaacacatccagcagcgacggaaagctcaatttgggtgacagctacctcgacgcggcggcgggaactgattctggtagagaggacctcgattcggatggtggggatctcgattttggccgcacggcgtttgcgccgccagctccctcgagtccgaggcaacagcgacgggctctcgaggtgagaagcgtcggacaggacgg

SEQ ID NO: 194698 - DNA, 335 bp, Zea Mays
tgattctgctgtccgtacgcgccatcacgtacctctgcgacgccatgccgcgtgccgctgacgccgtcgtccgccacggcctcctccccgtgctctgctcccggctgctaaccatcgagtacgtcgatgttgctgagcaggtaacccgaaagatcttacggcctgatcgggtgatcacatttaccttgaggcgctttatccgaccattctgttgcgtatgcagtgcttgcaagcatttgagaagatatcacggaggcagcctacccagtgcttgcaggctggcatgatcaacgctgtgctggcattcattgacttcttcgctgcaagtattcagg

SEQ ID NO: 194699 - DNA, 343 bp, Zea Mays
tcaagatctattggctcaattggccctggccagtcctaatgagcaaggtttttctttacatcaaggtattattagaaaaggggatcaaatctggatagctaacaattctgcccttcaaactaagttgatttcagccctgcatgatagtgtggtgggaggacattctggtggtgaggccacttaccaaaggatcaagaggttgttctggtggaaagggctcaagtcagccgtgtttcagtttgtgcagcaatgtgaggtgtgtcagcatgctaagcatgaaagggtgcattatccgggtctcctacaacctttaccagtgcctcaaggggcttggcaggatctt

SEQ ID NO: 194700 - DNA, 650 bp, Zea Mays
gtattttttgtggggaagtctaccgtactagcttactaagtcgttcatctgttgcactgctggtagaacatggtccatcccaatcaataccatcaaatataattgtcaccagtttcatgcgtcgtgtgtaggtttgtttctctatcctgtttctcgcctatcagtagacttgttacccacagatggatcgtgagaaaccattcaagtccaacataatagaaagttgcacgcaacacaacgctttcacatagtaccaccctactagcttactagaccctcgtgtgtcgttcagccgttactactggtaggacatggtccatcccaaccaataccatcaaatataattgtgtgccaccagtttcacacgtcgtgtgtaggtttgtttctctatcccgcttctcgcttataagtggaccgttaccccatagatgtgttgtgggaaaacacccaagcctaacataatagaaagtcatatgcaacacagcaacacaacactttcatatagtaccaccctactagctaaaggaggaagagcgagctataataaagggctcgggttccttttcaagtttcaactcatacttttcttgaccttttgtttaagataattttaatatttattcttgtcggtttaatatatgatatattga

SEQ ID NO: 194701 - DNA, 604 bp, Zea Mays
gccactctctttccatagatgaatcaagcatgacgggagaaagtaaaattgtaagctactccaatatgctgctttggaagtaacacactttacctgtgaacctaacttggccacatgtgggttatttgaaggtacacaaagatcaaaagtcgccatttctaatgtcaggttgcaaagttgccgatggctatggcacaatgctggtgagtttgacttgaaattttctggacaggaatccagccaagcgtctgaaattttgacttgaaaattatatgtttagatttgtcttgaacaatacttaatactcttctagattattcgacttcatatatgtgtagaagaaaacagtggataaaggtacatgaaaatagtacttctcttggtcaaagtttgagctaaaactttactgttgttactttccagtgtcaaacttactttaatagtttaatatgatatatgcctattacctctttaattactagtagtgattggaacagtgtagagcgtttatcaactgaaccattctgttgtaatgtccaggtaactgctgttggagtcaacactgaatgggggttgctaatggcaagcatatctgaagattcgg

SEQ ID NO: 194702 - DNA, 598 bp, Zea Mays
ctggactaatggatgggaggtgcggtctctcgccagctcctccacgatggcgctggccccgcccacctcggtctctgactgggtgactgactccggcgcctcctaccacaccaccccggacgcaggtattctgtcttccacctcacccccacccctcccttcttccatcgttgttggaaacggatctaccctacccatcacctcaaaatctcctttccgtttaaccaatgtccttgtcgcccccaacatcattcagaatcttctttccgtccgtcagttcactactgacaactcttgttctatggagtttgacccgtttggtctgtctgtgaaggatcttgccatcaggacccttctcgctcggtgtgacagccccgggcccctctacacgcttcgcctgcccgcttcccctacatcgacctctgccccgcatgttcttgcagcggccgcctcttctgtgacttggcatcgtcgtctcggccaccctgggtgtgatgtgatgtccaagctctacagtagtacctctgtttctggttgtaggggatcttttgagcacctctgtcatgcttgtcagttaggtcgccatgttaggctccca

SEQ ID NO: 194703 - DNA, 325 bp, Zea Mays
ttccagatcttcttgatttggtgaaagcacattttccatctcatgttgctttcttgtcatcggttctttttctacaacatgattatctggctaaagttgctagttgttggccagatatattcttcagcagcatcagactgttcaaggatgatatcaatgctgaccatgcaaacacagttgaggacgaatgccagaacctctctgtttcaacagaatcagctccgctaagtacatttttaagtgtcagtcccttctgtgcgcttttaccttcagtattgagccttgcatgttcttcgccagatgaaatcatggaagcacataagga

SEQ ID NO: 194704 - DNA, 309 bp, Zea Mays
caaggaggtggaaggtggtgttatgggaataagaacatcagatgtggatgtagaatatgatgattcagatgcaggaatggaaggaagacacatgaaagaagtagattctgtgggataataggtggagtgagtagactggttgtgaaagaaggggcgattttcattgaaactcacatctctagaaatctgaatacgacgagtagatggatcataacaacgatagcctttgtgttcaagactgtatccaaggaatacacactctacagattgagcagtcaatttagtccgctcacgaggtggtaacaagac

SEQ ID NO: 194705 - DNA, 290 bp, Zea Mays
gggaggattgtctgtaacggtcctagtggagtatctgcagctatggaacttggttgatggggtagttctgcaacctgacatcgcagaccaacacatatggcgcctctctgctaatggtacttattgtagcaaatcggcctatgatgctctctttgttggctctatccattttggcccttggcgacgtgtctggaagacctgggccccttaagatgcaaattctttgtatggttggcaatcaaaaacagggtttggacagctgatcgactggcaaaaagaggtctgcccca

SEQ ID NO: 194706 - DNA, 1139 bp, Zea Mays
tggtgctcaaggtgcttgttgctgttgggtggactatcacattcattgtgctctatgttcgaatgtggaatcagaggtggcatgaccgcaggtggtctttttctgccaattccagggtgttaaactaccttgaggcagctgctgtgtttctcatcccacaggtgcttgcacttgtgctcttcatcgtcccatggattcggaattttctggagaaaaccaattggcgaattctatatgtgctcacctggtggttccagacccgtacatttgttggacgtggtgtgagggagggccttattgataacattaagtataccacattctgggtgtgccttctcactgctaaatttagctttagttactttctccagattaggccgatggtgaagccaacaaagactattctcagcctccatgacattcggcgtaactggtttgagttcatgcctcacacagagcgaattgctgtaatctttctgtgggctccagttgttcttatttatctcatggatattcagatatggtatgcgatcttctcatcacttactggggcacttatcgggctgttctcacatctgggggagattcgcagtgttgagcaactgcgcttgagattccagttctttgcaagtgcaatgcagttcaatttgatgccagaggaacacctggatgctgtgcacggtggcctccgaagcaagctgtatgatgctatcaatcggctgaagctgagatatggctttggtcggccgtataggaagattgaagctaacgaggtggaagctaagaggtttgcgctgatatggaatgagattattcagacatttagagaagaggacatcattagtgacaatgaagttgagcttcttgagctaccaccagttgtgtggaaaattcgtgtggtgcggtggccatgcttcctgctaaataatgagctgcttcttgctcttagtcaggcaaaagagctagtagctgatgacaggacacactggtcaaggatacgtaacaatgagtacaggcgttgtgctgtcattgaagcttatgacagcatacgtcacttactgctggagatcattgaggatggaactgttgagcacataattttcagtcagctgttctttgcatttgatgctgcaatggag

SEQ ID NO: 194707 - DNA, 524 bp, Zea Mays
caagtcagcttcctgaccctcaagaccgcgctccaaggtcgatgaggcgcgggacgctgcccgggatgaccccaacccggcgtcgagcacatcagcacaaacatccatcgtgtcaccatctgccggttctgataacagatcctctggaaccatgtcttcaagagtttgatcaaagttcgccagagataattcttgtagaccaataagggcagacaaagcaggagaaggaacaccactactttccccactggctatgtagcaccgactgttcttccaaatcaaagggatttcatcttcttcttcctcctcaccttcatcagcaacaccgacagcacacccattggggtcaacgtcagacgggtcacacccattgggatcagcgtcagtaaattcaggcacgggcacttcctcagcagcaggagcagaaggaccagcatcccgatccaagctagacactcgccgaagacgtctcttcttctttttctgcccatcagcaggagaagcaggctgattggctcggcaag

SEQ ID NO: 194708 - DNA, 302 bp, Zea Mays
gcgagtagcagactcgccttagcggacaggagaacgtccgccacgtttggagagcgtcggagccaactggtaaaatagaggagcatttagcgtgcgctgttgggcgcgtagggaagtactttatctgctatatttacatgacagaacgctttaccagaccttgttggagccaatcttaaccactcaaacgagctaaaaaagttttagttttcatttatgaaagttgagttttctaagaatatacatgccatctcgaccatagatgaagtaattaactcggcgcatgaaatcatccccggccg

SEQ ID NO: 194709 - DNA, 603 bp, Zea Mays
cctagtggttccctccctcgttcgtaacctcctctcggtacgtcaatttactcgtgacaacaattgttcgattgaatttgatgctcttggtttttctgttaaggatatggcgagtcgtcgcgtgatgcttcgctgcgatagtgatggggacctctacaccattccagctgccacccacacctcaccgcacgcctccattgccatcaccacctccctgtggcactctcggctcggtcatccgtcttctactgctattaatactcttagaaatactttcgccatttcttgtaataaagtagaaccacctctatgtcattcctgtcagcttggcaaacatgtgagactaccttttactccttctcaaacacgcaattctgcactctttgatttaattcattgcgatgtttggacgtctcccgtggctagcatatcagggtgccagtactatttggttttgttggacgattactctcatttttgctggacttttccacttattcgcaaatctgaagtagcctctcacatcactgatttctgcgcctttgtgcaaacccaatttggcgtcacaataaaatctttccaggctgacaatggcactgaatt

SEQ ID NO: 194710 - DNA, 720 bp, Zea Mays
gtaaaacatagctagatcttaaaatccactttttggctagtttagagttgaaaatggacttgatctgcttcaagggtttgatcaatttattgcatcctactaaaaacaaggttaaccttaagctcaaacccaactttggtgtatagagctcatgtccaaatttccattggtttaaaagttgtttgtttgtactagatttcaaacaaggtctctgaacttctcttgctctctttgaaacgacacaacctcacccttttctccaagttccaaatgcttctgaggccaagttgctcaatcaaattggtgctccacatgttgctccacaagtttggtacaatgacccttagctagaaccctatggattccaaaccatcaaagcccaaagttggcattaaacacataaattcagactttggtttttcactaagtctgaaaatccagaattaaacactacatttttggaccactgtttctactagttccaaatagtttcaggggtatgaaccttaaccaaacttataccccaacatgtggtctttcactttggtgcataaactgtaacccatagctgtatggatcagccaccaacaggcttccaaagctgcttcagcatataaaatcttcagtttcagatattgcagtttgaaattcagattctgacattcccactttggaccagttttccacctagttccatatgaatttagggttaagtagctt

SEQ ID NO: 194711 - DNA, 420 bp, Zea Mays
gggacagaagctgcaaagaacaaagctgcatacacaagagaagggaggagacaactttttgctcttcttcagggagctaggggatcaactggtaaccttccttttccttgagttattttcatgtttactttaatggggccctcagggaaatgtgaaccttggttcgtacaggacaaaacaatacatcatatcatgctacttatgcaacactgatctaatgtcaatccttggtttacttgccacaccatacttatggtatatttgggtaaaaaatagatgtttcaagcagtctgtgaatcctaagtacatcttggtttactctggtgctacagctgctgttttaaaggagaaactattagccttgggatcatctggaatattagcagagcatcaacttcaggcacaactacaagagcagca

SEQ ID NO: 194712 - DNA, 916 bp, Zea Mays
ctagccccttcctttgtcgtgggtgcatacctcatcatatatgctcgacaagctgcacctgggtgtggtctccgccttcgactgcttcatcttgccagcacccacaacctccctcattgacaaaggcgctggcaaggcctcctccaagcggcgtaggtcgctaagggagatgaggagtggtctggaggggagcgagtgcagctccagcacggccaaggtccaaggtctaggaggaggaagacaaatgcagaccacagtgttgggggaggttcggtgacgggctacactgccgtgtgtggcatgaccgcgagaggcttgggtgaggggctacatcgccatgcacgagagaggtatgagagggctatgctgccatgaaggtagaggtgtggtctaggggatgcaccgccatgcgaggagaggtgctgccatgcaatgatttgagaagagataggagagaggaaatatttatgtgctgctcttgcttgcagcaataaagaaggtaatcgttttattgtattacgtatgaagtcgctgaaatccaacatagccataggaaggaagcaatagggaggaaggattagggtggggccacatgacaagggcacaatcatagtacatgaggtcaatgccgtcgagtcgagtgccatgaggtggaataggagacaggacatcacatgctactcattggcagtggtgcaagcttagaaagagtagggagagggacacaacagatgggcctgcgtgcaagcatgggtactcaggccagtgttgtgggatatggtgtctaaacagccatacaaaaccagggggggcatttgaacattattatatgctttgagggctacaatatcagttttcatagttatgggggttatgtagtcaacccttcacatgttaggggttatggagacttttt

SEQ ID NO: 194713 - DNA, 391 bp, Zea Mays
ttttattgggcttttgggcccggggagtcacatgttgtgatctcatcactcctcaagtgccatcttggcgttctgcacttgaatggtgatggttcgtgagatgtgattaggagtggtaatggattatgtcttttcacaatttgtttgaaccctttaattaattttagttcaaaagtgaataaaaataaaacatgattctgatccgatctgatccttaattttatagtgtaaaatttatagctcgttaccaccctatatgtgattgagaatttaagattagtggctttgacttctgaccggttgttgcctgctaatgtcccgtttactggaatcctaagagaggactgaagaacaaacctaacaacatggtacatacaatatttgtagccta

SEQ ID NO: 194714 - DNA, 1172 bp, Zea Mays
agcttagttgcagcccagaataaaaatttaactggccagggcagtacgtccctaaaagtttatactaggaggacagctgataacaggtggcaaaagtatgattctcaggattccccactcattcaagcccttcagccaaatcaagtctcttctcctctagaacagaatggtattggaaatgcagtccaagcctttgttgacaaagtaaccaggaaggtggatggtctgctccctccaccactcccccacagaagacgatccaagcaacttccatctgacttcatcccacgcagaagcagtcgcctggcaaagcgagatgacaaaacaaatgctgcacgaagacagattcaagctgacctgataagaagcctggatgtgccttgcgatggagagttgttaagtcctaaagcccttgaagcttatggcaacttgttcaaaaactcactctctgaagctcatatcaaagcactgtcagccctctttggatggacagtcccagatgtttttgaacctgttaatgtgttgtgtatcgccgggcaaggcccagaagaccttgagtaaggttgctgttctagcagcacctagtggttttatttggtttttcctatggatccttcaaaggttttgttttggaatgtaaggggtctgaacaataaggcaagaagagactcagtgcgtgttgtgattgataacactaagcctgatattgtctgtttgcaagaaacaaagaaagcatccatttctcggcatatgattctctctctgttaggctctgattttgtagagtatgttgttcttccggcggctggtacgcgggggggaattattttggcttggaggatttcggtctgcaagatgctccaaactagaatagacaatttttcagtctctgttcaattccagcagcaggatggtgtggcttggtggtttacgggtgtttatggtccccaactcgatgagcataaaattcaatttcttaatgagctgcgcctgattcgatctcagtgcctcggttcgtggatgattggtggggacttcaacctaatatatagagctgaggacaagagcaacgacaatcttgatagagctatgatgggaaggtttaggcggctgcttaatgacttgcttctaaaggaactgcccctttcaggtaggaagttcacctggtccaa

SEQ ID NO: 194715 - DNA, 309 bp, Zea Mays
ctagacactcgccgaagacgtctcttcttctttttctgcccatcagcaggagaagcaggctgattggctcggcaagggcgtttcgggcgaacactgacaggcctctgaatatctaaggctttactagcttctaggagaggcgccaccgccaatgttccagcaggagcggcatcagaagaatcctcggctaacatatcaagcatagcacttatctctgcatcactaggatccaaaggcacctcaaagtgaacctgccgttcatcatcaggaatttcttcaagcaaagcaaccaaagcactaacttctttg

SEQ ID NO: 194716 - DNA, 489 bp, Zea Mays
ccggattgctctgggagactgggacccatccatccagagttgcgggcttgcggcgcaggaaccgaaacgaaagcgctagacgtccgccgtcccattcgctttcccccaaggcctttctatctgcagccggtgcggcggctgtgctgtctgcctttctcccgtctccgccaaccgctccgctagccaccacgcccgccgctttcctgccgtggcctccgtcggggttcctcaacgggtaacccttctgccttcaacgcctccaccacccatcgctcgcatgcgcgtcgatcccaagtgcgaaccccctccactctagtcctctactccctccatctactttctcctgcgatcaatgatcatcatcccgtcgccacgtcttctgttggctcgctttacagacgccacttgcgtcgcgatatttatttatttttctttgtcacctcgattgttagggtttacggtctgcaggtcggtatgccccagcgctca

SEQ ID NO: 194717 - DNA, 278 bp, Zea Mays
aggagacgcgccaagagcgagaggagatacgccaggagagaagggcgcaacagcaatagcagcaagcaccactgccaccacctccaccaccagtttcaccccaggacaagcaccgagagttcatgagccataagccaccgtgctaactctcctgatccactagacgcggatgattggctgaagtctgtagagaagatgctgaatattgctcagtgctctgtctgggagaaggttctttatgcttctggtcgtctgacaggtcctgccgctgattggtg

SEQ ID NO: 194718 - DNA, 559 bp, Zea Mays
gaacgtcttacagcagcaacagcagctgaaccttatgattctgtcaagcatgcatttgtgtcttatgggagctgcataactgatcttggagaaagttggaagtaccgaagccgtttgtggtatggtgttggcattccacccaaatctgatatatttggtggtggtggaagtggttgggaatcttggagatctattctagagaaggattcaaatgggatttggattgaatttccacttgtgaagaaatcagttgctgtgctgcaggcacttcttttagatgaatctggacttggtggtggtcttggtattggagggggatctggccctggtatgggggttatgactgccctctatcagttgctagatagcgatcaaccatttctttgcatgctcagaatggttcttgtttcgatgagggaggacgacaatggtgaaggcgatgcttttacgaaagatgttagcataaaggatgtggtatcagaaggaatgggccaccaggctggaagtgtgatgccatttgatggcaacagttattcatctccaagaaaacctcgatctg

SEQ ID NO: 194719 - DNA, 495 bp, Zea Mays
ggatgatattggaagcgctcagaaagaaagtctttgacaagaatgaaaagttcacaggaaagtggatcagagagttgccgtatgtggtctggagcctaagaactcaacccagccgagctttgcatggaaacactcccttcttcatggtctatggttcagaggcagtgctacctgctgatctcaagtttggggcaccaagattgatcttcgaaaacatagctgaagctgaagctactaggctggaggatgttgatatactagaagaggaacgattgaatacgatgattcagtcagcccggtatcagcaaactctgagacgctatcatgataaggccattcgacatcgatcctttgcagtgggagatctcgtcctccgccgaattctaacgggagaggggcggcacaaattgtcaccactatgggaagggccattcatagtagcggaagtcactcagcctggctcgtatcgtcttactcaaatggacggtatagaaa

SEQ ID NO: 194720 - DNA, 1065 bp, Zea Mays
tacagtgttttcaattcattacaatggaccagaaaagtattattcagacccaagggatgtttctggtcaacttcttaacaaaaaatctgatgtatatagctttggagttgttcttttagagctcatcacttggaagactgtgagatacatgtacaatcttagggctcgtgtgcttaccacagacttccttgattcttataggagagaccgtgatgcaattgggatgttcggcaaggtttgtgatgaacatgaagggtactttgttcatgaggccctttccattgccatcgattgcttacaacttgatattcaaatgaggccagaaatggaacatgtacttttccgtctccggatcattgttgctagaagcaaacttgctggtacgcgaaacaaattctcttctcatatttgtttatcatccttaactttgtaaatacaagatacacacataaaaagcaaataaaacctgtaacacttaccatatacaccctccttgctgcattttcatttgtaattgtatgccatgaatatagttcaaaatatactatttgttgtgtcatagtgctcttctagagaagcaataaccttagcgtattgtatttacttcttcatgttagatgttagtacaatttactatttgttgtgccatagtcgaatattagtacaatttagatacatttggacttgagttctgttagatgttatggtagattttgtgtcggacattttttttggagcgagaatacatctgtttggatagagttccatcggacttcataaccagggggacaaagaaatgaggccgacgacccctgttataaccgatgggatgactaacatatgtccaaactttgttaagaaatatcatgcctctgtcgttctcgtttgcatattttcttccatggtgtttatgctttcacattctttagtagatccactctaacacttcattttcttcaacacagctggtagtaacaataaacctagccaacatattggtcgggcccttgttaacaacattgataaacttcacccaactctcatatcaaccatttccatggagga

SEQ ID NO: 194721 - DNA, 4305 bp, Zea Mays
tggttgagggtggccctatgaggttcatggaggctgtatcacccatcaatggaattgaagattcagcatagtcaacaattcttccttctactgtgatggcggaaccagaagaaactttctttgtaacttctccactagaaggagctgctcgcttattcacactaggaccaactgagctttgtagggaaatactatgctgtttgcggggagcctgatacaaccaacataaaagcattaattaattgaaataaggcaaaaaaaagataaaagtttaagcaaatcaaacatgacagattggcacctttgccatccttattttggatctgttttctttctccctctgctctctcctgacactcatgatctgccttttggatcttacttcaatgaagccatctgcatcaacagggacctcaatgccttgctgcttcacaacacggacagctccagcttgcaatgaggtagtatctccatcaggaacagcacccgttctagacttcttgttcccaccatgagatctctcataagggacattgtgtgtacttctaaacgagagactctgatcacttgctccatttatcctagatgccttgctcatatcaagttcccttctattagtatttctcgctggaatatctcttgttccattggagcttgttatctcatcttgttcaccatggcaaaatgattcagaagtttcattttgattcttctcgatgttttcccgaactctaaactcagttcgtcttacattcctacgagcccttctctggaatcctcctttggaatccttatgagaaggctcaacaattgagccagtagatctcatgttaatgtctttaacagcatatccatatctcctcccccttctatcagagacaacaccaagagcctttggatcacccatggctctcccctccaaaccatattgagaagattctacattgttggacgtaggcctgtaattcctcttcaaagagagaccttgattcctcccacttggagttgtaccctcagcaaactctctgtccacttgactactaaatccgtccacaccagccatctgattgtttgcaggagcattgagatactgggaatttgaattgtccatgccaaggggaaccttggttgtaggtgctgctgatttgttgataaaggtggatgagcttgcctgagctgggatgttctggtttgtacctccatccattagctcaggtagaacactggacacattctgattcaatgtatgttgagctgatatggaagaatgtgcagggcgggtggcctgagaaggcagcgatcgaacactcggagcgataggacgtacatacctcaactggccaaattgatacaaaggggttgttgaagggtgcatatgaggcagggatgggttaaactgattgtggagatggattggcatctgtatggaaccaatttgaatggctggaaccggagttggtattagaggaggacctgtaaacaaaccaaactggaggctgacaggtacttcattctgcccaactactgttgaagctgacgaaaaaataggacccacagaagatgcctgaggtaactgggaacttgaagcaggtgtccttgagctattggatggctccccattactgtcttctgtcaggccatttacaccatcaagagtcaatgcctgcagtgctttctctgcttcagtaacaggatcagaatggacaactgaaccactgacattctcttgctctgcaactcctgagtttagatgtactccaactgtcctttccgtgctcctcacagaagctaattcaagttgactattcggtggaatttcaacctgcacgccctcatcaaacccaagtataactggttccagttctacgggtgtatcctgcccctctaagaactcatcatccaagtctatgttctcatcatcagcttcattcatttcatcttcctggtagctatcattgtcttcatcatattcatcctgttttcgcctatcatcattgtttacacttgaccattcatcctcctccaagtggggcactcctgaggcagcaattctgcttgtattgtctgcatctacagtcagagctgcatgatggttgtcagagagcgccgtatgttcaccatcagcagaagtcggtaacacaggagaatcaccagatacgtccatctcatcatgtgaaacatgtggaggtgagctaggagggcttgaaacagaaagagaagattgtgaacccaatacagggctttttctgtccacaatttgttgctcattgacagaaatgtggtcagatcgtatcccatgctggcgagatgcctcttggtatacacttccgtactgaccctgcataatctgcacatcatctctaccagaacactctctgttcccaccatccacaaaagatgaattgaaacgttgtgctgaagcaccaattgaacttctgtgcacagaggtcacaattgggggtgggggaacacgtggttgcctcatagagtagcgtggtctggtaaaagaagacaattcattaacatcaggactctgaaacatcctatctccttgttgagcattgaggcttccatgagaactactaggcagccaagctgtatctccaaacctgtcgctgttaaaaaactcattatcaaattcagattgtttgctgaaacggtcaatctccctaggcgcatcccatcgtggaaccttttcatgatggaaatcttcaagtgcccatgaagaatcagttgttcggcctgttgaagattgcctaaccgaaacactcccaaatccatcattaagatccttcttggggaaatttcccctctttgaagcaaaagggtcatgctgtggcctatgatgcacattctcttgttctggaaatgcaggccttgaactatagtgtgcagtttctctatcaataaatgaagggcgtccatctgtaagagtgcgcacccttggaactgtctcactgaacctgttaatactagaggattccaatggtgttgaggtattgatgcgctcattcattttgtcaatatcctttctgtcaccaaagttagcagagtgtgacaggtctctgtccttgacatctccaggaataaattcatcattgacagctcttgtgctgtcaatgtttgtttttgcttcccttttagcaattcttgcctccaattctaagagcttctgatgtgctgcctccctgcgccgctcctcctccatagcgatcctctttctttcctcttcccttgcgattctctgctcttcagcccttctagcagcttctagcctctcttgctcagcttgccaagctgcctgctttgcctgctcctccgccagccgttgcctctcctcctcttctcgtatcatcctctcctgttcctcttcttgcttccgagcaacttctctggccctttcctgttcttccattacccgttgtctctcctgctcctgtaccctcaagatcctatcaagctctgcctcaaacgactcccttgctgggtcatgaaaatcagctggtttagctgcttcttttttcttctttattgcagtcaagttaacggcagaaatgctgtcaaaaccactatcatctattaaaggctttgcaggggaaccagtcagccgcttctccctgccaaattttgccactggatcattatttaaaggccctttattaccaccaaagggctgcactttggaaccaacattattctggaaagaattcaacctaggccaattatttgaactgtcgccgtaacgctcgctagcagcttccaccccattctgtccataggcactcataggaggctccttaccattactccacacatccttggatccactggcagctatgttttctcggtatgattgcccactgcttcctctgccaccactgtaaggtcgaccatctgttcgctccctgtcgtgttggtttgacacgggagatcgccacagcctgtcctgcccaccttctttatttgttgcagccacatctctcccaaacatctcctttttgaagggatccctcatcgatacataaaggtcgcgccctggaagcatggcctcagtcctgccaaatcccctctccctgctgtcccgctctggaaggctcagccctgtgtcacgctcgtcatcagcccagtcagaatcatacctaagccggaccatcggaagcggccccagatcaggcttctgcaccctctcagcggaagtgcggccaccaggtcccaagctgacaccagaggccagcgtctcagtggtccgcgaggttgtcacctgtggccgcatcccaagagatcctggtcgcgcctctggcgtga

SEQ ID NO: 194722 - DNA, 512 bp, Zea Mays
cacaaggctgcggcggcagacgcgaagaacgtggcgcgaggaccagatgaggagttggacgacgacgacgacgaccacgacgacggcgcggagggtgaattgttggacgaggagcaggagacagacgaggaggaagaaaaagagatgctggatctgcaggatcacatggccattgacgacgacgagcaaactgctccgcaccaaggcaaggatccgtagtccccagtccccaccaccactgtcgtagtagcgtcttcgcaagattcacttgtcggttgaactaataatgacactgtgctcttcaattgctgccgtattgcagtggacgacgacgacgagcaagatcttgagccaccgacaaaaggtgcacgaacacctctgccaatttcgtccctattttccccctctgtattctcttccatttcttcactgttgtgttcttgcctccggactgcatcaccgtgaatgtagcagggattaagcccacgctgtcggtggaagaagagagagcg

SEQ ID NO: 194723 - DNA, 597 bp, Zea Mays
aggataggcgaggtaaagagggagctagaaaattgtaggaggagaagaagcatatgtcaggaacaggtgaacccggagaacatgtcaggaataggtgagttcgtacctcatggctgaccaaaagaggaccggaacacgttcttccatgcatatgcttaagacaggaaaaggaaggaatcatgtgaggaaattgattgatgataacagatggtgaatctcttgaagttggggacagggaactttgcgccgggttttcaggtgctccgcaagctggaaaccttggctgtccaaatgagtctggaatgggtggcacaacttggcatgccaagaacaagtttggagacagatgcaatgcaacaaccttgggactggctgctcgatggagatgtggaccaaagcccaaatggtagctcgtttatgttacaatctaattctgtgcattgttcagtctatctgctctagattgtgtaataaggtatcttagcaggcagcttagctgcccatggggcttgtaacttgcagcctgattcacatgtctacttaagccagcccccctagacttttgtaatgtctcgatggtaatgcattggcttgtcg

SEQ ID NO: 194724 - DNA, 375 bp, Zea Mays
ccgcaaccagcaacaagtgaacaccatcaccaaccaacacctccccggagacacagctcgtcgtcaggagtaccccgcacaacaaaaccgtggcaccaacaccagaggaagagtcagaggtcgagcatagcagccgcgaaggttttactgcctgtttcatggcgaagaatgtgcgcaccccactagggattgccctgaaaccaaggccaccaacgataggatagcctggaatcagccagctgacaatgagtaagttgtcgcacacacttatcacccccaatagtactactagcaaccataccacaacgaatagatccttcaccaacctaatcacttgtaccatcatcattaagagatccaactcctccctcctcc

SEQ ID NO: 194725 - DNA, 421 bp, Zea Mays
gtgctgcctgtgtgtctgtgcatgtccatgtccccctttggcgttggcgatctccttgtctccctgtctgcaagtgcaacactggaagtctgcaatcggtgctggcgtgctgcactgctgcctgtgtcgactgtgtctttgtctgtgtgtgcatgagccatatccctgtctctatttggcattggcgtcttgggctcttggatcttggcgaattgggattggagatgtccctgtctccctgtgagtgtgtgcaaccgataatagcagtagcactactgcagagaacctgaatgtatttttcatgctgccagcctgccagtctatgaactatgatcaatgtgaatcaaaactttgtattcaaatttgtgagttagaactttgtatggctaagtgagattcttcgtatgtttttcaaaaatgt

SEQ ID NO: 194726 - DNA, 371 bp, Zea Mays
ggcgaacggaaatgaggttcttaataagtttaggtgacacaagaacattgttgagatgtaaagaaccatttaaagtagtggagccagtggaaatgacaggaagaagcgagccgtcaccgacaataatggaagaaggtgcagtaagggagggagttgaagtattggatagggtaccggcgttggaggtcatgtggaaggtagcaccggtgtcgaagtaccagtcagtctgctggggcggagtcagggacatagtgctgaaggcggatgcaagggactgagcgtcccaagatggagtagtcggctgagccagcatgccgtgggtagcgcttccctgcaaagggccggtctgcagagtgtgctgcagaggggcg

SEQ ID NO: 194727 - DNA, 700 bp, Zea Mays
tggtctcaagtggtgggagcgcaaccgaagcagcaagcctcgacgaagaactgggtgaagccgacgaacagaggattatatcgcgaaacgtaggccgatcagcctcccccgcaggagttggagcgacaccgcgagacccagaaaagtcgcctaaccacctctgtaacttggacctcccttgggtggcgcacggagcagacccgccagagacaggggaaatgaggggagacgccttggatggggaggccgcattgacgacggcgtggggaaggtgaggggtggccgccggacccgggtggatgccagcgtgggctggtggggagtcaaagcgtcaggaaggcaatgcaaggcgtcggcgagagacaaggagacgtccatcccgccaacccctgaagtcaatgcaactcaaacgtcatgttataggaaatagaatggaacatttaagttagacttggaactacaggacttcatttttatatttctaggtagggttaggactcagagtatggaagcagaagcagtgatatgtagctattggcaatcacactcagattatggaagtagtgatgtgtagctattggcaaccacactcaggttattgaagcagtggccaataggtatgggcaatcggcttaacctacagaacttggccaagatcatacagttatggaccacagcaagtggataattctaagacaag

SEQ ID NO: 194728 - DNA, 300 bp, Zea Mays
aagaaaacacactgttttgatcggaattggagtttgtgagaattatagggttgtaggtgaggccaacatgcacatccaaaggtgcgcatggatgagtagtcaggtttctggttggagaggcgctctaggggagttgtgaagtgaatgacacgactaggtaggcgattaataagatttatagcaacaatgaaagcatcgtcccagtactttagaggcatggaggcatatgggaggagagaaaggccgacttcaatgatatggcgatgtttacgttctgcgacgccattttgttgatgtgta

SEQ ID NO: 194729 - DNA, 988 bp, Zea Mays
ggcgggactaaggacgacgggaggaggaaggggcggggtactggctccggtggtcgggaagaggctctgccggacgccgctctccgttcgctgcaacgccaccagccgggacggcagggtagggacccgttttccttgccttcattttcagtccgattttgcgcacttctttttctttgatttcattttacagaaatatactggcttgttccgttttcaattcctaatgtcacggtcgttgtacatgtaatacagccatcgatgcatttatttatgttccatttctcattaacgaaaagtagttttcatagcatttatactactgatactcttttgatgaagagccaggaaattgtatatttttttcacacacacacatatttctcactcgtcagcacctatcccgctgacagattacacaacaagagttcactgagatggcgtggcaagcaattgtctcatcccctgaggtggcgaaggagagcaagcaccagattgtggagactgagcatatgatgaaatccctgctggagcaacggaatggccttgcccgccgcattttttctaaggcaggagttgataatacaaggcttcttgatgccacggagaagttcatccagagacagcctaaggtgcttcgtcctcaacacactccgattctgttgatattcacatgcagtttgtcttagcaagattaatgcatcttactatgaactcggaataatgatcagagaactggaaaaacatttttcccacttcaataaactcaacattcttcaatatctttctatatattgcttttcgttgaaacaaaaaacaaggaatttccattcatagttgtcttacgttctgtttaatgattcaggtattaggtgaagaacctggatctatgttggggcgtgacttagaagctctgatacaaagagcccgggacttcaagaaagagtacggcgattcatatgtctcagttgagcatctagtccttggc

SEQ ID NO: 194730 - DNA, 404 bp, Zea Mays
gtttgactgtgagggtaacccgtgaaggagaggatactgaagccaccgagacaacaccaatctccaaagtcatgaggcaatcgaggttatttgtgatagagggagccattgaagaaggtgcacctgctgctgaagctgaacaagctgatgttgaggaagaaaatgctgatgaagaagaagaagattatagcattctgatcccatcaaaacccagccacatggattttgaaaaatctactgtgtctgaaactgatatgcccatgatgataaaactaggctacttcggagaagctgagaagaagcttattcgctttgtcggggaagaaaccactccaacaccgaaggatgacgaagtagtagtttttaaaagctttttcagagcaggattacggtttccgctgaac

SEQ ID NO: 194731 - DNA, 328 bp, Zea Mays
tgaagatagatttcataattatccaaaacttccccaatcatctcgttcaagggaaaccgcaatcctgctctgaaaaagctcttgaaaaccactacttcgtcatctttcggctttggagtggtttttgttctccggcaaaacgaataagcttcttctcagcttccccgaaataacctagcctcatcatcatgggcacatcggcctcagacacagtagacttttcaaaatccaagtggctggtttttgatgggatcagagtgttatagtcttcctcttcttcatcaacattttctttttcgatgtcagcttgttcagcttcggcagtagg

SEQ ID NO: 194732 - DNA, 319 bp, Zea Mays
cccacccggagcggtggctgtctccccagtgattaaccaccatcgcatggtcacgcgcgccaaggctggcttccgggtgccagcattgttccacgccgcccctctatttccaattccgaagacctttcgtggcgctcttgctgatcctaattggcgagctgccatggaagatgagtatgctgcactattgcagaatcacacatgggatctggtaccttgaccccatggggcaaacattgtgaccggcaagtggattttcaagcacaaatttaatgctaatggctctcttgaaaggtacaaggctcgctgggttctccgt

SEQ ID NO: 194733 - DNA, 617 bp, Zea Mays
ctccccgccccaccccatctcccgccctcacggcgtctccaacagccctccgccggtgtccactccggagccggtgtccactccagcagcagctccctcaggtggggcgtcactctaccttcctcaggcgggacgtccgaagcttcggcggtggattgacacctcccctgcctcgtcgtcgggggggtcctgtcagggaggccttggcactcgctgctcctcatcacctacccaggctccgacaacctttcttgaggcggttatcaagggacccatcaaggcagcctgtcccccgtcggtgcagaaattcccggaggttcacggcttaaagctagaggctttacgtcagtcctctgctccagaagccgggcgctgtcctgctactcaatacagcagggacgaagaagggtggcagctcgtggaacgcaggcggtctcggcaggttgagcgtgagcctcgtcgtaggtcccctgtggatctccgaggcaagtgctataagtgcctgtcgacctctcacttcgtggcggcgtgccgtagaccccctcgctgttttgggtgcctacatcttggccatcgcgtggcacagtgtcctacacacttcaagaaagagaagaagc

SEQ ID NO: 194734 - DNA, 305 bp, Zea Mays
gtagttctgaatttgttcagcaagtattgatatttcattttagccatcttagtgatttccattggttcttttactgcgctgtccggtgctgttccaacatttcatgaactacacaaaattgtaagcacaatgcttggacctcttgcttttgtagttttttagatctcagttgtcaaaccaatttggattcctgagtgtggtaatggacctaacatagaccaagcatgatagatgatcagttgtccttgtattgtgttggtggttatctagacgctacctaattctcggcctcagactgaggttgt

SEQ ID NO: 194735 - DNA, 415 bp, Zea Mays
tgatagatacacactatagtatctatttagtaattattgtcttatatccagagcatataacgcgtgagtaatagcctcatagatacgatcctttcattacaacaacttgtaattattcttgatatgtactcacgagttttattgttgctgaaaaggtacaatcctttgttttatttcagagcttatcctcaatctactgaacatattctctctggctgctagctgtttcagacgcctatagcatacgaaatgcaaaataatagttagccaagcagtagatccttaatggatgtatttgccatgtcagtttaattgtgcattatgccttcttagtacagtttaattgtgcattactgaacatattctatcttcctgctagctgtttcagacgcctatagggtacgaaatgcaaaag

SEQ ID NO: 194736 - DNA, 724 bp, Zea Mays
tatgtattcatcgttggtgtgggttaaatttggtgaaaatgtaaattaagtgacatttatttgatgtcggaaggtgagataggttaatttagaaaggtgagttattaaacatgtgtataccggagtgcattatggtggtaattgcgttaagttaattggtagtgtctcgagtgcacgccataatatggttgtatgcgagacatagtaaaataaggtgtgctcgatggggatgatcagtcgttgtaggtggaaattgtctttgcttaaatagagaggtggtgacatgccgaagtagtcatcgcttcctctatgtttttatgtcgagtcaaaatgtggggtactagtggtacgctaggcggtgtccaaataaattaaccggtcgatgtggtagtggtcgtgcgtgatttattgttagtgagtagttggaattccaagctatatgaggattatgttaaaaactagtaggcggcgtgtaactgcgttcgtatggtgaatattaggtcggtaggtattgttgatgccagtagcaaatgtagtcttatggagttttacgccatgtgtaaatgcctccacgatagaccccaaaaatgtgctatttaggtgacttgtgtgttaactaattcaagttgagcaatggttgagaaacactgatcaatcggccccaacccatgttcttgagttacgatgtctaaaaaggttcgctaggtattctactgtgattagc

SEQ ID NO: 194737 - DNA, 439 bp, Zea Mays
tgttatgttgtgactgttgcataggagatttatgtgtggtttctgcatgatgtgttgttagggagggggcctattggatgccatgtttgatgttccaaaggtcaatttcctatcggtaagatgcatctcaatagtttcacctatacttttatgtagtttcctgccctatctcaaactctgttctggtgtttcaatgtatcaaaggttttgcagaagaaaattacatcgtttgatggtgatgaggtagatgcttgtgtcacctattcatttggtgtcctagacatgaaaatccatccagtattcttcaccattgcatctaagttttaatctatttactactatgtattccatattttgttggagttgcaatttagtgatgagagatgaatcaaaatgttgtgcttagatgcacaggctctttggcaagtcaccttttaat

SEQ ID NO: 194738 - DNA, 455 bp, Zea Mays
ggcggaggcttctccatgtgttacggatgctgaaattttgcctggtccaagtgttgggcgtaggcggcgaagggcggtggcgaagcgtagagtgagcgggtttgatggtggtcgtcttcgtgtgggcagggccggtaggcaggaattgttgtcctcgccggttggggcgagtgtgggtgagggggagttgcgaaggctttttgaggtcgaggagctgaggataatgctatttaactatagggagatggggatcattctgaaggttgagcctatgtaaggtgtgatgccctcgctgtacgcgtgtaactgtagtttgtatgataaggttgactgccttcgcgcatctgggtgtgttcgtaaggtgttgcgcacccggtctggtacattattgtgtcggtccggctgcgcctgtagactttcggactgatgcaatgcgtcttcgatttttacgctcg

SEQ ID NO: 194739 - DNA, 392 bp, Zea Mays
ttgggatagtcgaggcgaatggggagtatgattagtcttgttggagttactatgatgttgatgccttgtgcgtaaagtgaggacacatatgtgtgtgccgtggtgtattagagtagtggtggcgtaagatatttgtttgaggtgtgcgggtatatgccgtaatatggttatactcacggtgaggaaagatgtatgtattgtgtaacacgacgcttaggtcgctattatataatcatgtgaaggatgctcaggaaggtcgtgtgattgaggagtcatgtaatggcaagcgagaagtaagttgagtttttcaaacggttagtggatagtgtccgtcggtgttgtcatgttttttgttgtatggcaatgtgatgcttgctttgtcaaatattgca

SEQ ID NO: 194740 - DNA, 284 bp, Zea Mays
attagagacacaacatggatttcttgttttggtatacatagagtaccaagacaaagtaatcatgtgaacatggactaaacaaaactatcatgcttgcacataggttaatacataatcattaaaaccacacaacatgatttacaaaaagatacaggtttagccacatacaccaagagagttaatcatggtagatatatcaaatgaaaagctacccattgaatgattcaagagatataacctataaagcacacagtcatgattgagcaagcatgattatgatcttg

SEQ ID NO: 194741 - DNA, 507 bp, Zea Mays
gtagcctgtttgagtctatttagaacgaaaatacaattctaatcaattatagtgaaacccacctagaacagtataagattcttatatactggaaaatagaaaggatgattccaagtcagctattatggcactttccctcattcccatgtgatcctgcctgctgctgttaggaaatcatgacaccatcactaaggtggacataacactgttgagctagtctgcagtctgcaccaggatgctggaaagagatcccatttccggagaaccaaacggacattatagaaaatggttctactgctgaaaacagagatattggttgcgacataataacatcatgaattacaggaaaactgaagttgactaatggtttgtggtaaatagaacacatcaactgtcagtgttgctcaccttttttaattacaattgtgatcaccctcgattatatgttagacaatataaaacatacttggcattgtgatctgtagctacaatttttggctgatttag

SEQ ID NO: 194742 - DNA, 607 bp, Zea Mays
tttgggcataaatgtagagcattctgtaccgcatgtccatacacagaatggacttgctgagtccttaattaaaagaataaaattcatagccaggccacttctacaagatagcgaactcccgaccagttgttggggacacgcagttttgcacgctgcggccttaatccaatatagaccatctgcttaccactctgcttctccccaccagttaacgcgtggtcaacaaccagtggtttcccatctgcgaaaattcggctgtggtgtatacgtgccgatatcaccaccccagcgtacatctatgggacctcaccggaagttggggatctatgttggttatgaatctctgtccataatcaaatatttagagcctagaactggggatttgttcacggctcggtacactgatagcatcttcgatgaagagcatttcccggcattagggggaggattgtaccttaataacaaagaatgccgagaaatagaatggagtgctagtagcatccaatcgcttgacccacgcactagataaaccgaacttgaagttcaacgaataatacacctgcaaaacttagcaaataatctgccagatgcctttactgatataaga

SEQ ID NO: 194743 - DNA, 1323 bp, Zea Mays
cgccgcctgcgtccgctgcaactgagtattcatattcaggtggggcccattaccttagtgctttcccggagtcggttgggttcactgcagtctcgttgtcatctccggcgatgggcatcccggctcaaaatcccatctttgttgtgacagagccatcaacgttaccgcctcatcaggttgctcctgcttatgcaacaccgcatcagccgcctcaagtaaccacttatgtgcagcagcagcctcaagtcacccattatgtacaacaccagcatcctcagtctgctgcttatgtgcagcaggtgccgcagtcgtacatagagccacagcaggtacaatacatcaacacccaacaatttggtgggcatggggtgccgcaatctgtcaattacgtgcctgtgcatatgaaccaattcatgcccagcattcctgtgacgggttctttggccaccactgctgctcaaggcagtacgttcaggcctgcttccgcaggtgcagaaccagttctggagaccacacagttcacaaggccagtgcaagctcaggttgatcatagttaccgggtggtgcaaactccgctatcacagcttcctcctttgtcttctgtgcatcagcaggcaaatgatgcgcagaggcagaggtttggtgttcaacaagcgatgataagtgcagtaagcatgccagtggtgaccagttcaggcacaattcctgtggtggttagctcggccactgttccatcattgagatatgatgattgcacaatgtgccaaaaagcattgccacatgctcattcagataatattatccgggagcagggaaattctcgtgcaacaggcaaccttgaggcagctccaatgttttatagcccccatcaagacagtggatccaacaaatctagtctaggtgcaagttcaggaactcctacaaactatgtggcggaaccaagagctgggaacacagcagtgatgacacaatttaattcgactcttcctgccagaaaacctgcagttcaggcaactgcatctccggatacaggtgtgccggttcaacccaccgtgattcctttaccagtgtccagtgcacctgctccagatggagtatttgtcggtcattctcctcaggctggggctgaagatcctgtcaggtaccagcagcaactattctcttatagcatgcagccagcacaagttctagtgaatggcccacaaggcattgatgccagtgcatacaaggattcaaatcatccagcagcggaaccgctgagagaatatgcacacaatcttcttcatgactatgccagagctatcgatgttcatacgcaagcag

SEQ ID NO: 194744 - DNA, 778 bp, Zea Mays
tgcatctaatttcatacagtttaagtatagctatatagcactatagcagtagctcaacttttcaggttaacaagaacacatgggaaaacagttacggagttacctgcacggtccatccgaagcattcaccaagttttgaatctccttcctccggtcagatgcacggattagagcacttccttttagtatcctctcagaattctgattcaagtttgcttttggaaacctctgtccttcaagaagagtgcagagctcaattggaacatgattcggtttgtccttgctcttgctcaaatccaagcatggcagcatctgatactcaatcaccttgccatgtttctgagcataataatccacgagcctccgtgtttggccggattcagcatccacaaaggtcatctggctggcaggtaagggtgtcaaaccttgcactgtgtacttctgattagtcctccgatgaatcacagttacacgtcggcctttaagctcatcaaccagattttccatttgcctcttgttcaaagttgtccgataatcaaggtacctcactaatttctgaacaagatccatcaccggtccagctttgtaaaacggcatgacagaatagtcaacacacaggatcaacccttgctgagtggatttaagggactgctgggttcctttcatagctacagcaccctgcccaatgtctatactgctgcttggtgagtaaaatcctctaccaaggataatcttgttccatcttgaggcctcacgcacaacaacatcaaggccctgc

SEQ ID NO: 194745 - DNA, 403 bp, Zea Mays
cgggttcaggggatcgggcgccgcgtcaggaagcgggacccgcggctggtgtgcccgaactatctcgcggggatagtcccatgcgcgtgccccgaggtggacgagatggtcgccgctgccgaggtggaggacgtggcgacggagttccttgctggcgcgcggaagaagactaagactgctggtcgccgtggcaaagcggaagctgcaggtactgccggaggaactgtccgcgcggcggtggcggagatgaagtgccaagtgcctggctgtgaggcggacatacgggagctgaaagggtaccatcgccggcaccgtgtgtgtctgcgctgcgcgcacgctgctactgtcatgctcgatggtgtccagaagcgctactgccagcagtgcggcaagtaagctctag

SEQ ID NO: 194746 - DNA, 304 bp, Zea Mays
ggtccctgagttgatctttcacccgcatgtccttttgacttaccttgtccctcatttttggcttcaactgacaatgatgtactgacagccctgctgtatgtgaggtgcaaacacgttgccatcttacgctggagtctatcatttagtcccctcataaagcaattcttctttttcaagtctgtatccacttgatcaatggcgtattgggggaggtgattgaatttattaagatactgcatcacaaaatctcccccttgcttcagtcggatgaactcttctagtttcatctatagtactccttctg

SEQ ID NO: 194747 - DNA, 717 bp, Zea Mays
gtccctccgaaggagtaccagccaacgtagccttaggcttcctggttctcgaccgatgacgacaatgtttgctcctcgtctcagaagcagaagtcaccattgctgccattgttgaatgagaaacttgttccgtgggagggctgagccgctgccaaaatgccaattgacgtggtgcggtctgaagaggtccactggcaacgagatcctagatggaggcacgcccaataggctccttaaccaacttcctagcctttacatcaccgccggcgaggcgatcccagattgaaacacccatcttacaccttaaccagcgtcttggtaccaccctttctcgggcaggaggacacccgatgtggcactggactccaccaaacgatagtacttggagcgaccagaacgcttggtggtaaacagagccaaggaggggggggggggaggaagccagcgccgcttggggaggggagggacccggggacggtggtcgccggcaccgaagtggctggcagtgaggggttgggggttgggtggagccgacaatggtgggaaatgaaggggcgggagctgagggggcaaccatattgtgccatctttatatcttgaggtttgggatcccaacattatgagttggtacttaaactaccatgttttctattgcaatatatttttttatcagaacctattgcagtatgttatcccctagatggcgggaagaatggc

SEQ ID NO: 194748 - DNA, 440 bp, Zea Mays
cccactctagcagcggcggtgaaaggaccaaaatacttgaaggaaagtttctgacaggagcgacgagacaaggatgtttgtatatacggttgcagcttgacaaaaactgaatcaccaactgaaaacacacgttctgatctgcccttgtttgcctgtttcttcatgtgatgcttggcactggatagatgcatcttgaccacatcagtcataagggcatgatcagttaaccattgatgaagatcaggaacaacacatgtatccactactgtcaaaccaaaatgatgaggagaccggccatagagaacttcaaaaggcgaatgactaagggatgaatgcaaactggtattgtaccaatattcagcaagggataaccattgaagccacttggcagggcaagaattgacaaatcagcgaaggaaagtctccaaacattggttgtc

SEQ ID NO: 194749 - DNA, 433 bp, Zea Mays
attggtgttccgagtggaaaaaatgttggtggaacaaaggagtggcagtgtaaacattgcaagaaatcgtacaaaggtagtttaactagagttcgtgttcatttgcttggtccattacctggtaaaaaggcacaaattgctcgttgtatgtcattgcaaaacgatcccaacaagagcaaagctttgcgggaaaaggtgaaagaagctgatagtaaaggatatcatatgagatcaacatcagggacgtccactccgaatccgttggcaaaatcgtttggagtagcccaaagagaatctgtcgatatggaaattaccaaatttttatgtgccaacggtattccattcaatgtgttgaggagccctcaattttcacaaatgataatggcaataaaaatggtccaaaagattataaaggcccgtcgagtgaaaaggc

SEQ ID NO: 194750 - DNA, 772 bp, Zea Mays
cgctgctatgctccagaaggaggctggccttgcacctttaccattgacagcagcggtgcttcctgcccatcaagttgctgccctggaagcatcatctgttcagcaacagtggccctctggacatgttcagggatttctctcagataaaataaacacgtcgacatatcaatctgcccagagatcagatcctaagctgccttcatctaagaaaaaggcactggccttctcatccagtttctcacgaagagctcggtctccgcatccaagcaacatccttaaaagtcctgtacctattgcggctgatactggagatgcagaaatgttgaataaagcaccactgtcgctgccacttaagcggaactttgtggatgtgaaggatattagttttgcatcagcatcgaagcgccttgcaataactgatcaaatataccaatcctctgcattccaaactcctgctcctactcgcaaaggtctgtcggtatcagttgattctcctacttcatctcattgcggttggacaaacttcaacaatgcttttactgaaaacttggacaattctcaaggcacaccaggagcattgaccaccacagcacttcctggtgtaaatgaccaacaatcaggaaatttggagcgtatgacacttgactcactggttgtacaatacctgaaacatcaacaccgccaatgtcctgccccagttacaactttgccaccactttctcttttgcaccctcatgtttgccctgagcctagtcgcagccttagtgcaccg

SEQ ID NO: 194751 - DNA, 1032 bp, Zea Mays
atctcatctcagtcacttccccacccggcgaccagaaactcccgcaccggctgctgatggagtcttgacaagtgattcttgtcgatcggccaggcaagttctcgtcgtcgatgtggagcgaaatatactccctgcctagctaattaactgatcatgcatacatactcttccgttccatgtgtgtccgcagctacggcggcggtggccacgaaacgatggaattaggtgcttctgtttccatgtctatcctggaaaagctcgtccagagctgttcctttccagattcatggcgggggccgccagacgctgaggtccaggctctcataggatatctcgaagagctacggtcctccgtcctggatctttccaaggaggatgaggacgaggatgactctgctacgtcgtcgtccacgctgaagatgagcctgacgagccagttgcaggaactttgttatgatgctgaggactatctggagatggcgcagcactcccgtggtggctgctcctggcagatcagttgggtccggagcaaggcgacgaggcagcgccccgctctaatcagcgcaaaagatctctccggcctcatctcccgtgtgaatccggcgaaagaaatagcccaagcgtacatcaagtctgctagttcaagaaccaccaccaaagagaatggccctaggccacaagaagagcctgcaaaaagcagtagtcgccgtgccgtctattctgatgatactctacagcctgacagccatgacgagcagctagtcaggttgctggctttggaaagtgatcagcagctcaagacggtggcaatccttggcctgcctggcgttgggaagacaacacttgccagaagactgtaccactgctatgaagggaggttccattgcggggctttccttcgggcgtcccgtaacctgcaggataccaccaggcttctcgccaccatgctatccaagattaagggccaacaagggtgccgctactgggggggctccggtgatgagcaagatctaatcgacagcatcaggcaac

SEQ ID NO: 194752 - DNA, 1145 bp, Zea Mays
gaaacgctgggttctccataaacccagacgagctggcatcgatcacaagcaagcacgacgcgaaagccttaaagatgcacggcggggtggacggggtgtcgaagaagatccggtcggcgttggaccatggcatatctgccagcgacctagacacgaggcaaagcatctacggcgtcaaccggtacgcggagaagccttcgagaacgttctggatgtttgtgtgggacgcgttgcaggacatgactctgatcatcctgatggtgtgcgctctgctgtctgctgccgtcggtctggcgtctgaaggctggcccaggggcatgtacgatggcctggggatcatgctcagcatcctgctggttgtcatggtcactgctgtcagtgactacaggcagtcgctccagttcaaggagcttgacaatgagaagaagaagatattcatccatgtgaccagagacggatcccggcagaaggtctctatctatgacttggcggtcggtgacatcgtgcatctgtccatcggagaccaggtgcctgccgacgggctgtacgtgcatggatactcccttttgatcgacgagtccagcttgtcaggcgagagcgagccggtctatgtttctcaggacaagccattcatcttggcggggactaaggttcaggatgggtcagctaagatgatggtgaccgccgtcggcatgcgcaccgagtggggaaggttgatgagcacgctgagcgagggaggagaggacgagacgccgctgcaggtcaagctgaacggagttgcaaccatcattggcaagatcggcctgttgtttgccacattgacatttgttgtcctgatggttaggttcctcattgagaaaggtttgacggttggtctgtccaaatggtactctactgatgcgctgactatagtgaactacttcgcgactgctgtcactattatcgtcgtcgctgttcctgaagggctgcctcttgctgttactctgagccttgcatttgcgatgaagaagctaatgaatgataaggcacttgtccggcacctttcagcgtgtgagactatgggatctgccggaaccatctgcacggataaaacgggaactttgactactaaccatatggtggtcgacaagatatgggcatccgag

SEQ ID NO: 194753 - DNA, 412 bp, Zea Mays
gtcctcgtcgccttgatcatttcatcgatgattttggcattggcaaaacttcaggaaacgagctcaagaaattcaccaacattgcacagaacttaattgttggttccgtccttgtttcaacggtcacgtttgcagcagttttcactcttcctggcggctacatatcggaggggcatccacacgccggtgcaccaattctgtcacacaggtacaccttcaaggcgttcgtgatggcaaacaccctcgcatttgtcggctccaccttgtccaccatctggctcacctatgctgggtcggaacacgtccacccactgcttcgtgcaatctacatgttcctctccgtaatttcgatggagcaggcaacaagaagtatggttataggattcgcattgggtgcgtatgtcgttctgag

SEQ ID NO: 194754 - DNA, 407 bp, Zea Mays
ctatgtattataggacggagagaaagcagagtgtttagatctatatatgacagagtacttttgtcgcggttttctccatgctgtcacgtacgagtgttgtttcagttattgataaagttcggaccttaagaataggaaccgattggttcctaaaaattggtttttagaactgggggattttaggaatgattgactttctctctctgtctaggttagttccgattatttcggttcggtcccacgctgccagcacacccccttcctcgccagctccaaagccgttccatcttatccattactgtagtacgttaaattaaacagccagatgttgatctgccatcatcgggcaaatcaccgaatacagatgtaaataacagatcccgtcatgtaaagattcttgattccac

SEQ ID NO: 194755 - DNA, 466 bp, Zea Mays
ccccattggggtcagctccgacagggtcacacccattgggatcagcatcgtcaaggtcacacccattgggatcagctctggcagggtcacacccattgggattagcatcgtcaaggtcacacccattgggatcagcatcagcagggtcacacccattgaggtcagctccagtaaaaagttccattggtacttcttcagcagcaggagcagaagggccagcatcctgatccaaacacgacactcgccgaagccgtctctttttcttcttcttcccctcggcaggagcagttggatgactggcctgatgaaggcgttttgggcgagcactatcagatttatgaacattcaaggtttttccaggctctgggatagttgcaacagctattgtttcagcagggaccgagtcagaagaatcatcagccaacatgtccagcatagaacttatctctgcatcgctcgggtttat

SEQ ID NO: 194756 - DNA, 523 bp, Zea Mays
gaaaggtgtcctccatttctctgacaacatccttcctaacagaagaaatgagccctctaacattccaaataagaatctttgaaggattcgtaggaagaacaaaaacaacaaacaaccacagggggaatgctcctacagatctactggtattgaccagccaaacaaggcagcgagggcctccacctagatctggttaagagggtggttaaaaagaacaccatatttctgcaaggcttccttattcatatcttcactttctgtgatgatttgcaagaccctcatagcttttctggaagtcctgcttctgcaatcatacatttcaaattccacactaatgccggcaactcttctgctgcgcctgggagcattaatcacctgagatgatgcagtcttcagggaaggcttgggagctgggagaagccctgccgtcttcctgctgatcttgcagataaaagcatcaatgccactatcgatgcagcagtctgaagcttggtcctgattggtatgagtttgagaatccagg

SEQ ID NO: 194757 - DNA, 1224 bp, Zea Mays
ctgatatttaccagaggcaagttcattataagtttgacaagaaatcagcacggcacggaggagaagcaatgagcacccagcaaaagtcccctttgtctaataagaatggctggcttgttgaagaagtgatgacacttgaaggtatccctgttggcgaatgtttcaatgtaagagctgactctggtattttattatacaaatttcaatgtcaattatatgttgcattttgcatgatactccctgcatgccagtctcagtttataagccgtttttgtttttctatatacattgtttttattatgcatctagatatagcctgtatctaatatatagcaaaaataatgtaccttaaaaattcaggatgacttataacttggaatggaaggagtactatatattagcatggtttaagtgtcatatcttccttttttatgattgctattctttctgtcatgtggttcactttttattagcttgataattctgaatgtgttttgatactttctgtacattaattttctttcttttgcatgggaatcccatggtcagccagaaacacattgacaccgttttgttggatgccacacatatgctagtgtggtggatattgggttcttggccatttctttttcatttggcccttgatgataattacagtgggccttcctttagaccctggtttctttttcttattaatataatgaggcgcagttcttctgcgcgggttcgagaaaaaaactatgctagaaaatcacaaaaacattgcagtgtttacaagtagatgcacttggtaggaaaaggcaaatggaataaaaacagtttcattggtcataggcaacagtcatcccattctttcatcactttgtcacacttaaaagggttactccctcagtccccaaaagaatgcaattctcacttccagagaagtcaatcaatttagattttgaccaaatttataaaaaaactacaatgccaaattattatcgttggattagttttgaaatttatttttatagtaagtctatttggaaatatggatgtcaatattgttttctataaacttgatcaaacttaaaaaatgactagtatcagatatataatttttgggacagaaggagtacgtatttcttaattctcacttaattgtgcttgccttgggccagctccatatccgataccaactggagagcaatgcatccaagcacaagacatgcacaatccagg

SEQ ID NO: 194758 - DNA, 460 bp, Zea Mays
tggtgagcccgcagtccaaattggtggttcggcaagcatcgtagacatgtgagaaagcttaaacgagggagagggagggttggactgaccgggaagggagctggccgcgttgaggtcggtttcgggtggcggaaactcgaattgggggaaatgagcgattctccggctatgggggctaattggaagcgggagtggtggctatggcttcggtatgacctaacgcagctggccgggggctcaatttataggcagagcaagcggtggccgcgaattttggatgagacacacggcggtcggcagtgaggaagaacggtggtgcagtgaacacgtgttcaccgccgtggcagtaactccggtggtcgacggggagtttagagggggtcacggcgatgcgatggcgcggttaggacacgcggtggccaacggcgatggcacgacgacggtgagcactttacccgcg

SEQ ID NO: 194759 - DNA, 374 bp, Zea Mays
catgatttcccaatgatcaacctgttgtgccacgaaatcgtgaggaagaaacgacacaagatcaactctatgaaacaccatttcctcacaaacttcctggcgagcaacccgcagaggcgacaatcgtttcacgcgaagcagcgagcgagggtgcgacgggctcttccacagaagcgaaatgggagagggttttgtgaacagtgcaagttccgtggagggagaagaggcacttcttgagagaaccgcctgcgcgaactcaccaaaacaattataacaaggcggggatgaaggcccactagcaagtgagagcgagggggacctaaaccacaatcgctgagaagatacccaaattgcattttcaaacttactaagga

SEQ ID NO: 194760 - DNA, 409 bp, Zea Mays
accagctccaaccgctagggctgcattcatccaccttctgctcgtcacctcctccaacgccgactcatgctcatcgatcgccgcctcgcctaggtctctcacctctccagacttgcgtagctccctcctgctcgtcgcgtcgtctacggaatctagcctgcggccattggcggctagtgccccgccgtggtgccatccaccagcaatcagtggtcgcggtctatcccttctcaccccttcggatccgctacgcgcgaggcacagccgcgtctatggtctgcctggctggtccctccctcttcgcgcgtgacacgcctctccaggtccgaccggcgtcgagcgcgccaccgtggaccccctcctctgccttagatgacaacatttggtgagtggtgacgcaactgggcag

SEQ ID NO: 194761 - DNA, 313 bp, Zea Mays
gtgactagcctccgacggctgaaaataagtcgggcatgactcgtgcttgcgagcgtcctcactcgctaccgccatgcacctcgtatgcatgcgtccgcctgccactctcccgcccgcccgtccaccaccgctcgcacacacacccttctagctagcccattgttgtgtgcctccctctaacacttgtttctttagttagcgacagtgatgcaaccgttctcctaacaacgaaaacaacaaccaatgaagaaaaaactagatggtctactgtgggggacatatatcctccgggtccactggaagtataaaagac

SEQ ID NO: 194762 - DNA, 657 bp, Zea Mays
caccgatggtaatggtgatggagggaggaaggacggaaggcgacgagctgattgctgattatgtggattgccttatgtctctggacaccaacacccggcctgtccacagcgatggtctcatcctcggtgctccaggcgggggaggagggacggtcgatgccggaactgagccagatgccatgagagatatcccctcatccgaggaccccaatgagcccgtgctcggcatgacgtttgagtccgatgaggccgccaaggcattctacaacgactatgccaggcggcttggcttccccttccgcgtcggcaggtctcggcggtcgaagggcacagaggaggttgtcgtcatgaagaggttcgtttgctccagggaaggggtgtacaagaagaaacagacctcgccggatgaggcggcaaggaagcgtgagaggatgtctatgcgagagggttgcaatgctatgatggaggtggttagggaggcggaccattgggttgtctccaaacttgagaaggctcacaaccatgagctcggcacttgtagcgccaaggttgggtaccttcgtgcgagaagttctcttggtggctctgataaggccacaatggtggggcctgacgagatggcgtttcttaggcagaatgtcctgggggaaggaggag

SEQ ID NO: 194763 - DNA, 530 bp, Zea Mays
ggcgaaaagattccctcaccgaccgcaacgctgcccgcgggagaggtgagccccatagtgtcactcaacggagggccaaggaccacaacccataacatcaccgccattcgggctagggctgacgtcgcgccacaagcactccttcgaacgacctatagggaaaaaaggcttggccaacggggacaaagggaagtggaaacgagcgccacgaggagaggggaggttggcggtaaggccggcgaggccagagtggtggccgccggaccctagacgggcgtcggcgtggggctgctgggggaggtggggagacgtagaggatgttcggtgtaatggattttctcggactctttcttataaccttatcccatgtcatcattttataatcctcaaagagtgcatgctaattctcacttcacttctcacttccttttccatagtgatcagttgcatgtgtcttttgctaccttttgtcatgcttattaacctacctgcatttaatgaatattgtaacaagtgatgataatatctta

SEQ ID NO: 194764 - DNA, 389 bp, Zea Mays
cacaaccgattggtcctttgctggcaggtctgaaagttggcagcactcaatgactgcacactgccctttagaagattggataccccacagttttacagtagcgcctccataaggaataaccaaccatttctcacaccagtctacccacatagggctatggagttcgagccaatccataccaataatcagatcataagtttgaagaggcagcaccctcaatgtagaatggaaatcataatctcccaatgaccaaagagctcccaccaactcttgattacagcgaagctatgcaccatcagctatttgaactgacaactgacttgctaccggcgacaacccttggaggttgacagctacttgtgaactgacaaaagaatgcgaactccccg

SEQ ID NO: 194765 - DNA, 416 bp, Zea Mays
aaggaatacattgaggaagtatctactcaactgaaaatggtctgtgattctgattcagatgagttgcctctcgaagagaaactcgcatttatgcatgagacaagacatgcctttggtagaacagccttgctgctaagtggaggtgcttcgttaggatcctttcatgtgggtgttgttaaaaccttggtagaacataaacttctgccaaggatagtttcaggatcaagtgtaggctcaataatgtgttctatagtagcaacaagatcatggcctgagctggagagcttttttgaagagtggcattccctgaaattttttgaccagatgggtggaatctttcctgtggttaaaagaattttgacgcatggcgctcttcatgatataaggcacttgcaggtgcttttgagaaaccttac

SEQ ID NO: 194766 - DNA, 292 bp, Zea Mays
acactcgcttttatcttcttgcctgaaaggatttggggaagcaaatattaagcgacaactacaagctgttactgaaggggtagcaccatcagttcttcagccaccctttcctgaaaaaccagctgcattctcctgccgatgccccgatcgctcgctaagatctccgcgctttgccctgcccgtcccttagccccagcccccgctcttgctagctatagccctcaccccggagccccactcgcttgcagtcatagaatggagagcattttcatcatgtccaagcatacggttt

SEQ ID NO: 194767 - DNA, 393 bp, Zea Mays
cccgcgtcgcccttgccaccgttgtccgttatggtccctagcgctcctgctgtgctcgtcgacctcgttgccagtgggggtgccagaccctctcaggttccctccacccctcgggtacgagcctaggtccgccacctctaatcctcccctcaaacagatgtgttcgccacctctaaccctcccctcagacatatgtgtctgcggcgcattccacccttgttgttgttgcccgttcgaccatggccatcggctagacacgggagcgggctgcggctctcgcctgggagcaggagcgtgcttctttggaggctctcgcttaccaattcgccgaggctaagctcctccttggtggtccaccgcatgagcccgccaccactaaggtcgtccgtgact

SEQ ID NO: 194768 - DNA, 532 bp, Zea Mays
gctggttggtgctgctactgttatagtggactgttgtgctggaataggaaatgacggtcgctggggaggcctcgacgacttgctggtagttgatgtctgttggacgtcgagtgcctgagcccttcgttcatatgctcttgccaaacataatgcatgattgagatcccgaggagccataagttcgacatcgatcttgatacgctctggaagacctgccgtgaagagttgtaccttctattccggagtgagtggcgtggtgtgggccagtaaatcccagaacctatcccgataatcctccactgttgtccggaatggaagccttgccaattccccgagtgggttgctacgaagcggtggtccaaattggagttggcatagctgcttgaaacgcccccatgacaggggtggttcatcacgcaggagctagttgtaccaagtccgtgcggcgccgagcatgtgatatgaagccaacctgactttctcctcttacaacgtgcgctgtccctgaaagaattgttcacatcgagtcaac

SEQ ID NO: 194769 - DNA, 554 bp, Zea Mays
caacaatcttggtatggatccatggctgttggtaagacgttggctataacttgcatgtcgccgactcgccgtgggccgtagcactagctggctagctgcaggtcgcgacgttgtccagcgctagctgtaggttgtcgcaggccacgcgcagccgctcccttcccgatccttgtggtcgcgttgccgccgtctttctgttgggattagggctgcgtaggcttcagacgcgcagagcgccagagccagagaggagggggcagagagcagtccaagctaaaatcggatgggcctgatgggccgcacgacagataaagggaaggaggtcggtacaaaggaaattgtggtccaaatagctataaaacactactattttatgttcttttacaatatttcggtgtatagcatagcatatatacgtatacgtgaatttttttttgttaaaaataatgggtattcaactgaatacccttgattcaatgtgggcctgcccctgagcacgacggagatggacgtgacacaatactggcgcattgtgggcaacctttgctaccttg

SEQ ID NO: 194770 - DNA, 442 bp, Zea Mays
gacattactatgctttcatacgacctacactttctgatcaatggtatgcctgctttatcttagaaacatcttgcacatacttgtttgacgattagttcatttgttcatgtcaagtattgactggagcaaaaaaattccaggttcaagtttgatgatgagcgtgtgacaaaagaagatgcaaagagggcactagaagagcaatatggtggtgaggaggaggtatgtttcactttctaaggctactattattgactttggtatcttataaacattgaacgtatcaatttcatgttgcagctacctcagacaaatcctggcttaaacaacaccccattcaagtttactaaatattcaaatgcatacatgcttgtgtacattcgtgaaagtgacaaggacaaaattatatgtaatgtggatgagaaagatatagcggagcatcttc

SEQ ID NO: 194771 - DNA, 328 bp, Zea Mays
gcggatggaaggtggctctcggccatacaccacccgaaacggtgtgtcccgcagcgaagtctggtacgcggtgttgtaggtgtactcagcccacggcaaccagcgcaaccattggtgggggcgatctccagtgaagcagcgcagctacatcactatgactcggttggcggcttccgtctggccgtccgactggggatgaaaagcggacgtcatgtgaagcttagtacccataagcctcatgagctcctgccagaatgtcgaggtgaacacggggtcgcggtcggagacgatggactgcgggacgccgtggaggcgcacaatgtcggtg

SEQ ID NO: 194772 - DNA, 575 bp, Zea Mays
ttccaaataattcttcagcttccaacttatggagctctcagaaggcagatgatcaagggcagagggcatcaactccatcagatattgcaacaacttcagctaactcacagaatcaagatccaaaacgagctgctgataatgatgcagggttagcatcttcccagaaggcaaacctagagtcgaaaggaactaccgtaacaggaggaaatgaatccttgcagaagcctttttcagatgggaattccatgaatgctgtttcatcctttgcacaattgcatcagcaaggcatccttggtgctaaacatggggaaaacccaggagccaattttcaggctatgaattcttcccacaatagtgttaataatagtggtggcattgttttacatggaagcccagcaccttcaaacattcagcagcaaaattactctcttctacatcaaatgcatgccttgaggcatacggatattgatccaggcagtttagctggaaagacgacaagacctgatgttggttctgatgcttcacagattgactggaaatctggccagaggtttgctcatgtagacaataaccaa

SEQ ID NO: 194773 - DNA, 328 bp, Zea Mays
cacagctatagaggacaaactgcaagaaggggtgccaacctgcattgaaactctctctgcagcgggcataaaaatttgggtgttaactggagataagatggaaacagcgattaacattgcatatggtgaagcttccatttatcccgattcatttgtattacttgttctggtccttaaactattctttctgtcagttttggtttcttgctgttccttccatgatctctctttcatctaacatatgcagcatgtagcttggtaaacaatgacaccaaacagttcatcattagttcagagacaggcgctattagggaggctgaagaccggg

SEQ ID NO: 194774 - DNA, 464 bp, Zea Mays
gtgacatgtagagacacccgtagactgcatctgcatcgatctccggcgtttcaggggtttagttttgagtagtggcagcccacaaattccggcagatctccgagagtggaggaggaggtggcggtcgctccgtcgacgggcttccctccatcactctcctgctgcccgtcttgtgcggatcctgaacaagccaccacgcctcgtcttgtgctcttctcctctcgatcgcgcatgtcctgtcctgacctgaccggcccatcgccatcgccatagcatcgggggtcgagcagctcggcgaaatgacgcagctgggctgaggagagcggtcgatcgagagatcatccatcggggtcagggactcagggtgtgagcgagggtgtaggtagggtgggtaaagatggacaagatggagagctacctgaacgagaacttcgggggcgtcaaggcgaagcactcgtcggacg

SEQ ID NO: 194775 - DNA, 790 bp, Zea Mays
cctccacttgcccctgcctcgacttggcaccgccgccttggccacccagaccacgacgtcctctctcgactctcgaccacgccgtccattcctttcccttgcgacgacgccacctcgctttgccatgctgtcagcttgggcgtcatacttgcttgcccttctcttcctccatgtcccgagctactcaccccttcgacctcatccactgtgatctttggacatcccctgtccaagcattttcggttaccggtactttcatgtcatcctcgatgatttctctcattctttgaacttttcctccgcggctcaagtccgacacacttcttcacctgggtctccacccagttccgtcgtccggttcgtgccatccgatgcgacaacgaccaagagttcgacaactccaccactagtgccttctctctcccatggcgttcagttgtgactctcgtgcgtgtacacttccctcagaacgatcgggccaaacacattattcgcaccactactgtcatgatccgctgcctcctttttcagacgtccattcccgcccactattggcagaggccctgaacactactgctcatctcttcacccgtagtgacctggacacgacgtacctcctctacgtcgacgacatcgacttcacgccctcctcccccgaactctagcgacgcatcatctcctccctccattagaagttcgcgataaaagacctgggtgagccgcaccacttcctggggatcaccgtggagcgacggccacatggcctatttctccaccagcaccagtacat

SEQ ID NO: 194776 - DNA, 413 bp, Zea Mays
ccagtggcttgctttctcgttggtgggtccctggtggccttctgctggggtggcactgcctgcccatgcgcccagcaggtagtgtggcctgcagagcaagtcacactgcctccgttgtcttcctccctccctgtcatgcagcaggtcctatggtccacagagcaattgtctgattggtttgtcggtgacgatggctacaagctcttgcagtatgtacactgttcaatcaggcatgagacggagaggcgttgataacaagcaatgccttgttggaattagccttgtggtattttcatcatggataactgcagtggatggaaaaagctaggtgcgctagaaatctgaacattggaaacttttgggtgctattaaagtgtaccaaaaccttttggtgctattttgctgaagtcagg

SEQ ID NO: 194777 - DNA, 296 bp, Zea Mays
gtggtttactatttctttgggctccaacatttgttgctctgtagatcaagggcgacactcggaaattggtataccgcgctttggttgggttgctgcaggataatgatatagctgttagggtatgttctacctctgcaattccttggcattatgagtttatagctgtaccgacttgttttaactgtttgtccattatgttcaactttcagctagcagcatgctcttctctctgttatcttttccaagaatcttgcttttctgaattagatttgtttgagtgtcttcctacatgttgg

SEQ ID NO: 194778 - DNA, 692 bp, Zea Mays
attagcccttcattactcaatgattggtgatctagagcagtaagatcctgtattttctttttgtcctgacactttctcttttatttgttcatgatttatttactttaacattatatatgtaccacgccaagtcctactcttatctgttttggactttgcacggtttattcttttggcgtgtcttgataattgtgatgtattattactacatgttggagtcagaatattggatttttggagtatattttatattgtgcaaattattttcatggtcaaagtgtcaaacgaatttgcacatgatcaatgaactttttctgtctacttatctattgttaatgatgtggcattccagaaacagggtcgaatctgtatctttgcttctaatttctgatcattagaagtttgtcttctatagtctatactgccacatgccatctattcggtgattaacaaatgatgatgtcttttatggatgaggttgagattatatgtagattttctgctgactttaggcattattcttcatctttctgttttaagtaaccaagtatgcttttattgtgtttgtctgctttttttattgaagaagattaatactatcttctgtttgcatggatatctaacactagtggcttgctaggtcactgaatttactcgctgaggttaatcttgcggaagaaggtgtattgcaa

SEQ ID NO: 194779 - DNA, 426 bp, Zea Mays
atcgcggacaccggtgctacctaccacaccacccccgaccctggtatactcacctctgttcgccctccttcttcctctctcccttcgtccatcatggtggcgaatggctcgtgtcttcctgtcacatctgtgggtgtcgtcggccctcccggctctttttgcattcccgatgttcttgtcgctccttctttggtccacaatcttctttctattcgtcggtttactgctgataattcttgttctgtcgagtttgactcttttggtcttactgtgaaggactcggcaactcggcgccccctcctcagatgtgacagcaccggccccctctacacccttcggctttcgcacgccacatcttcttcgtcttcgtcacctgacacagctggtgtttttgctgccgccacgtcttctaccacctggcatcgt

SEQ ID NO: 194780 - DNA, 593 bp, Zea Mays
aacttatgatgcccttgtgcttggttaaccaatccattcctaagatcacatcaatcccttgggatggcaagacagctaagtctgccaagaacactaccccacttaaaagaatcctgattgggagcatttgagctggtatagaaggtctgaccctggggttcgggtgaccaagggaatttctaggtgtgcagtgggaatgccatgcttttccacaaaactagtggctatgaaagaatgagatgctcctgaatcaaaaagtacagtagcaggagtaaattcaactagaaactcaccgagcacgactcccggggcttgctgggcctcttaagcgtcgacgtggtttactcgtgccctgccatgatactgggtcttgctctgctagctgttggaggagggtgccttggaggcgggtgctggggcattcttggggccattcaccgaattggagtaagtaggcccggatgccttcaactggggccaattattcttgtagtgactagggtctccgcagtgccaacaggcattagctggaggttgcttgcttgcaacggagggggtctgaaaggagctttgaccctactgactaaaacgtg

SEQ ID NO: 194781 - DNA, 455 bp, Zea Mays
tacaataatagctaccaggccagtttgaagatgtcaccgtttgaggctctatatggcagaaaatgcaggactccactgtattgggatcaaaatggtgaaagacagttctttgggcctaaacttattcaagaggcagaagaacaagttcgtataattcgggagaatttgagggtagctcaaaccaggcaaaagagctatgctgataatagaagaagactactagagtttaaggagggtgatcacgtgtatctaaaggtgtcaccaatctggggtatgaggagatttaaagaaagggaaattgtcccctcgctttattgaacctttcttgatcttcaagagagtgggagaagttgcatatcaactagagctacccgatcatcttgcgtatgtacatgatgtcttccatgtatcacaactgaagaagtgcctcagggtacctaaggagcaactaccaa

SEQ ID NO: 194782 - DNA, 307 bp, Zea Mays
atcagctcgagcaggatcacgtccagtgggttcagcatcatcgagatcacacccattggggtcagcgtcggcagggtcacacccattgggataagctccagtaaaaagttccactggcacttcctcagcagcaggagcgaaagggccggcatcctaatccaaacatgacactcgccgaagcctcctctttttcttcttcttccccttgacaggagcagttggatgactggctgagcgaaggcgctttgggcgagcaccatcagatttttgagcagtcaaggtcttttcaggctcggggacaattgct

SEQ ID NO: 194783 - DNA, 567 bp, Zea Mays
gtaatttggctaaattttccatggtcattattttattttgagaaacgatgtggcatattgatgtcttttgtttttcttgagtggacataaacacgactaggtatgccttgaatagaggggattataggaaacctggtatcacaaaaggtcattagctagcccaataatgtcttcatccactggttgtactttaataccctctcgtgtgaatacaattccgtcaatatcatagaaacgacatttgaggtttaaaaggtgatatattgttttgaattatttatattccaaccttttagcatctgtatggtggaaaaaaggtgccttacaaccgtaacttatgtttggacaaatctcacacgcaatttggataaatttcccatcgtctttattttattgagaaacgatgtggcaaaatgatgtgcggtgttttacttgagtggacataaacaccatctaggtatgccttgaatagaggggacaataggaaacctggtatcacaaaaggtcattagctagcccaataacgtcttcatccactagttgtactctaataccgtctcatgtgaa

SEQ ID NO: 194784 - DNA, 342 bp, Zea Mays
gctaaatagagtttttgatgctatcagatttatgtatcctgactaccgctacccgccaagggggcagaagagaaagagtgcaacttttgggaaggatgttacttcagctgctccgagtgagcccacgccgaagaggagaaaggtgaaggttcttactcaccgaccgcgctacattgaaccggccacagtgcccgaatttggcggtgagtcctcttcggctactgaagccaaagaacctgcgtttacgcagaagattgaagagccgactgcaatgccgaaggcatcctcagccaaattagctgagccgaaggccgataatattgaagagataggggtcgaagg

SEQ ID NO: 194785 - DNA, 479 bp, Zea Mays
ggcagactgacctctgcgccacgcattccccgtagccgctggagcgcgggcacctcatgtctatctcagtcgcgcgcgggatctctttctccgcctccgcttcacccggcgtgatggacgccgtgaccgcaacctccacgggcgtaaccccttgggcgagatagtcgcgtcgttggcctcgctgcatgataagtagacgtgttcctctcctctcctccctgttttcgttagttgcacagcatagtagaccgattgaaatcaagtgtggcgccgctgcgagtaaatccccgattagtcgacgaatcgtcctcggtctggtgctctgtaggttcctctggctgggaagaaagtggtcgaggccgggccacttggaatccatcgccaacgccgccggaattcctcaccacacttcggcttccgccacgcgccacgggcatggattctcaaccgattaattgaggtactaacgccattctcgt

SEQ ID NO: 194786 - DNA, 490 bp, Zea Mays
agaagctgcagttcctgccccacggttgatcagctcccaagaacttgagtaattttttccttacttctgaaagcttccttgtcctacatccattaaacttctattttattttaaccagtcttgacacagtttccaaactgttatttgtcatgcaggttcttcaggcctcacattgaaataaagcgcgatcgtcagactggcgaagtttttgaagtacttgatggtttgatgttcaaggatggatttctgtataaaaaggttgcacttagttctttgatttattgggggatacaaccgacagaaacagagcttttgaaattctcttctagtccaagcaatagagcttctgctgatgacctggattggctctccggcatgtatggttctaagaaaaggaaccttccagcagaacgagatatgaagtcatcatcttctaaaataaaatcctccaaagcaccagaccttaaagggtcaacttctactgaaaatt

SEQ ID NO: 194787 - DNA, 2001 bp, Zea Mays
aaaaatattgacgaaaactggaggggtaaaggggaaaaggcgacggccgcctgggccctggaggagcgagaaggcggaagaaggggagcggcagtcgcaggccgcagctcgttgatggtggttagggtttcgccgcccgcacgctcgacctgctgaagaatcgcccccctgttgaagaggtctgcgcctcgccctataaggctccggggaagaggagatagacatcagtggaccccggcgcgcggctgatggcggagcaggagcggagggacgcggaggctgggggcgatgccgcgggcgcagcggtggcgtctcacaccagcagcatgcaggtgaggtctccgcaccctacttctcggctgtcctgtacgattttgggagctttatgatgcgtagatccgctcgctgctatttgattggctaaacctgcgtccgttgcgtgccttcattttagtttgttagtgcgtagtaggttctggaagggagctgtcggaattttgcatggaggcggtggggaatttctgtgggccaaccgtgccttagatccgagttagctgccgttggagctggtaaattattgttctgagagggattgggtgtgcttatttcttggtgaactgtagtaatgagcgagatatcataagacttggtttttttgttcatgaggaatatgtgggtatgtttttttttgttttttgtgctatccccatgctgctgtaccagcacctgcatgtttgggaagtagtgaggcctgctttactgtggagttagcctgtgtcacttggtttctcactctgtcagtgaacttattggtgatagtctcgatgtgaacagttcagcacaatgagattgacaatttaaacaaagacgaatgtgccctgagcatgatgtaatcactacccatatgccatatcatttcgtaaacgtggggcatacttgattgaattatattgatacaatatatcagctactaccattttgattatttctatgccggcagtagtatccttctatcttgaaaactgtagagccttcccatctcatctgaaatttctatacaatcaaaagttccagcttaggtggatgtgatctacattgataaacttaacatctaggaagtaggaacagaagttgttttgatttaaatttattgcatcatttgattatatgtaccggtgggattttgttcctctgaagccaaatatcccaacttcattgaatgtctcacttcattgtagaaaaacaatcgacttttggtagtttgacctaaaagaaagataataaaaggcacccatgatactccctttcagtggttgttgcgtatgtcagaaaggtcaaaacagcttgtgatacctgccagctgatctatggtcatatttgtatccgtagttaactagttatactacccaatccaagtatcggtcacttcagtattaaacaaacactgatagccatgatttgttagacattgttgcaatggactagagcacgtgatgaatgtttcacttgcacagaatttttattgtggataagaggcccttgcagcagcatgtcattaggtctaggtgcagcagaggtaccaaggatagcaaagtatgacagtagctgggcataatgtgggagagcctagagtgcagatctaaccacgtcaaaagtcctacaagtcttaacgttcatatgattagaccgaaattttgtttttaggaatttgcaaattttgattagttcttactgtgttagtcattggtccaacgtccaatgaatgtttaatttgtgttaactactagcctttctagggtatctatatcgaggaggtccacacgcataatataatgatgaagcattcttctattttctgtctctcgagctctctagttctctctaccaagctatatctgtctgtctcattacaatccttaaccccattcagccatgtatattactaacgatggttacaattctaactgttccagcgtgtcaaagtataccgtttggctgatg

SEQ ID NO: 194788 - DNA, 683 bp, Zea Mays
gatagtgcaaacggtatatcaccagagtcggatgcatggagttttggttgcacgctcgtggaaatgtgtactggtgctgttccgtaagtagcatgattattcaattcgttatcattaatgctttgtgaatggtgttcttatatgctcattgaaatgcagatgggctggactgactgcagaggagatctgtaagtctgttgcaaaagagaagaagccaccacctcaatattcaagagtagtaggtgtaggacttcctggggagctgtggaagatgattggtgaatgtttgcagttccgagcttcaagaagaccatccttccaggacatgctgaaaattttccttcgacaccttctggacataccacggagcccacctgctagtcctgagaagtaattccatctgattttgtattacttttacgctaaaacatgatacatggaagcttaaagctttggagaacctttacctgtagaagtattatcgatcaaattatcttcgagctaaccattcctgaagattcctttacttggtggtgtaccagcaaatgttgaaatgtcttcgagctaaccgttcttgaaacatacttgcatattgttttccccgacttaatttttgacctagctacttgcttatgcagtgatttcgcaaatgaaaacttgcccaatggcatggaacctccaac

SEQ ID NO: 194789 - DNA, 365 bp, Zea Mays
ggaatttgaagttcatttgaattttctataaattttacaatccctagcatttatttccatactaaaaatctattttccaatttatttattcaatttcagactgtactggactggggctcatttacagaatactgcagggggttctgggtaaaacgcctacgactcagggaacagtgtataggatggcgggttgtttttgataaaactcagagtctgttctgcaaaatgcgcatggcgaaagggtacagggtgatataggccgtccgattagaaatccaaggtccagatcagatccagacataagtgaaccggtacgccacccaagccgttggatcagagatccacggtttacattttaaatacac

SEQ ID NO: 194790 - DNA, 1573 bp, Zea Mays
ctggtgatgcaattgaaggaacaactatgtttgccagtaaaaggtattggggaggagaagaaggggacacaatgttccgctggatactggtaggctgttgttattaagtactacttttcctttgtgcgtgcctgtgtggtgacgactaggaagcactaataaccagactataccttgatcacttaggcaattatgtccttcatttaagttcttgtggttgactgttcataggcaattacattatccatataaattcttgctgggtttcaactcttaggttactttggactgaaagatttgttgctgtagacaaattctgatggaaccgagaaagaaattgaaggagcaacaagttcatcatacaccttgaaatgcaatgacattggcttctacatatctgtcttgtgcaagcctgttagaaatgatggagttgatggttctttagtgtcgactgaagcgattggtcctattataccaggtagatagtctgacaactgttatttctatggaaaacaaccatattcgtgtgtgggcatttatttcaacttgatgattacactgggtaaacaaaccaacgtctttctgtaatttacttattacagggccaccaacatgtcaatctcttgaactagctggctctatggttgaaggtggccgtttgacctttcatgctgtgtatacaggagggtgcgatactcactactgctgttccatgttatctatcttatgtaacacctttttattgttatgtacttgttaatttattatttatttcttttttgttctcattctagtttgcggggaagttgcatccaagaatggttcagattacatgatgatgggcacaaggacaagttgactgctgatggttagtatatatagtgtctttgtagggctgatgcttatcctatcacacaccgctccaattttgttgtccttttctctttgtagaactaactgtttattgatttcctgcaatagaatgtctagaccttgatctagctgatatcgattgccggattgaacttatgtatacacctgtacgagaagacggagtgcacgggttaccaaggagtgttacttctgatacaatcttacctggtccgtgcttcttcacaaaacttctattgattccattagctggagaagccttgtcatggttgtaacttgtactattcaataaacaactataagatgagcggattccaattgtaacttgtactgttcaataaacaactataagataatgggataacaattgtaacttgtactctgttcaataaataactataagatgatagcataattaatcatattatgtgatacattgatacaattctgtgttgcttacatacatgataagaatataaaagaaacatagctttgagcatagtatgcgcataatgtaacatgaaacagtattataccaatctatgcattgaactatatgttgacccattctttcatgcaggggagcccaagggtgtcaatcttattctacctgagtgttttgaggacaatgaaatttctcccatcaaaacctatttcggtggcaaggaaggcactggcaaat

SEQ ID NO: 194791 - DNA, 607 bp, Zea Mays
atgttcaccgccggcgacctcttcgccgggattcgtgctacgggcgtatgggttttgttcaccaggtaaagatctcctcgcggatatgtatgagctaccgtagactcgtcacttcctgtcctttttcaccggcgacgtggcctcctggccgtcaccggtgttgccgtgtgttactgtggctgcgccacgctccaagctctccaccacgtcatatctagccgcaccagctcaccggtaaccgtcatagcttcttaaccggtgatcaccggaggaagcgccacggtgaaagccacctgtttcacacaccgagcgctttgtttcctctggccgccagcgctgctcgatcggattgatcaccacctctcaagtattctataaattgaggcctcagcttgttccgctaggtaatcgtgcgtccagtgaaaccactcgtagctccgatcgtctcccacagcttcccaatttgggatttcccccaaaacgattgaagaacaccgcgaacccaagctcactgtgggaagctctcctcaggtccgatcctgttatctttagtcttgttctagcatcctcatgtgcccttgatactcaccgaaccaccccattgaat

SEQ ID NO: 194792 - DNA, 326 bp, Zea Mays
ttctaaggtagatttgtggtaacatagggtataaactgaatgaaatattgatgaacctttataggaggtccaacgacaaaatagctcgataaaaatgtgaaaattatcaagcataacaaattaatagttcaaaatacaattgattgatgaaagggttacaacatataggcctatacttcccctaaccctaataggcctaatgggttgggctatgctaggcccataacacacacaaccataatataaaactgtctaacacctcatgatgttgaaacttagccacatcagatgttgagactggattgaaactccgagaacaccgagga

SEQ ID NO: 194793 - DNA, 602 bp, Zea Mays
cggagcttgctgagcctcttgagcatcgacgtggttaactcgtgctctaccctgatactgagtcttgctctgctgactgttggaggatggtgccgaggtattcttggggccattcaccgagttggagtaagtaggtcctggtgccttcaactgggggcagttatttttgaagtgactggggtctccgcagtgccaacaagcatttgctggtggttgtttgcttgtgaccgagggggcctgaaaggagctctgactctgctggctgaaacgtgatggagtgggtctagctggtctattgaagcttggtcccttgggtggaaacccgaaggatcgagctctctggtgccggtcttgctgctgagctcggagaacttgaaattttctcttgaggtgacctttttcttcttcctttgccctttccacttgtatggctttattggagaggtgcgagaagctgaggaaatcttggctggcaaggatggtcttgagttctggtcttagcccttttagaaaacgggccatcctcttggcttctgtgctgacatcgtcaggcgcatagcgagctaattttgtgaatttgtgcacgtactcgctgacagatc

SEQ ID NO: 194794 - DNA, 545 bp, Zea Mays
aggttacgaacaagggcaatataagtaaaacaccactctcaaactgagatgggagattggagattttagataatatacataatataatcacaaggtaggatagacagatgagaagggtaaaggtaataacaaacaaaagtaggcaaagaatggagttaaaaaactcgcaagtgacaaagaagatacgtccaagagaaaaataagtaaaacatacaactctcgaatggagatggaaaagaggagattttaaagggccagtataagataaacatcaaggtaagatatagaggtgataagggtaaaggtgataatgatgaaaagcataatccatggacagagctaaggcaagaatcgcaaagtgacgaagtggagaaaacaaacaagtataagataagtgaggttccgacagaagagttgaagtaaaaactcattaccgaaggaagttataaggaattagcgagattgttaaggttgtgcaaaataaaatgaccactcatggatcattaagaaacaagggtggttaagggcatgttaactgaaatgtc

SEQ ID NO: 194795 - DNA, 398 bp, Zea Mays
ctcggttgtctttcatcaaaacacaacctagtccagtgcccgaagcatcacaatacacatcaaatgatttggtgttgtcaggctgtgctagcatgggtgctgttgtcagatgccgcctcaaggtgtgaaaggaatcttcgcatttctgaccccaatcaaacttcactcctttcttcaacaattcagtcattggtttagcaatccgagagaaatccagaataaatcatcgatagtgtcctgccaatcccagaaaactccgaatctgccgaacggtggtaggaggcttccaatccatcacttcttgtactttctcagggtcaactgctatcccgtcctgccaaatggtgtgacccaagaacatgatctcccttagccagaaaccgcatttggagaatttc

SEQ ID NO: 194796 - DNA, 468 bp, Zea Mays
cagcgccccccgccatgcccctgtatctcgcctagcacacgccgcgcccacgcaggcagccgtggatctcgcccccaccgtcgagcttccatggtaggcatcctcttccatactaggcggccatggcatgaacccatcccctatccgcgcccccatcgcacgggccctaatcctagaatggtgccttcctccttctctgtcgcctctgccctactcagaccttcgagacttccactggcgatacacacccactaggtacgtgcaccccttctcctctattcctactatgcaaaaccaagcactcaaactctagttacgtattcaaatatgaagttgttgttccaatcgatgatcaaggagcagacacaactgatcgagctcttattggaattccaaacaccgctccactaaatatttccccataggtgtacgtgcaccccttctcctctgctcctactatgcgaaacc

SEQ ID NO: 194797 - DNA, 485 bp, Zea Mays
atcaaactcatctgtagagtcataaatcctcctctttgtagggtctatgagaacttcataggcctcttggatggacttgaaatggctttctatctcatccttttttgcttgttttgcctcctctgttgtctctgcaagaatcagggcagcctgcttatctggatgatgtttgagagccatctcacggtaacttttccgaatttgatcttcagtggccaagaacctcaagtgccccaacccaagcaaagcatagtggtcctgctgttgactgccagatgacttcttcttccctttgctgctaaaggtatcagaagcagtattaaaatcttggcttttgtcatccgatgaaacgctgtgatcatcagtttctatatcttcatgctccgcaagaccaagcagcttcattgccgcagcatggaacgaataaccagcaggttcatatttcaaagcttttacaggaaggcagtttgatgaaacaaacagag

SEQ ID NO: 194798 - DNA, 762 bp, Zea Mays
cacagacttcgcctgcgacgagcatccgtcaggtatgcccgtccctctctccccttcgtgccgcacgaaaccgaccaccccaaaccctaatataagcattttgttatcggatctgacccagttccagttgcaagtttatacatgtaatgtacctactaacatttttttttgcaaaaaattgtcgggtgtacactcccatgttctacaccagctccaaagtgccaagggagatggatgataccttagctaccataaggatgaaattgaagaagcggaagaaaggcaaggatagtaatgattttgatgcagtggctgaatgtggacccgaggttccggcattggttcaacaggaaggtgaacgggctgttgttgatataggtgatggtgttgctgatgagaagagcaatttgaatgtcgtgaaactggagggtagtgatgtttctgggaattgtgcacagggtttggatgatttggggttgaaagactccttggcagtgctgtttacaagacctggtcggaagtcacggcaggtctcagaggaggcagaaggcatggaagtttcttgtccgcatgatgaggatggtcttaacaagggatctggtttggctccagacacagcttccaagggcattaaaaggagaaggcgacgcacaaaggaagagatgaagaatgcttctgtgcaggatcagaaagcctcattgcctcggaaagcaaagacaaatggtagcaagtctactaaactctataaggtcggtgctggtc

SEQ ID NO: 194799 - DNA, 1092 bp, Zea Mays
aaatcatgaaactatttttattaaattctatgaaaattaggaatttagcaaaattggtttgacatttttaccatttttctacaattttctatagatttctaaagttcacagaaaaagaaaagagaaaagcttaaacagtgttgggctcatttcagccgaagcggcccagcagcgagcaaattcgcccgtgcgcacgcgtgcccgcgacaactttgcaaaaacgcccttatcggttcaaaattagagtggcggtccttggcgctacaagaacacccccgtgcttctatcctttctcagttcgaagtccatgatggcgaaccgcgtagggacgaactccggcgagcttgtatcggatgattcacgtgatgactagcgttctactttgacagagatcaaatccaagacctaacgagggtttcccctcaaacaatttcatcaatgggacagtaaatcgatcggtccatggaaacaacgcggacactcgaatgggtatcgcgttcctggtaattaagggggactcactgtaattgggttggttgaggagcatcatggaagcacactaatgctgaaacaaggtagcagagagcatgaacaaacctggaagtggctggccacggcgaggtgcgttttacggtggaggaaaccgtgattgggggaagtgagcaattctcggtccctggtggataatccggggcaaggattggtgcaatagatgtgtgattaccctatggagccacgggtgcactcaatttatagtgatcgtgagcggcggccagggaatttgggttggagatcagctcacgacgacttggatatttcaccgtgctctgcgtatcgtggcgagcgaggagaaaacggtgcaggaggggtaactgactatcctccacgatccctacgacgtggagaatgctttgaggcgtggcacggttgagtgaaacggcgagctccggtgaggataaactcggccggccgcgcggcaagtggacaggatggccggaccagctagcaatcgcaatccatcccgcccagatctttttacccatccccggtgttatccattcctccccgagcacgaatcgagacagcggtggc

SEQ ID NO: 194800 - DNA, 278 bp, Zea Mays
ttacaaatccacacatttgtgaaccaaatgactttatatgctttaacatagtagtttttgaactttagtccaaatatgcactatttttgcacataggcccctagggtttgaatttagggttttctagggtttcaattagggtttctggtttctcaggggtatgaatgtaatgtagatccatctttagtaacattttatgattgttttacttaaaccttagggttttctcaatttgggtcatgttttacccctttaaaccccatttagggttaagtccc

SEQ ID NO: 194801 - DNA, 320 bp, Zea Mays
gatctgttatcagcttggtcttgaacttactacgttgaatagtgcttgccctctgtatgatgtagtaactggtgacaaggttcctgattctctggatgaagatttagaagctgaatacaatggccttcttgatgagatggcactgctttttgcgcataatggtgacagtgcaatcggtttatccctggaggatggactggagtatgctcttaggaagcatcgcgcaactcaacctatggattctgtggaccaggatggccacttgagatttatgacaaattctagagctgtagacatttccgtaagtgcttcaataggaa

SEQ ID NO: 194802 - DNA, 1055 bp, Zea Mays
ccgcgatcccatctcagcccgtagagtgtcaaacagagcaaatgtgggggtggaaatactgtgtaggttctgcaggacttcatctctgcgagacaacgcatcagcagctccattgagtttgcctggcttgtactcaactgtcatgtcatacccaaataatttgctgacccatgtatgttgagggatggtggataacgttggtctaggatgaatttcaagctgtagtgatcagtctgaactgtgaacggtcgccccagagatatggacgccaatacctgacagctttaaccaagccaatcaattcccgttcatatgctggcagcttttgatgatgaggggctactggcctactgaagaaagctatggcgccctcaccttgatgtaagacagccccaaacccaactccagaagcatcactatcaacaataaagtgacgagtgaagtctggcatctgcacaaatggtgttgtgatgagggtttgtttgagcaatgtaaaagcctcggctgcttccggtgtccaatggaaagactcccttttcaataaggcggtgagaggtgctgctattgttccatatccagcaataaacttctgataatatccggttagtcccaaaaatcctctgagagctcgcaaactattaggaagtggccaggtttccacagcagaaactttgtcgggatccatggcgacccctgttgcagatatgatatgtccgaaataggctactgtagcagccccgaacaagcatttggagcgtttcagggctagttgatggtcacggagggtctgtagaaccaacttgacatgctgcagatgggctgtccagctattactgtaaatgaggatatcatcaaaaaataccagcacgaactttctgataaatggtttcaatatgtcattcatcaagctctgaaatgtagatggggcgttagtgagcccaaagggcatgacaaggaactcaaaatggccacgatgggtgcggaacgctgttttttccacatctgctgggtacatgcgtacttgatggtagccacttcttaaatctaacttggta

SEQ ID NO: 194803 - DNA, 645 bp, Zea Mays
tgtcgaggggatgacttgccactggatggcacatagtctcgagcagtctgtagatgaaggcttggcgccgagctagacgggtagtgggaggcgaagaacattccgcgccgtataacggcggactcgggtcgtcgctgccagatccttggcgctcggccgcggcgaagtggtctggagagagaaaagagagaagggagagaaccggtgatgaagaagacgcccgacatcacttgatcatgcgttggacggtaaggattaaagggataaggatgaagaaaccgggaccgtaggatggtgattggagggggtagatttatctcgcgtacccgccgttcatcacgaatcgcacggctttgattagaagcaggaaataccccttcatcccaaccgttatccaccgtagaccggcaatctgacgactaaagcgaaatagtggggatcgtgcgctgtgagtcgtcgatctcagatccgacgatgactcgggaatcaggatttatacccatcgccggtctaatctgggcgctcggggttggatcggacggtccaaacatcactgtaccccttcggccctgcacatttccttaagagcccctcgggtttcagtgaatcaacccgccgtccagtgagcgctgttcactgtgtctg

SEQ ID NO: 194804 - DNA, 964 bp, Zea Mays
tggttgtttcaatataacacttgaaagaacagacccaaggatgtaaactcaagtgttactacccctcatgcaaaactcaaactaacaagaagatggtctccccaaaggcagttgctcacagaaaatttttgggcaactcaatctggtataccatcacatgtcaccaaggtgctatttcaaatcaaaacaagttaaaaatgtacatctaacaaagataccattgtcagatctttatacaacacaacacaccaatgttgctattcaaaaactgttgctacctgcctagagcccagttctccaacctttccatgtccggggctgggtgcctgggtctgcgttaatgctggacagcagcttgtgattgtttagtgtctgaaaactctagcaaaagtctggtggcaaacaaggttctcaatttagacatatcactgtgtggtagcgtttgctccttaattctatttctaaaacatctgcttattggtgtccatgtgctggttcatatgcaatgatgttctttgtttgtgatggaatcttatgattttgctaaaatgtgcattgttttagtggtacttccaaacagtggccactaaccatcatggtgaggatgcatcatcagtagcagtcagaagtaagaaaggcttaaagacgattagacataccactatgtttatttactatactattattttgatgtactaaatgatttcatttgagttattttggtgttttgatggcatatggaggcctccaagatgtaagatattcaaaatttacccttctagtgtgtcttattttatgaattggttttataagaaaatgctgattcatttcagtatccatcttgcagtttttgactgaaaagaaagatttaacaattacattgatcaggaaccggattctcccattatattctttggatccttgcagcccatatttgatttcaatggctaattgggttattggt

SEQ ID NO: 194805 - DNA, 452 bp, Zea Mays
gaaaggggtgggccaacaaggggagagcggagagcgccagggtgaagcggccgcatcgacgtggcgagtcggcgagtctgccacaagatggcgacgatgaggcagaaacatgtgaggtgtagcgagggcaagaggcggtaggcggtggcaagcgacaacaattgttgcattgcgacgacgtggtggggcccagtgacatagtgagggcagatggcggtggcaccgtggtgccaaggcaggatcccaccaatagcccgtcttcctgtcgatgcggactaggaggcaaagtagtgacgctgcgtgcaggatctcgacaacgcaatgagctgacgagtgacgggaagacaaggtggcattggtagcggacgggttaggtcacccactaccgatcagtcatgaccgaaggagcgaccgagccacgagtagctagccgctaggggaaggaatcgaac

SEQ ID NO: 194806 - DNA, 462 bp, Zea Mays
catctcctctatgtttataagtcgagtcgagtcgatgcgcggtacgtgctcgtaaattatactttgcatatattatatggttgtactcgcgaagtctagtagatacgtcgggtagtcaagtaggatcgtaatacaagttgagtaatggagttagttgttttggggtaattattgaaatgctctgttcacatgataaatatgtatggttataaaaatgttgtagtatatgttgtgtctcagtctgcgataataataggtatgtcgacgtgcatgttgtatagcggaccgtgtcgttgctctagttagccaaattgttcgatgaattggttaaggtcgtagccacgataatttgcttgttgtattctaaatgcgtatggttatggttgcgaataaaaagtagtagtgcttaggtgatgtctaaattaaaatgcaaactattggtgaaaagcgcttcgatattga

SEQ ID NO: 194807 - DNA, 491 bp, Zea Mays
catcactccttcatttctcccagtttcaaaccacaacagggaatcaaccttaatgaactttgttcaccaactaaccctctaacaatttgccgttgggaccttagtcttgtacctcttggatcagacacaaaacagctccgaattccaaggaaaaacactaaaccaaaccaacagtgaactgaatcagcacaacactgatcccttgcagacctcccttttcaaaccttggtttctcacaattccatatgtcaactggtcaatcttccttaaccaaaactattcttcacttatagcccttcctacttggtataacattccatggcttaaaatgctcagaacaagagttgtggtgcactgaagttgagcaacaacactgaaaatccaatttcaaagtctgaaatagcatatcaccaagtctgacagaacatgtttgggaccattttactcccttctttgtgtagtaccagaccaaacccacttaaggaaacttg

SEQ ID NO: 194808 - DNA, 371 bp, Zea Mays
tggtgaccgagttagtcctgcctgagccaaggaaaggaagttgtcatcagatggctattgatagcaaggagccagattcactcaagattatcaaggttgtgtgagaattcccagatgtgtttctagaagatttaccaggtatgccaccagagcggaaagttgagtttgctatagagcttcttcctggcaccgcccccatttctaaaagagcctatagagtgcctcgaccagagttggttgaactcaagaagcagattgatgaactgttagagaaagattacatccggccaagcacctcgccttgggccgcccctatcctattcgtggagaagaaagatggcaccagaaggatgtgtatcgattatcgagct

SEQ ID NO: 194809 - DNA, 353 bp, Zea Mays
caacaacccggcacactgcgctgcgctccccggccagggaggaattgatggcaagcttgagaggtaaatgcatgcgctgcttgtccagaggccactttgctgcagattgcggggatcccctgaaatgcctcaagtgtcgagattcaggtcatatggctcggcagtgccctcagaggagcagtagcagcagcacaccaaccactccacccccacatctcgacggcccctgcttcccatctcttgtgcagaccgtcatggtgaggcccggctacccggactcccgtccgaaggagacgttcactgtggcggcctcctcccaggagatggaccgggagcttgacagtctgagcacc

SEQ ID NO: 194810 - DNA, 318 bp, Zea Mays
cctgcctgccacttgctagacgtacgctaccaccacaaacctatatactaaaacttttgcagcacatatattcagatgttcttgttcgatcttctcctggcggaaatggatcgatcggcgccactagcagctatagcaaggtcgctagcagatatatattcgtaacgtggaaaaaggaaggacatttagatgctaggaatcaagaggcaaagcgaggccgctttagttggaaggcacgcacgcacactcgggacgggacaaaggctagtggacgcatgccatctttttcattccatcgtcgccccctccgatccggcg

SEQ ID NO: 194811 - DNA, 292 bp, Zea Mays
ggagcgtggccgtctccgagtagaccgggttggtaaacgagaattgttgtcctcgccgattggggcgagcataggcgagggggatcttcggaatctttttgagggtgaggaattgaggataatgttgttcaattatagggagatgggtatcatcccgaaggttgagctgatgtaatatgtgatgccctcgccgtgtgtatgtaactataatttgtatggtaatgtggcctgttggccgtattcctacgcctgtgttggtttcggctgcgcccgtgggcgattttgcgcaaag

SEQ ID NO: 194812 - DNA, 734 bp, Zea Mays
gctgatgcgaccaagcaaactgcaggtgggaatgtgggtgcggaactgggagaggataaacaggcagaagtgggaggtgaagagaatgctgaggctataaagctggtggaggcaagtcctctggatgctctagctgcggaggattccagtgggcatgagcaaggtaatgatgccaatttggcggaaactgaccaagttgggaatcagattgaggctgtctatgaggaaaatgaggatgaccaaactggaggtgataatcatgttcaatcaggtcagggtatggatcttattgcgattgctttagaggaaagttctgatgatgaacatgaatttgaaagatctgacagtatcttgcaagaacaagtggaatctgggagcttaattgataaagtgattgaagatagggtagagcagctggaggccagcaggaaggctgagaacacagagaagaagctgaaggtgtcaatgaaaccgttggagtgggcagaggagcttgagaagaggcaggcctcgtctggtcaacattgggaggaaggagcagctgcgcagcccatgcaactagagggaatcggaaagggcccaccagctatcggttacatgcaaattgagatggacaatccagtaacccgtgtcatgtcctcaccgtcatttaggtcagaccatggctctccccaggtgctggctgttcataggagctatatagcaatgggcacatctaaaggtgctgtcatcgt

SEQ ID NO: 194813 - DNA, 557 bp, Zea Mays
cgaaaacgacacaagaaggaaacacatcttaggggatctcacccagcttatcaccaacaaggacgatgctgatcttcaattgatttcaatgtggggtgcaggtggaggcaccgggacgacatccatcataaggaagtgctacagtgatccagagatcatccaaaatttcatatgccgagcctgggtcaacctcagccatccattcaacccccatgagtttgtgcggtctttgatggctcacttttatgcaaacagttgccaagaaagacaaggagggatcatcggtgttgatgtcctaactagcatggatgcgactgccacccagggggatctcctcagcgagttcgttcagctagttgacaagaacaggtaccttgttgtcttggaagacctgcccaccatggcagagtgggactctatcaggacgttccttcccgacagaaagaatggcagctggatcatcgtgtcctcgcagaaatatgaaattgcaagtttatgtgtcggacatccctaccaaatattggacctgaagcagtcctcgcccactgagcactccg

SEQ ID NO: 194814 - DNA, 702 bp, Zea Mays
caattagaggatacacctagttgcaatcaacaagcaacaaatgttgcaactggagcacaaacaatgattacaactgtaatcaatgagtaaaaacagagactcaagtttgcaattagagtatacacctagttgcaatcaacaagcaaacaacgttgcaactggaacacaaatacaccatgcaactgtaatcaatgagtaaaaacagagactcaagtttgcaattagagtatacacctagttgcaatcaacaagcaacaaacgttgcaactggaatacaaacaccccatgcaactgtaatcaatgagtaaaaacagagactcaagtttgcaacaaacgatgcaacagaaaatcaacaaaccacgcacggtggagcaacaatttttgattgttttttttcttaccggatggaacagctgggctgcatccggagtgatcagcgatccaggtggaattgaaggcggtggcgtcagcaacgttttgtgatgcaagggatcacctgatccgccgtgtacacccgctcccgttgtcgcaatcggagacggcaatattggatcagcacctccagccacaacaatcgccaaggaattaggggaggagcatcgaggcgattcaaggtgcggcagcgacggtggggccatggatctagggttagaggatcggaggaaggaggagacggcggcggcgcggtgacagggatgcgat

SEQ ID NO: 194815 - DNA, 746 bp, Zea Mays
agttgaaaaagaaaggaccacattaaaaggaaacaagtaagctaagatacttctgttgtcctgataattcacgttttttccttgttgtatacatatatgtgaaagagtattgcaagattgccatttatttgatgatatgcaatttgttaactagggcaaattcttctgatgatatgcaaaacgtaagcttaaacccattgcccaaggctaaagcatgcagggcaccaagaactagttcacttgctatgaactcgtcttctaatttccaacgttcaactggaggaagtgatgagtgggaagaaacaccttacccaaataaagcctcgcctttgggaggcatgacaaatcgcaaacgttccacacattcaaatgcttcctcacctcctattgcctgggttgggcaacgcccacagaagatgtcaaggacaagaagagcaaatgttgtttctccagtgtcaaattttgatgaagcgttatctgaaggatcaccacttgacactgccactagatcggcacctatagagtctggcagtgtcttgctgacaaagaacacatcaacaaccaaaatggataacatctcatctcctgctgggttgtcagaaagtgagggatcggctgtgaatgaaagcaagtccaaggagaaagccatgcatagtggtgaagtcgggaacgagggtgcaaatgcagcccataatgcaatgggattgatattttcatcaaataaaaataggattcctttgaaagag

SEQ ID NO: 194816 - DNA, 638 bp, Zea Mays
cgcgtctgctgctcctgatgactaggttttcatcctcctctcctcagtctctcgatcttgctcttctcaggtcctgtgacaacaaatctccctatccgcagcttccgcttctttgtgacagtaatcttcatatttttgcctgtcatccatgtcagcgaggtcctactttcatttacaatgtggagtagaactgtttgattgtttcttcatgccagttctgttttatagccatcaattcatgaagaccaatgtcatgacatgctttctcaatatctggcatctcaggaatttgtctgatcttttcccaattgatccatttattgtcagcacattacttcttgctatatatattgttgtatagattcatatgctcgttcgaccaaaaacggtcatcgcttgcagttctatcctgtagatacaaatttacgcataccttcccgacactttacagtgtacctaatgaggaccgcatgaagaagaaagttgagaatggaaaattgtcagaaatatttaaaagcaaaattgtttcttcaaaaaaatcaaaaacaaaagatgcaagacttgtgttttgcactccctataggtctagttggttggaaaatcagaaattccacatcttatttattgatgaggcagca

SEQ ID NO: 194817 - DNA, 369 bp, Zea Mays
ccaacaaccacctagtgggccccacctcgcatgcaatgcattgaccaaatctccattagcacatgtaaatctccagggccccatgagcatgcatggctgcatagcttcccaaactgaaaattgcccccgcatggatcttgtgcgcctacgcaccttgaggtcctttgtgtggctcgttgccgaccaatattgggccaggtcgcattaaatctgtgatttattaaatatgctttaacctttgcgttagacgttcgatttatttcattttagtcccattagctttgtagtaataccgtggacatgttagtaatattatttcgctgcgacacacgtttttattagttagttgattatttatttttccgagtt

SEQ ID NO: 194818 - DNA, 279 bp, Zea Mays
acgaatggttagtgataaaatgttgcctgctgttgtggactacatgattggttagtgatcaaaaaagggagtttgcatatcaatgtattttatcatattaaccactattcatataatgttgttctctgcctctcgcatgcgtgtgttgttggctcgcatgcgtgggttgttggctgaccggtctaacatcgtagcacacgttcgttgccccccgaccctcgcgtcgcactcccttgcacgccaccgccgctgtcgtcgtccccagatccgtgctcttct

SEQ ID NO: 194819 - DNA, 287 bp, Zea Mays
caaagatgtaccatgatttgaaggaaaagtattggtggtacggtttgaaaagagatgttgctactcatgttgcattgtgtgacgtgtgtcagcgtgttaaacccgaataccaaagaccagcaggattactacaacctctcaaggcacctgaatggaaatgggaagaaatcggtatggatttcatagttggactaccccgtactcgggatggctatgattcaatatgggtcatagtagacaggttgactaaagtggcacactttatacctgtgaagacaacttactca

SEQ ID NO: 194820 - DNA, 492 bp, Zea Mays
ggggattggaccaaaatccaaatcctaacaaaggaatccaattataatcctactacagaaagtccaccatccagtccaaacatatctcaatgtgcttaagagtctaatttaatccaagtccctcaagttggaatccatccatcatgatccaaccatcagccatcgcattcatcgtgacccaaccatctcaggaaggcgtcttactcttccccttccccatcacaggcaacttgaccaccaagcgaagctgactctctcatctcatctatcatgtcagatctccagccagagctctccgcaaaactactcactgtgaaactccaatgttagccttcatccatcaggcactggacactccacatgatcctcactgcagaactccaagtcatgaccatattgaggtacacaacatggtcctggcccggagctgttggtgtctgtattaacctctacttggtcaatgcctatattgtctagctactgcttgttgca

SEQ ID NO: 194821 - DNA, 505 bp, Zea Mays
gctgctctcatgaagttgccagaaaatggtttgttctactctatattttctgttgtagaatagcttttatgcgtcattcaaagtatgctaaatttttccttaattttctcatgttctctagaacacagcaggcaattgcacaatgctaccagcgatgtgttatccaagcttcatgtggtgatgcgtacagtagataatcttcacttgaaacacaggcagttagcagcgaactatcaaaaacaaagagattcgagtgcctggaacagagctgaacagaaacgtctgaaaggtattttgtatttgttttgtggatggtatttttgagggtgctccatctttaatagtacttttgttcttaactgaaagtattttagcaatatttaaagttttgttctgtgccctagatcatcaaacaagtaaatactaatctccgttaaaatggtgaatgccttgtggcaataatattttcattatgttgtgaaactgtaaatcgattgtttcttgc

SEQ ID NO: 194822 - DNA, 345 bp, Zea Mays
ccccttttgaagctattgctcgtgcccacctccctccccgcctcactctcctcgtctcagctcccccactcgagtcgcgcacggtcattttttaagctcgccggagcttccccgttgctaagcctcctatgctcgaattctccccccgcaaggcccacccgtcgtccctggccgtgacccgccaccaccatacgaagtcccaccaccgcctacgcttcacccgaggtgaatttccccgatgaagacccctttatctctctccttgtcttctttgctctgttgattagccaccgtgatcaccggaaacagcgcctcatcgtcgtgacgtggctctccggccaaccg

SEQ ID NO: 194823 - DNA, 533 bp, Zea Mays
gttttcttgaaagggcatatgcatgctttaagtaatcagcatgggttgaaccacgaggacttcctctttgtttcaaatactcagccctctgcctcttcgcctgttccagtaagataatctctggatgttagaaacagaacacaaggataaaaaaatgtttaacagaacactatgagagttgagaatacataccctttgaagtttgttgtccagctgttctttcagttttctcctctctgattctctccggctgcatacagtcatggcagctttttggatgcgtaaaagcctagcttgagccttggtcttttcagcttccagcaacctcagtcgtttcttctcagcagcagcgcgcttcagagaaattgcagagcgcacctgctccatgtatttgctctctgattttgccttctgcaccagggacctcgctgtcctctccttcagtgcggcccgcttctgcatatcggcatgcagaaggcgcatgcggttctcctctgcctgtcggacacgagactcaactctggtctcgagtc

SEQ ID NO: 194824 - DNA, 326 bp, Zea Mays
gccggaatacaggtcatccagggcctcgacgccccaaatcgagcctggcttgatgctatgcgcagcgaagtcaaaggtgagctcggaggaaagcttcataccagctgttgggcagctggaacgccagtccacgacgtggggtgggattgtggcgcggacaggtcttcagcgaggcattctgcccgaccagagcgccaattcgcaccaggacggtcccaacttcactccaggaaactccacgaagatctcagggcaagccttatgcttcaagtcgcagcgccaatgaggaacggccatggcggggcggattgcacggtgatgtcgac

SEQ ID NO: 194825 - DNA, 359 bp, Zea Mays
cctagtgccatctttcttctccacgaacaggacaggggcggcccaaggcgaggtgcttggcctgatataacctttctctgacagctcatcgatctgcttcttaagttcaaccaactctggtccagataccctgtaggctcttttagaaatgggagcggtgccaggaagaagctatatggcaaactcaactttccgctcaggtggcatgcctggtaagtcttctgggaacacaactgggaattcggacacaaccttgacaatctcgagtgaatctgtctccttgctatcaatagccatatgatgacaacctcctttccttggtttaggtgagactaactcagctaccacttcttctccta

SEQ ID NO: 194826 - DNA, 311 bp, Zea Mays
tcacatctgaggagggggcgccgagttgccgagtccttcacagtaagaccagaagagtcaaactcgacagaacaagaattatcagtggtaaacggcgaatagaaagaagattgtggaccaaagaaggagcgacaagaacatcgggaatgcgaaaagagccgggagtgccggcggcacccacagatgtgacaggaagacacgagccattcgccaagatgatggacgaaggaagagaggaagacggagggcgaacagaggtgagtataccatggtcgggggtgatgtggtaggtagcaccggtgtccgcgatc

SEQ ID NO: 194827 - DNA, 423 bp, Zea Mays
ccgctacggccgcgggtaacaatgaaccttgcagagttgttccgaactacatgcccctcgaacaagttgctggactagtggcacatggtctgaggttgaagaagcatcaaaggcggagaactatgagacatccccgaaatcggcggcgacttattatagctagattacctgacaatggaattgggatgaagcacagtacaacttccatgcaaacagaagaaaatgtgcgatcaagtaggcaaggacctcctgtggagcctgtctatcctaaagcagcattagaaatttctcttgatttgcttgaaaacatggatgaaagtgatgtttcgactcccatcggatcagctaggagaaagagatcttctttgaagagccctgttgagagaatgaatgaaaaggtggccttggctgaggtgagacaga

SEQ ID NO: 194828 - DNA, 274 bp, Zea Mays
ctagttgccccaaccgaagctgcaactgtcgaagctgatacggctgaaaccacgaatctagagagcacattttcttatattaataaaatgcttttgaatatggccgcggaagaaactgctgcaactgccgaagagaccctggccacagtgcctggaaaagggaaggagatcgcagaagatacttcggaagaaaaggacttcaattttcaaaacataataggtcaaaagttatctaaggctaaaaaagaggagctgggagattatgctatatcat

SEQ ID NO: 194829 - DNA, 393 bp, Zea Mays
ctcggctggatctccgcgcatggccactgccgtcccggcccggaccagaggactcgcccttcatttgttgggggagagaatggaggttggagggaggggcagaacttcaatgcgggcagtgaaggccagaaggggcacgccggcggcgacggcggagaccgtggtgttctgtgcagtggctaaatttctatagtaaaagctgtgcaccatgctgtgcagggagtttgccacgtcacttctttcttctcagccgttggataccaaacggagtacacaaaattgtccacgtcgcctttcaatagagtccattggatgtgcagggagtttgccacgtcacttctttcttctcagccgttggataccaaacggagtacacaaaattgtccacgtcgc

SEQ ID NO: 194830 - DNA, 476 bp, Zea Mays
gcgataacggacaagggtgtaagagaaaagatgagggcatagaagagcaagtggtacaaatacaataaagaatggagttaagtctaggcctacacgcggtaaagaagaggatatagccaagggtgagataagtaaaacatagctctcgaattgagacagaaaagaggggatttcaacaagcagacctaagataagtatcaaggcaagatctatagattacaagggtaaggacgatatcaaacaaaagctcaacaaaggatgaagttaaggtaagacaagacttgcaaagcgacaaagggaaaggaaatgaaatagagcgggatagggaaaataacactctcggattgaaatggaataaatgaggctaaaaaaataggtatacatcatggtaaatatggagagaggtcaagggtcaaaggtgataataggcaaggatataaaggaagaggtaaatgtgcataaaaaaaccaggaatc

SEQ ID NO: 194831 - DNA, 496 bp, Zea Mays
atcggtaccaacagtccaacgcggtgtgattcgatctgccacagatctggcagattgttttgttgttgctggagttgctttgtcctaaccttccaaaactaccacgacgaccattgccttggttctgtccacgtccaggatttcgacctccacgggaaccacttctgtcgtggccacacccgcgcatagcgacattggctgacgaaaagccatcttcatctctacgcaacatatcctggcgatgttcatatccatgtgcttgggaatataggtcatttacagagattgcatccatcctcgatatgacagatgacaccaatggagtatatgtcgagtctagtgcattgagaatataggacacaatctcttcatcttcaagtacttttccagccgaggcaagttcatcagcaaacttcttcatcttgctgaagtactgtgacattgtcatcgaacctttctttgtgtttctcagcgcatatctcaagtttgcaacttt

SEQ ID NO: 194832 - DNA, 1390 bp, Zea Mays
ggcatttatggagatacggtgtcctgatggtggggatggtgggagacaagaaccatttcctgcaactcatgaagagatccaccctacagctattctcagtgtagttgccaatctgacaccttggtctgatcacaaccaaagtcctaggaacatgtaccaatgccaggttagtactcagaagtcagatcttgtccttatagtgattggttgatcatgctttcctttttggactaacccccagtcatcctccttgtttgcagatggcaaagcagaccatgggtttttgcggacaggccctaaaattccgtactgatgtaaaagcattccatctacaggtttgtttttatagaacagaagagttatactgtttggttgtttaaaaattgctttgttgggacatttagacctgcatgtttctcgaggaagtaataatctgaaacacttgaacacacaccagtgtagggagaatactttgcaatgtgttgaggcccccagttatatctaattaatctgacagaattgataattcagtgttttttgcacaatctacagttcatgatattgtgcaatagttttaaggaaacatgacatcaaaccatttccaagttgataggatttatttacgaccagcccttcaggttaaagtgttaaaccataacttgggtgtactacgccgtcaaactggtggtctgaattctgaaacaacgtttgacctgtactttttttgggagtaaagcctattctttgactatcgaactatcactggagtctgattttggcaattttattgtaaaactagatatcattgaccatcgtactaggtaaacaggacaaatttgtttattacctagtttaaaggtggtttagtatattatgtgaaaaataacaaaatatggtttaatctccaaaaaaatcataacactgattgctggaaagtactgctaaccttctctactgtctttgatgctctctgtagacccctcagacaccaattgttcagacaggtacatataacaaatattgtaggtctgacctgtatttttgggtagtaaagcctatttttgactatcaaactagtctgattttggcagtcctacttgaaaactagatatcaatgtcattgaccatcgtctatgtaaacaagacaagttttggccatctagcttgtttaaaggtggttttgtatgttatctgaaaataacaaaatatggttaaatctccaaaaaaaaagaagcataacacatattgctgggaagtactgctaaccttctctactgtctttgatgctctctgtagacccctcagacaccaattgttcggacaggtacatataccaaatattgtatggatgaatttccatctggaacgaatgctattgttgcagtgctat

SEQ ID NO: 194833 - DNA, 554 bp, Zea Mays
ctgggatttcttttatagacaattcaggattgaagtatcgttgctttatggatgctttaaattgcttccacttctttccagatgtgcgcatcacccagtttaaggcagcatcatctacatcataatatatctttatatcctcccacaactcatacttcttgtttatatcaacaagcctccagtccgtggtagcaatagacaatttctttctaacttgacacccaatagcacttgaaagttgtctagcacttttaccaataggctgacctcgatcattgagtaaaattttgatttttggcatttcaggtgaccttgagaatattccctccatcttcaagaacattatgtcgtatatcagcggcatatccatcaggaaacttgaccccttttaatacttgacaaaacaatttcttctcaacagagctcattgagtagggtgcaggaggcaaataaaattgattatcttctagttcaataggatgaaggtcgcttctaatacctaaagcttgaagatccaagcgagcattcagattatccttagattttccagcaat

SEQ ID NO: 194834 - DNA, 396 bp, Zea Mays
cttttgacctgtttgatacccttaatgctgagtccagctcagatccccaagcaacaacacttcaggcacagttggtagccggaacagccccactagggtggactgaaacagatggcatgctgctgttccagggcaagatttttgttcctgatgcctcttccctgtggccggcactgctgtctcaagctcatgacgcgaggcatgaaggagtccagaagacagtttgtcgttggcgttcctccttctacagtcagttggccttacagcgtgtgaaggagtttgttgcagctgttctccgtgccaacgcaacaagacagaccatcttcatctggcaggtctgctacaacccttgccaatcccttctatggtatgggctgatatttcgatggattttat

SEQ ID NO: 194835 - DNA, 317 bp, Zea Mays
attggttttgcagtccattgttgacgaaggattcaccctgaatgttatagcatacaatactttaattacaggctatggaaaaagttctgatatgcagaaggcaaacaaagtgtttgatagctttggtagtgcaggtttagctcctgatgaaacaacctatagatcaatggtagaaggttttggtagagcaaacatatatgaagagacaattttgtactacaggaagctcaagggtgctggcttccgaccaaatgcatccaacttttacactatgatcaacctactagcaagacatgatgacaatgaaactgcagctg

SEQ ID NO: 194836 - DNA, 573 bp, Zea Mays
gaactgatagggtggtgctgattctagtttgttcatacaatctgtttatgttatgctgaaagctagtttcttctttatcatgaggtactacttggcccaacagtcatggaatttctgggatctttagtcaccaagatacaattcatggtcatgcggttgtttggggacaagcaaccatttgtgggggtggaaaggatatatggcaacacaggttaaagtcgtgttttaaaatggaaatgcatgctacagtcctgggtgtcaatgatgtattgcagcatatcagtgcttgttctctattcctgcagcttggtcgcagaaaactatatagggtggtgatgacttctgttctaaggcccagagatttgctgctgaagagctatacaacattcttgaccaagtcgatgaactattgttgcttcctgaccaaaagctcgggagaccatggtgtgacactgatctaatatgtgaaccgattctgtcttggagactcaatggtggcagcccaagcaaatgtttgttgcaactcaagacatacatagtcagacagtgggatccaggaatttctgggatctt

SEQ ID NO: 194837 - DNA, 711 bp, Zea Mays
acattactgaagttcttccctatggctgcttatcagaatcttacacttcaatgcctaacagaggtaagggacacctaggattttttgtgtctagtttagccatagcttgtaatttcagtggacaaatgggagaataatttattttatacaatgtttgggagctccatattatgatatgttacattaacctgacaccatattatgatattttacacaaacctgacgcttctgtttgggaccaattggagaagttctgttttgaattctctctgatatatgtagctaccttgcaggttgcagcacttcagtttggtgatttttataacgtgcagtatgtgaagatgtatacatttttcatgattcagttgcaggtaattttgaagacatttactatttttcttctgtgcaagtagtttgtttgtctacatattgagttattgaagtttcacatatttaattattgaagtttttgtcccttttgcatataggctattcttcctcctgaaaaaatcccagatgcatatgctaatggttccactgaagagcaggtacacctgaaaccatattatctgttgtagtggtggtacattcgaggagtccatgattaatgctctccctacttttataccactctatgtcatattaataaacacgttttgttcatttgtgcaggcatttatacaaaatctcgcactcttcttcacatccttt

SEQ ID NO: 194838 - DNA, 476 bp, Zea Mays
acagggggaaattggtgtcttctttcctttgatagttttaaggtctctggatagctctgatagccccctcagccagaaggctagtgttcttaggtgactgccttttcctttatggaatcccagctgcatacataatgcatgaacatacacagtttggtcattcgaggcatctagtagatttgtgtttaatgtcatttacttatttgactgattttccaatcaggatgttggagaaagtttgcaaagatccccaaatgcttgcagatgtgtttgtgaactatgactgtgatcttgaggggccaaatctttttgaacgcacggtaatcattttttcaattgtccagaaagcatagcttctgaaatgtgcctttttttctttggcttgtaacacatctgattgataatatatgtcctactaggttagtgcgctatcaagaatagcacaaggatctcaaattgctgatactaactccatc

SEQ ID NO: 194839 - DNA, 910 bp, Zea Mays
gttctgttcttgtatctgttgtttctggtctctgtttcgatgccagttttggttcggttctaggctgctagctgttgattctgctttctgtttcgcttctgtttacgacacctgaaccagtttttggtaccggtgggggagcactgtcccaatggctggccgccgttcgccgtcggcggatcccggtctcggtcactgcgaagctcccgaaatgagatccggtggcgctttagagccctcgtccgttccaatacgcagtcggatgctgggttacgctcgcctctaaatctaagcttattatttatgcctttgcttcgtattcgtcagatctgatttcgtatttctgtctcgaccgaaattttgcgcggtgcagtgattataaaaacattcctcgtactgatgggtcatcctcgtgaacgactcctatacacccatagaatctgagcacccaaaacacatctccaaattttttttactttcgtgctctattttgtttgtttgttatactatttaggttttttaaaagaaacttgacttccgcgctgttttgcaaatctgtatttttcttatttgctttataatttgtattggatggttttgaattacttggatttatcatgacaatacattgttgtagcactcaaaacactgctagatttatcttctagcctgtggtcaagtcgtcacagcgagtggctctatcgttcatctactgcttgcccagtgcccagttgacacccgtccttcctgcgttgctattgtcgatcgacgaattcttcatgagatcttctatctggtcgcaaggtggaacttttggttccgatgctaccgcaacgtcagcatcgcatcaacttttgtattgacacaatgtattattaaaacaaatatgttattgataatgtaatgatga

SEQ ID NO: 194840 - DNA, 541 bp, Zea Mays
ctggtgttggcgggtgagttgggccaccttggcagacccagcatggtggaggtgctcgtgccgctcatggagggtccagatctggaggcaggccatggcttagcctgtggcggtggcacgtggagggaggtgtgaggacagtcggtggctcggtgcatggtggcactgttgtccgacgagacgggcttgagttggcgagtagggaacatgggtggccgacaccagtagtccaaggcagggcgatgtggagctcctgtctagtgtcaccgagtgggtgagggccggggcgaggaggtgagccacgagtctgcaacggcgcaagcacatgcctgagatgggggcacactgtgtgatctgtttgtcgcgttcctggagaaacagtgattctagctatgagggatgctcgacggagaagagaccggatgatcggtgaacaaccagaggttgaagaaaagggtagaaaagacattcccccaccttgaactctaataatcggtgcgatgtgttatggcaaatatacactcattcataagggtactag

SEQ ID NO: 194841 - DNA, 366 bp, Zea Mays
gtcaagcagtgtcgtgcagtcgccagtgtccttcacgacctcgtgtggttttcctagtgctctagatgtagcacctccaaggtatccacatgtataggaaggaagcatcgcgtaccgacctgttaggtttgcgacggaggcttggcgagggcgagatgggcgcgactgctggtttgctggtggtgaattaggttaaccctaagcacgcgccagcccctcattgtatatccattgtagtgggattctcactccgaggcccatcagcaaccctaaaacccagtctaatttcagatccaatccgagttaggcttccttccccttaagtgtgtgaccttgtaggttcacgtacacatagacatgtcctga

SEQ ID NO: 194842 - DNA, 363 bp, Zea Mays
aaaagccagccaatgtagttattcaaagtgcctaatataattagatatagtataacaaacttcgaagagaatagacatgcatcctccaattcaaggcacgtaaaaaatgatgatacctaatcctgttgcacttatggtcccagatgtctgaacagtgacacttcttgctctgttaaaattaactacagttccttgaacaaggccagaaacatcaatatcttcaacacggcatatctgcattacaagagcgaccaggtgttacaagtagaataaaaaaatacgcgaggaaataatataaagagaaatccttaaacttatcgctgtcatccaagtccctaaaccacctgtttggcagagcttcag

SEQ ID NO: 194843 - DNA, 515 bp, Zea Mays
tcattgtcaagttccaggacatcatctgtgagcgtggcagcactgctcatcatgcctagattgccatcgaccagttcctcggcatctgtgaggatcatgcccttcacctcgacactacctttcggatcttcgtcaagggagacctctccgtcagtaagtaatgttgccagacgatgccctctgtggcctcggcaagccgatctccacccgtaccctcgtcctcaacctccttcgtggcctcagcgagcgctacgactacctgtggactttgatcgtgtggtccgtttcgttcccttccttccagaaggtctagaacgacctcatccttaaggagctctgtcaagggcgttgaacccctgactggccggacctcagctacgcagctcgtagccgtccgtcttctccggtggggtgagaatcccccaaccgcaggcttgagagaagagaggagaacaggaagtggtttttcttgcttgcccattccaagtgcggttacagcatataaggccatcagc

SEQ ID NO: 194844 - DNA, 404 bp, Zea Mays
ctcccttgggccatcccatcatcgccggggaggctgccacaccgttggccacgaactcgcgtgcaccagtactctcttccacctccggccgccgcacgtcctcctcaaatttcaccggccaccgcccttggagcctataaattgagggcggggatagttgcgccatgtaatcgtcaagctatagcacccactctcatctccactcgctcaccgtagctccgcaatttgggttttccgccaccgtgaaacgagcctcaccgtcgccagccatactccggtcagttcccgtcttctgctccctcgtttaagcgttctcatgcatctgtgatgcttaccgacccacccaattgaactgggctgccaaggatcaccgggaacgcgagcgccaagccatgatgttctcg

SEQ ID NO: 194845 - DNA, 369 bp, Zea Mays
caagcttcctccttcccacatgggcaccgtctcctccttccccaattgcaagctccattcgcgctcctcgtcctccgctgcctccagcctagtcccatctctgctcgattggagaggtttgggccatgcttcctcctcgcgcgccacgttctcgacggaatttctcgtctacacaggagccaaggaacgctagaattagacgcttcccggggtcccttttagttcccctctaacgaatcataggtttgcagtttggtgtggacgtatcctgtgatttgtggatggttttggtgtagagtttagagagatcaagaacttccaacttggggtttcctgtagccttttttagctgttctggggcttttatgg

SEQ ID NO: 194846 - DNA, 511 bp, Zea Mays
ctcttccaaaccacctatcacccaaacctacattcgtcgttcctgctctattcctacggctggtcctgatactgatcctgtacctgattcttgtactaacaatactgagtctaatgatgtttttaatcagggatatcgtcttcgtgaccgtgataccattgaacctccagatcgctatggttttccacgtgctggtgtggcaattgttgaaccaactacttatcaggaggcttctaggattcttgagtggcagcttgctatgattgatgaatttgctgctcttgaacgcactggcacatgggatatagttcctttaccctcgcatgttgttcctatcacttgtaaatgggtcttcaaagttaagacaaaatcagatggttctattgagaggtataaagctcgtcttgtggctcgtggtttccaacagactcaaggacttgactatgatgagacttttgcaccagttgcccatatgaccactgtacgaaccttgattgcagttgcagcctca

SEQ ID NO: 194847 - DNA, 399 bp, Zea Mays
gtgacttacaccaaaagatagccgcaagtgaagaagtatagtcgaccgtgtggatcagttcctagaatctctgctcctctcattggatttgcaatatttctagatccatccttccgtatcaaacattcaggacaataccaatcaccttcaggcaaaagatcctccaccaccccaacacatttcgaatgaaatgcagctggacagccatcacagcataacaagttgccatccatgccacaaagataacattcatcgctgtttccatcatccacttcagcagatccttctggaaattgagaagaacccactgccaccttagcagaagagcccctgcccctcttttttcttcttacaccagtgcttctgaagccctcgtcgtttccatctgactctgacaac

SEQ ID NO: 194848 - DNA, 280 bp, Zea Mays
gcgctcgagttgtggatcaagtgcggcaaagcgccaggtatagggccgtagcagaggctttatgcgcaggtatagcacggggtcggatctaacggccctacgatcccggcgcgagctcccgccaagtccggcgtccgctgcgggaggtagaagacgcgttgaccagtggaccccgtggaccagaggcagggcgcgagtgcgagggagatagatgacaacgtggcccccacctgtcggcgcactcggtcacggtgtgtgcgcgaggaaactgactgacgag

SEQ ID NO: 194849 - DNA, 411 bp, Zea Mays
gttgggtttttcaactttcattttttttatggaatctaaaagagatgatgactgttctttgcttgatgatgattttgcaaaagggttaactggcctctgaggctctgctcgattgcaatatttagtgctctctttttttgcaccagtatgatcaatgcctccttcctgattctgattttcactgtttttaggtaccttggcaaatggaacagaggcagatgaatctttttgagttctatccttaatttcaatccctcgttctcctgctggcttctttggttcagttgaattgcattgttgattgacaatattgagtttgggtaatgaagattcaagcgaacggttcccatcttgcataaacatagaaggtagagttgcctgagtggtcagcactggtgtgttcgtcatgat

SEQ ID NO: 194850 - DNA, 1288 bp, Zea Mays
atcaccttgcctatcacaacatatgcgtttggcttgtttgcagatgaacataattatcgtaattcctcagatattgttaacatgtccaaccattgcatgaactggaggcatgtgcttgctgtgaagcaacagcctaggaaactccactggcagcagcttgtttctgttttgagttacctttctctcagattgaagttacctctttcgtcttgggtgcaacggctggtctttagttaccgtgggaagaaagatacgcgttatggtcaaattgatatgtttggagatgctgatgggaatgaactccccaaaggccctggtgtggacagaaatactattgatataatatactcagtaaataatcatgctgctgtttggtggggaatccatgaagctgcccggcactgcattaaccttcggcttcgaactcatctaggtggtcccactcagacatttgcagctctagaacgcatgcttttggatgtaacaaatgtattaatggtggaagctaaggaagctgaaggaaggtatatagggccagctgacatttgcttattgccaatgcgtcttctattggattttgttgaggcattgaaaaaatatgcttacaatgcatatgaaggttcctttgttctatcacccccaccaaaagcaagttccgtgtttttccatgcaaacaaacgagtttgtgaagagtggttttcacgaatttgtgatccaatgttgaatgcaggattagctatgcattgcagtgatgcagtcattcactattgttcactgcggctggtagatctcagaaacctggctgcatcatctctcagaggcaatagtcacatgggtggggctactgaaagtcatgcctttagagagaggttagaagcagatgttatgaaagtcctccggcatgcttccctggcactctgcagatgtcatgaaacagatgccttagttggacttcagaagtgggctgcatcaacattctattcttactttgagcaagataatcaactagttcggggcgtatctgatcgcgacaatcgcttctcctggatatcaggattgatctatcaatcccaggggcagtatgaaaaggctgctgcacattattcacatctactgcagtcggaggaagcccttatctccatgaaatctgatggcattcagtacatcatagagcgtgttattgagtgctacacatccctttcagattggaaatgcttagagagttggcttgctgagttacaagtgctccgtgctgtacacgccggcaaacctttttcaggagctctaa

SEQ ID NO: 194851 - DNA, 474 bp, Zea Mays
ggaagccactccggctagccgtagttcatctcccctggctcaccgcccgcgggtaaagtgctcaccgtcgtcgtgccatcgccgttggccaccgcgtgtcctaaccgcgccatcgcatcgccgtgacaccctctaaactcccagtcgaccatcggagttactgccacggcggtgaacacgtgttcactgcaccaccgttcttcctcacttccgaccgccgtgtgtctcgtccaaaattcgcggccaccgctcgctccacctataaattgagcccccggccagctgcgctaggtcataccgaagctatagcccccactctcgcctccgattagcccccatagcctgagaattgctcatttcccccaaattcgttctccgccacccgaaactcgacctaaccgcgaccagcctttctaggttagctcatcgctctccctctctcgtttaagctttctcgcatgcctacgatgcttg

SEQ ID NO: 194852 - DNA, 322 bp, Zea Mays
gttgatttcaggtgatatacaacagcagtctggtgtcctaggagcaaaatatattagaagttcaaaagactagcacaccacttaaatgtcgacctaaggggcagcaatctcaagaagcacctccaaagtcattccctaggccaacaacagtatcagaaccaaaatttatagcacatccaacaacggtctacacagaccaaaggccccatgcaaagctacaagatggcaccgtgaaaaaaataaagtatggatgtgtaacttctactggagaacctcaagatttgtatgatttaaaagatacaaattggaagtgtgatatgaa

SEQ ID NO: 194853 - DNA, 338 bp, Zea Mays
acaataatcaaacccggtataaatgtgtatatcgattgcgcccttcacacactaatttgtattgaacattactacttttcatccgcgaccataaccatacgcatttagactacaataagcaaatcatcgtgattacgagcttaaccaaagctatctaacagtcggctaactagagcaacgacatagaccgttaaataacatatacgttggcttgcctattattatcacaatccgagactcaacatacactgccacatttttataaacacacatactcataagtattttcgcacatcgaccaatctatatgaatcgtaaaccactgatctccacatcgc

SEQ ID NO: 194854 - DNA, 435 bp, Zea Mays
cgactcctgttgcaataattttgtaggcgagaattgggagagtctggaggctgccagccggtctagtggctcggccaaggcgagcggtggtcccagcgccgttctttccgcctggtgccggagtttcagtcttcaaggctgtgctcggagtttctgtgttctaggggccgggaggtgtgtgctggtgtgaatttggctttcttttgatccaattggtgcttaatttcagcctgtcgaaagaggcttctagcttgcaggttcatcgccgttggcgccgaacttgcctgccgtacagtctttctagtgccaaagttgaattttgaggaactgtgaagccgctttaagcaattacctttgccgaactttcctctaaaggcttgaccttttgggttccggagttcattgctgatcgacgggtcttggagtttttgtcta

SEQ ID NO: 194855 - DNA, 340 bp, Zea Mays
gatcaaggagaccggttctcttgagctggggactgcaaaggatacgtggcttcagtcattgtgctctggatttttagatcaagggaccaatgcctccaggataatggcggggaaggacggagtttctctgaaatctgtgtcatacggggcaaggctgcgcaggagttgtgatgcatcactgagagaggcagggtccatgagagacccattcttgaaacacagagtaaagaaatttgatctatctagcctagattggattgatgagattccagattgccctgtattttctccatcaacccaggagtttgaggatcctctggtttatctcagcaaaattgcc

SEQ ID NO: 194856 - DNA, 576 bp, Zea Mays
aagattgtgcctatatcgattgttctagttttgaggcaaataacatcccacggtctatccgttacctatccatttccatgcaagatcattgtgctcagaatttcgaggaacaaatgggaaaactgaaagaaaagatatacattaacaatttgcggagtttgatgatatttggaaaatacattatgttacatctgctcaatattttaagggacacatttaaggaaataagacgtcttcgtgttctatctatattcatatactcccatagttccttgccaaacaacttttcagagcttcttcatctccgctacttaaaacttttgtcaccttattactcagaaatgtcattgccaaacacggtctcaaggttttatcacctgaaatttctagatcttgaacaatggggaagtgatcgttctttgcctaaggacattagccgccttgaaaatctatgccattttgttgtttcggaaaagattgattccaatgttcctgaggtggggaaaatgatcttcttacaagaattgaaagaattccatgttaataaagagagtgttggatttgagctacaagaat

SEQ ID NO: 194857 - DNA, 360 bp, Zea Mays
acattctggtatcggagatgccaagttttgatgatgcacctccaacaaccacagccccctgcccctccatcgccaccactgctgtcgcaacaacaacctccatgatcgttggccttataacctcaatttttgaagcaacattccagcaggtgatgatgcaatagtttgccgccctcgccaccgccgtcaacaatctggccgatcgactgccaccgccaacaacatctccttttccctatggcctaccaagatacgacggaataccaaacatcccagccaccactgctccaattgtagccaccgccaactcctcgccatccatcccaaccgctgccatgacctcgtcatcagccatccccc

SEQ ID NO: 194858 - DNA, 412 bp, Zea Mays
tgcatctcagcggaaggtgattgaaggatgtctatggcagtgccaagaatgtcggcaagccacccatcgtcttgtacaactgatgtgtcgacgtgagtagcccaattcgcatccaaagacccggcacttgttggtaccacaccctcgcccacagcaccagtggaaccacgacctactccggcattggatggttggcctcggccagatggcggcaacagctggcgacgtagcggattcatggcgacctacagggaggagaatgatggtcagctgcagggagagagatttggacaccaagggatggcgatgtcttgagggtggattgcggcaaaatggagggagggagcagtacctggcggcgcccttcacggatgtggcggcgttcttcacggaggtggcggcgccctccacg

SEQ ID NO: 194859 - DNA, 354 bp, Zea Mays
aaaataaacgataaaaagaaacatttcttacattttctctagcaacttcatctactaacttcttccctccaccaagccagacatcggtataaaactttctcccaagctcggttgcttcagctaaaggaatcttattgtcatcaacataatatttaaactctggctagctggcaacttttacatgctcgcatctagccttgtcaagcagcaaagttgcaacgtgtgcccctatacacgcacaataatcaccacgggtggataatacttcatcgaaggcctccacttctcctatccacttcaccgcactagaggcgtcgccgcgcacaaattctttttcacttgaaaatgctccta

SEQ ID NO: 194860 - DNA, 455 bp, Zea Mays
gtgggatatggggaccgggacaagcatcatcacctacactaccgcacgcagcacggtcgcacctgcagagagagaaaagtgaagaagctcgatcgctagaatagacagtgtactacgtagttcgagcgagcaatcgatggaggacgcacaccaacaccagcgtccatgtcgtcccgcttttcgtcgggaaaaaagagccgaaaggaggtgtgaaggccacctttgttcttgttccccacgagggaggattggtgggtgaggactgatgaggagtcaggacccaaaaggtggcgctggcgccccccggccgcgctcttcgttccaacccggcaatcctcggctgtcgccacggccgcgcggaaaaaaaaggtgctagtatgctagacgagcgagagcggccgggcacgcgcatgaatgcatgcatggggttcttttctcctgtccgcctttgcccc

SEQ ID NO: 194861 - DNA, 289 bp, Zea Mays
actagaacacctaagagccagagctgaatatgattggtggcctctctgtagcccatctgaggtagcaaggtgcatctcattagctcataaagaaactttgctgctgtagtgaaatctgtaggagagcgtcgcaagtcgtatgtgaaaggaggcctgaagagcgttgtgacgtgagctgtgctaggagcaactccaccatgagggcaacgaggaggatttgaggtaccgtagcagagactatggagcctcgtcgtcgacttagtgaaactaaagatctctctgatcttag

SEQ ID NO: 194862 - DNA, 1050 bp, Zea Mays
ggcatatagccctacaactagtcatgttgtcattgctattcttgaggtatgtattagagcttcacttgttttttttcttctgaaaaagcatttccttttattgctagaaccgaagtgccttcaaagtaaggcaaatgcttatgatactgttcacagaaaatcataagagtgacgatgcttcgttcttgttagtaggaaactaggcatacttttagcacttttatctagtcatctgccatgcagagtgaataatattattctctagcagcctgaatgcatgcactgctattggctaatggctgcgagttttgcatcttttattaatagcttgttcaactgttgacccctttgttatctcttgttctgcaggatgctacaatcagatcctgtgatttcgccacggagcagacacttgtgctgcattcgcctgagaaaaaaacagatcatgtttcaatagatactgaagtccatcttgcattgacacctcttgagcctattgtattttttggtttccacaaaagaatgagtgtaacaggttactctcttagcttggcaggttaccttttgtgtttgcttgggaggcttaaagtgatcctccatttggttttgtttttacaggttgtatttccacgtgttaacctcttgttttgttctagttgtagggactgttgatggagggagaccgccaacaaaaataaagactgatcttaaaaaacccattgttaacctggcttgccatccccgcctccctgtcttggtaaacagccatatctttacttttttctgttttttgattttatgttgtcatgtttctgcctttacgcatttctgaccaagcttatgatttagtatgtagcttatgctgaaggcttgatacgcgcctacaatatccagacatatgctgtacactataccttacaacgtaagatgcgatgctgtattttatattcatatgtttttttgtgattttccacccatcggcttcttaatcgcacaatgtttcagttgctgttgacagtacaattaagctaattggagctggtgcttttg

SEQ ID NO: 194863 - DNA, 371 bp, Zea Mays
cgtgatactcttggtccctagctatcactagatacttgtaagtcttgccaggttcagaatgttgcacttgagcttcgacatatctacttcttgatcgggcttcgtgacgagtctaagccccttcatgctcagctgctcgcttgtcatccctgcgtctctctgatggatattcttgctggtgtccgtaaccccgtaatgagactcatgcgtgatactggcctgttgtagtcttcgttggtcttggctatgtgcatgggggcatggtggtcttcattatgcttacgtgacgggcatgtggaagcctactattttaggaaggagaaggcttaggcttgccattcttcatagggtattagtagtgctggtactgg

SEQ ID NO: 194864 - DNA, 986 bp, Zea Mays
aggatgtcaaatcatgctacttcaaatgtttccactcaagaccgtctaaaatcttctgcaaagtcagttgaagaagccttgctgaaaaataaagttattgtaactagtgcatcgtcagaggagcatgtctgcatgatagacaaggaaatcacagctgttgctcatgaagtaccagttgcaagtgaacagattccccagaatgatattagaggtctccatacaaaagatattcacactgaagcagaagtgactggaaggaaggatcagccttcacgatcatttggaagggtatctggtggtgttaatcctaaaccaaaagcctcatccaattcccgagctaatgctaaaggctcatctgttagggatgcgattgcctctacagaaactgagttccgtgacgttagtttgcagcggaatcgtctaccacggaagtcagaagatgtagggaaaaaggttacagctggttctgattcagattgctctggtcgtcagggaaaaaatttgagcaggcaatcatccattaccgatcaggaactaaacttgcaggctagagtgacaagaccaggaaaagggaaccaagatcggcatggtgaattgcaaatgaaggccaatgagttggagaaattatttgctgaacacaagttaacatcctcccgacgaggtaaacctacagatgtgcaggttgaaagcacacctatggtgagtgaggtaaagccgacaatggttcttcatgagacaattcatacaaaacaagttgtaaaggagagtataactgtcaatgattttgatgccggtgagcttctgaagatggtgaataatcaagaatttaacattagcacaccacaaaaacttggcattctaagtttagaagagtcgagagggaagttttatgagcattatatgcagaagagggatgcaaaactgaaggaaggctggaagctgcagagagaggagaaggaagcaatgttaaaggctatgcatgacag

SEQ ID NO: 194865 - DNA, 311 bp, Zea Mays
agacattgaaaaagatgaaagggggtgagccgataggctgtgatggtatctcaattgaggcatagggattcctcgggacataactatagtatggctaatgaagttgttcaatcatatcttccggtcaaacaagatgtttgacgagtgaagtggtattgatttacaagaacaggggagacattcaaagttgtactaattaccggggaattaagttgatgagtcatattatgaagctatatgagagagttgtcgagtattgtcatgagacgaataacgatgatctctatgaaccaatttggtttcatgcccgg

SEQ ID NO: 194866 - DNA, 437 bp, Zea Mays
gaggggtaagggtggatactccacacgtcccctatcctcccatcagtgatcatgtcgacggtcccggggagacgaacgtgcgtcatgtcgcctcgatcgtcctggggccgtgctgctggtggaagatactgctgattcgattcaagttgcacgcctacacggcggtgcaccatgatctcgatcatactcctctcgtcgcctcatctcttcctcgtgctggtgatcgcatgaagcgttgatgttacttcacacgtctcgccgacggttgatggcgtggcgcaggtcgttctgtggatgagcgagggggaggagatggttcttcgcttgggtgagcacctgccgatagccatccacatctggggtgcgcggtaggccattagcgatctgagctaggacccctccaacctcactcggcgtattcagtgcccgagcaaagt

SEQ ID NO: 194867 - DNA, 1028 bp, Zea Mays
aatgggagttcccagatgttaggtgtgatggtttagaagaactactacgaagtttcttcacctcagaggatgccggcatttttacttgagcagaggatttgccatcaaccaggctcattttgttaccaatgacagcaggagtctcaaccaaccctgtgatcagtcttttctcgactacctggtgtctagcatgcactttatcctgactcggtgaagaaaaaattggctcatgcttcacaggtgacatcctaacactccttgatttctcttctcttgcagggcctaacttttttccaaaaacattgccaacatgagaagaaaattttccccgaatacctgctttctcagttgggactatatgtgtagagagagatttagcagaagttctatgaagtggtgttcgctgtccttcatcctcatcttcatcaaaacgacatgctcttctcttaggtttcaccaattgcctatcaacacgtgaggcatcctccttcatgctggaaccctttttaacagaatcagcaacagttgacagtgtcacagaaccacatgctggttccatgacctcagaatgaagccttgatatgggtgatacaacaccacctgatctcagtgccctatcatcgctggtactggtcttaagaatcgtgtttttacacgtttccatagaggtaggccgctcatgtttcacagcataatgctttccataatcaatgtttgacttcatctcactcttgtcaactgtcttatctgtttcaccagccctgtccataagccttggcttttttcccggacgtgtatcagcactactgtccatcttgtgctgcccactatctggcagcgatttcttattggaagaaaaccctgcagatgattttccagtcaattgctcgtcaggcccgccatgcacaattttattataatccattttctctgaatcagtagttagtgattgttttgtcatgatttttgacttcttaaattctctgctctctttgtcagcactcatgtttaatacaacatcagatgca

SEQ ID NO: 194868 - DNA, 286 bp, Zea Mays
ccaaacttgttcacctacaaggattttgtagaagagcttgtatctgagatcccagcgattagagaagttcctgaacaggtttgcaaattctggcaaaataatgtgaatgataataatatactaacaccaactggcaatcatatgggtgaagaacaatggatcaataaaaaatcagataaggtagatgatggcactctttttcaagaaattgtcttgagaaagcatccaagggacaatcaggaaatcccttgttgtgtggaggatgcaacaagggaagatatggaga

SEQ ID NO: 194869 - DNA, 315 bp, Zea Mays
cgcgcagcccaaatggtgctgacactgaggacccgctgtcagcctcttcgtcgcgcgctagagccgtgatgactgcttccttcgtctgcgtacccttcactgcccgtgggccatccccgtcagtatctccttccctcgctcgatgctggcagtccttcttccctgcggggatcgggtcgcgctgaccggctcggccgtgatccccggaaacgcgcttacttgcttggacttcggtcgaagcctttcgcgcgcttaaagctgactggtggtccattcggtcagctcctccccacctcaccacgccgcaggaactgg

SEQ ID NO: 194870 - DNA, 725 bp, Zea Mays
caaagttttaaatgaatatcgattggtgttgcaacggtgtgtgtatcagtaagtcaagagcgatcaagaagatcttgtatatatttggactgagacagataaaagcctttttgagtctgttgaacatcaatgcccaagaaatagctaagcggtcccaaatcagacatctaaaattccttactaagatgttacttgacatgagaaatatgttctaagttgtcacctgtaatcagcatatcatccacatataatagaagtaaagtgcgaccttttggagagacatgaacaaacaatgcaggatcatgttcactagaagaaaaaccagcagttgtgatgacagagatgaatcgctcaaaccaagcatgaggagcttgtttcagcccatacaatgtgcgacggagacaacaaacatgccctgagggagtatcaaccccggaaggaggatgcatataaacttcttcttgtagatcaccattaagaaaagcattcttgacatccatctaggagatagtccaagaagatgagactgcaactgcgatcaaggttcgaacagtagtcatatgcgcaacaggtgcaaaagtctcatcgtaatcaagtccttgagtctgttgaaaatcatgagccactagacgagctttatacctctcaatggaaccatctgattttgtcttaactttgaagacccatttacatgtgataggaacaacatgcgagggtaaaggaac

SEQ ID NO: 194871 - DNA, 462 bp, Zea Mays
cgattattcaaggactgttcaggcaaggacatggtatgaagttttagtatcacctcagaaatcttaaccttcatggtcaataataatgctctacgatgtgtaaaagttgtattgaagggcaagccacctgagctctgtggaatgcacgccaatcctaactgcataaacctgtatgagtacttcccaattccataaaactgctgacaaattttttgtgacatgatcaagttgcttttacgtcatagtgcatcagtcgatgtaaacacagttgacaatactgtcattgagaacctacttccgctctatgttgcagttaaaaaatacttgcatgcataagtatctggatgacaatctttctttgagcgtaatttgaattattatgtctacaagcttattcatttgctgtgtttacctgaaatggtttgtttcagttctcttttatgtacgaagatctttttatgt

SEQ ID NO: 194872 - DNA, 477 bp, Zea Mays
atcgtcttgccaagacccatgtcatcccctaggattcctcctgttcccctgcagtgcagaacccagagccatcggaggccctcgcgctggtgggcgaaaagcatcttgaatatctttcctgggagcttgtatggcttggatgttgcagcagttccagttggatccatcttgaagtcctctgtcttctcccatccaacatcctcagcattgttctccacagctccaaggttctccttctcctgacccagctcatcgtcgctgacaccatggttcctgaatgttggggtgttgggtggtctccttgtgaatcccttgcttcttagctgcttaacagcataatctgttcttgttccttggtcctcctcgcagtcgtcataatcagaatcggaataagaatcaacaaaggatgaggcctttgataccctatttagcctcccaacatccttggtggtccctttgttcttccccttgccacgg

SEQ ID NO: 194873 - DNA, 316 bp, Zea Mays
actgaataagggatgttactgttgatctggatgctctgtggatgccatcttatgaccttgatacccttgatgcgcctgtctcggaggaggaagtttgggatacaattaagtcccttccttcggacgaatccccaagtcctgacgggttcactggcagattttacaaaagtcggtgatcaaggctgatttcatggcggcagtctactgcatttggctagaaatttcagaaacttgggtccgctgaattcagcttttattacacttctgcccaaggttgagggagccactagtgtgagagatttccgcccaatcagtc

SEQ ID NO: 194874 - DNA, 287 bp, Zea Mays
ctgcaggtacactgactaaactctaggaaattacgactagttaactctggagtgagtaggtatgccaccgccatagagcgtgcaagccactatatgctggcaagattgtgaggacgaataggacgagcatgcatcatgacatataactttaagttaaaccccctatgtagtaattttagtacgtgtttcgtctaccctgttcatgctacctgtctttgcctttctatgttacctttccctgtttttgaagactggaagccaagtttagttggtgggcagaatacctt

SEQ ID NO: 194875 - DNA, 307 bp, Zea Mays
gcattcacttggtatgctgccttgcctcctaactcgattagcccctagccccctaggatgatctagagcataagtttcatgaacactttttctctggggattacgagttagatttagttgatctgacatctctccaacaaggggacgatgaatcggttaatgattatctttgaaggttcagggatactagaaaccatgttttcagatccatatcacaaaaaaacagctaataggattgacagttaatgggttgcattcatacttgaaagaaaaaccagatggcacccaattcttttcgctaactcag

SEQ ID NO: 194876 - DNA, 453 bp, Zea Mays
tattcttttacttgatttctctcacaagattgcagaatattacttaagcaatatcacaagtgaagaactagaccaccccgaccgccctaggacccccggaacccccgcttccttcgtctcctgtgacttccccaccacggtcacgggcagcgccacctcgggtggccgtaggagaatgcaggagccggccacctcgatcctcgccattcaccctagatccaaaagttggattttaattaacccgagccttatcaaaaccgttcgctcgagatgtgacgacccaggaaccacgctcgcaccgtgcctctacccctaggccccgtctgttagccgtctgagccccatgtcgtggcctcggtcaaggcgaagaatccgccagccatcagagccccgtgccgtgccctcgttgaggcgagaatccgtcagccatccgagcgccgcgccgcaccctcg

SEQ ID NO: 194877 - DNA, 759 bp, Zea Mays
gtgatgcggagataggtgccatgcttgatttgctggctgaggactcttctgacgctgctcctgctggggcattggtggtggcgcccctcccagaggctggtatgaccttagacactcaaaaacctgctggtactcgcccgaggcgcccttgccgagccaatccatccgatccttctgctgatgaacagaaaaagaaaaggagacgccttcggcaggtacccagtttgggtcgggacgttggtacctcggttcctgatgctgaagaagtgcctgcgactgaatttactgacgctgatcccaatgggtgtacccagtttgttgctgatcctgatgggtgtaccgaatcagttgctgatcccaatgggtgtaccgaatcagttgctgatcccaatgggggtgctgcctgtgttgctaatgtggatgatgaggagggagaagatgaagttcctttgactcggaaaaacagtcggcaattcattgctagcggtgaaagtagtggagttccctctcctgctttgtctgctctcattggtctgcaagaactgtcactggccaattttgatcagactctcgaagatatggttccggaggatttgttatcggagccagcagatgatggtgtgatggaggtttgcgctgatgtgcttgatgctgggttgaggtcatcccgtgcctcgtcgaccttagagcgcgatcttgaggatcgggagactgacttgggtcgtcctggtctcatggaagtaattgagggcccatcag

SEQ ID NO: 194878 - DNA, 450 bp, Zea Mays
cgggattgtggtccacaggatcgagatctgatggctataatttaataaaacgtgatctgcttcgagccgtaggatatcagatctacggtcacaggttcaacgccctagacggtatgctagaactaatctggaccgcccaaccgtggatccacggttccgcgtctattcttcatccatcagcctgaacacggcgacgcaccagtgaacgacggcggagctatcgccggagtgcggcgatccatggctctggtgcactactccccgattcgcaacactctacacaaatatcaggccaaagctaaccgcagggaagaggtcttaccagaagcgaagatggggacgaggtcggacacggtgtggtgcggaacgctggcatcgaagtcccacggcggcggcgggcctcacaaattccctctctgcacgcggtggtgttgatggctttgcaaaggg

SEQ ID NO: 194879 - DNA, 284 bp, Zea Mays
ttagtgtcctacgatgaggataacatgccaagtaacttccttaattctgtgtaacagataaaggaaatcaaggagaaagcaatgactgccctcagtccatatgagccaccacgaggtcaacgagaagatcttggtagaaatggggaacaagctgatcagcctactaaggagccttttgtatccctgctggaactggttagagaaatctatcaggtaatgcttctgtcatttatatagtcaaatcaaatttatggacctgaaagcacctatgatttaggttgaca

SEQ ID NO: 194880 - DNA, 291 bp, Zea Mays
ccagtgtcctctttcattagttttttaagaagaaacgtagttttgtttcggttagcacaaatagtacaacagttacattatagccctacagtttgattgctcgatttggtcaaagctattcttatagtagtattagctctacagtttgattgcttcatttggtcaaagctattcttatagttcggaatgctggccctctcattggcactgattctcattacttaacttccatctgatcgcaataggtggctctctttttctatttgatcgcaaagtactgaggtacttcag

SEQ ID NO: 194881 - DNA, 563 bp, Zea Mays
ttgccaaacttcttggcaatgataggccggacatcatctgctacagcgagggtctccaagaatgggatcaactgaggtaacgcctcgtccaaggggttgctataccaactctctattggtataccattgttcacttgcagctcaaaaacctgattaaacacagaataatttagatgcttgtcagctgcaaagtgccaaagaagcagcaaagcaagcatgtggcgcaaaatacggcataaaagttctgaaacacaactgtaagttcaccgcacttaaagaccataaacagtttcagctcaatcaagagcacaaaaagaatctacattgactttacctgtggagtgttgtcaattatggcaaccttggcaaggtcgactccaacaacagtcagatcttttctgtagccgctgtctgtgatcaaacacgattcccggaagaaacgcttggagaaaagtttcttctctggatccagcatgtcaagcaactggtctgcataaacactttgactggcagtaaatatcactacctcaaacatttcaaccatcctttggaggaacatatgg

SEQ ID NO: 194882 - DNA, 322 bp, Zea Mays
aaacaatcccacgatggctcccaagaaggacgaggcatttaaggccgtctttgttgacaatgccaagaaaaccaaggtcaccttcgttgcactgatcctaccagccactgcaaaggcgacctccatcaccatcaatgagctagccatagagacccaactttccctcgccacaaagagccattcatccccaaaggaagtgtccacacatgcaattcggagaccctcgaacatgttcctttcaactcctagagacacccctatcaggccaaagtttggaccgacctgtcaagaaaacaaccatctagctcccactaactcaaag

SEQ ID NO: 194883 - DNA, 617 bp, Zea Mays
ggtgcatttttcccaggactattgatgtcctgaacactgtgttcagcatctgactccaagtgtacaggcaattgaggtatagtgttcgaaccctgcaacggtgtacttgtatgtgatgcaggataagaatctgtgtatggactcactccaactgaaccaagagggttcctcacaaaattcatgtagtgattccaatagagtgcagattgcgaagcaggaatcatggtagattgggaactagtattccctggctgaattggagcccacattgtagttggaccttgaccaggactaggaaaattaatgtttcccatgatgttgcaatcgacaggattctggtgcatgtagcccgttggccataaagggggtgggggtggaaattgctgggcatttgagggatttgacatcgcctgcgacgatgtcgcattgttggcagggtccatgctaggatatgtggagatggcacacatttagtcatatgttataaagtgaagccaatcgacaaaacgaggtacgtaaacatcagacaaagcatatgaacaacgataataataatagaatcatgtcatgaacttattcaggaggaccagcaacattagaacatttaagagtcaaca

SEQ ID NO: 194884 - DNA, 318 bp, Zea Mays
ttcactccatgcagcagggtgatcctagtatcgtcacctactgccagcccatgaagaacactgtcgacgccctccgtgatgtcggtcatcccgtgaaggactctgagctcattctcaacctccttcatggtctcaaccctcgattttccaacacggccgacatcattgccaacgccactgccctcctcaccttcgctgcagcacgcgccatgctcactttcaaggaactgcgcctcgccaatgacaacaaggttgctgccagcacagccctcatcaccaccaattgtactacccggggtgggtgtcacagcaactcca

SEQ ID NO: 194885 - DNA, 573 bp, Zea Mays
cacgatcgacggcttcggcacgacataaattctcgagacagcgataggagcgacgaggggcagggcgtgagcaagatgccgcacggcgtggcacgtagtgctaccatcgccgatgagcatgatgagcgccatcgtcatgagcaccgtggcggagaagagaaacgaagtgtcacaagtcattgctagccgctaggaaaagtgcttcctcaggagtgaggagctacaaggctgttgcgtgcttgcaacgagtccttggcgagtattttattgtagttccatttaaagctgagcatatactattttgctagagctaggccagttgggaacgagatagagatggttggtggccttccgatgcaaagcatggacgacagatacgtagtggatggatgttgttcgagacatttggttcattagctcatctgtttcttgtagctggatcagaattaaccacccctcgtgcatgacgcaagatgatactggacaccgctcaactcatgcatggtttatgaatgttgcatcatgaatccatgcatgacctctgtttgataattgttgaggcatgttttttct

SEQ ID NO: 194886 - DNA, 484 bp, Zea Mays
tgaccaagaattcaaaatgaccatgatgtgtccggaaggctgttttgtgcacatcatcggggtgaacacggacctgttgataacctgaatgcatatccaatttggtgtgttgataacctgaatgcatatccaatttggtgaagaatcttgcaccctgaagttcatccaacaattcatccactacatgtataggatatttatccttgagtgtcttctcattcaaggctctgtagtcgatgcaaaagcgccaagaattgtcacttttctttactaacaatactggggccgagaaagccgatgtgttgtggcggatgatgccttgttggagcatggccttacactgcgcttcaagttcatctttctggagctgtggatatctgtaaggccgtactgctactggtgctgtccctgggaggagatgaatctggtgatcacaacacctagctgggggaaggccactaggtgtctcaaacacttcgtgaag

SEQ ID NO: 194887 - DNA, 368 bp, Zea Mays
cccactttacatgagcagatagtcatggctcagattggtgacaagggtgttcaagttattaaggaaatgatcgaacaaaaggcagaaaaatataaatgcttctgttaggacagcaaagggattctatggtttggagaccgattggttgttcccaagaaccccgagctcagaaagaagatattggatgaagctcacctttccaaattctccatgcaccccggcagtaacaagatgtatcatgacctcagatctttgtactggtggaccagaatgaagagggaaattgctaagtatgtatctgaatgcgacacttgccagagagtcaaggccagccatttaaaggtagcaggcaccttacagccccttcc

SEQ ID NO: 194888 - DNA, 465 bp, Zea Mays
tcaccgtctactgtccttagatccacataggaggtagcaccagtcacatggtttaggaggagccgaagatagaagcgctccccttcagatggtagagcagagacgattctaccgacttgtccacccgtattttgtttcctcctttgccacactttgccctgcttccaagtgtaccactcagggaagtcacgatacaggatgccccgagcctcctcgtacagcttattcgcctcaaaatatgctgtaatcattgacctatcagcacctggacggttgacgactcgctcgaccatttgtcgctcgtgaaacgtcaccatgtgcatgtttggaagatggagttgtagctgcatcacagatggagagttttgactaagctcaaatccatatatcctccataaggcttccggaggagtcacccaccttgcatctctatactgttgtatctcatctacatcaccattttcc

SEQ ID NO: 194889 - DNA, 391 bp, Zea Mays
agcccttcatgctccgccgggttaagattgatgtcattgctgaaatgaccaaaaagaaagaagaaattgttccctgcaaattgagttctcgtcaacaaattttctatcaagctataaaaaataagatctcgcttaacgagttgcttgatggaagtcgtggcaatctaaatgacaagaagttacttagcctgatgaatattgtcatgcagctacggaaggtagtatatcgttatagtacgtttcttgcttttgatcatatgtagaatcatttagaagaacccaactgtccagaaaattttcttacctattgtatttgctaaaatttggctccttttctggttgtaatttgatgctatttctctacattgccttttaggtctgcaatcacccg

SEQ ID NO: 194890 - DNA, 1045 bp, Zea Mays
cacaaatgtttaaggataggatgctaggtgaggagccttgggaagaaggagaagatgcaaacatgtggctaaagatggcaacatgttttcaaaaggtggctttggaagtgtggtgtgagtagggaaggcaaacaggaggcgaaagacacctggtggtggaatgacgaagtgcaaagggctattaaggatacgaaggtttgtttcaagtgcctcctccttgacaaaggtgcagccaacatcaagggatttaaaatagagaagagggttgcaaagcgagctatgagtgtggcaaagggaccgacgtatgatgatctttatcagcgactaggcacaaaggaggaagagaatgacatttataggatggctaggatacatgagaggaagacaagggacatcaaacaaatcaaatgcgttaaggatgagacagatggacttctagtgaaggataaggagatcaaggacaaatggtgagagtacttcgacaagttgtttaatggggagaatgatggtcctaccctcgagttggatgactcatttgatgatacgaacaaacgctttgtaaggataaatcaggaggcgaagatcatggaggctttgaaaagcatgaagtggggtaaagcgatggccctgatggcatccctattgaggtgtggagatgcctaggtaccagagtgataatatggttatctaagctttttaacctcatctttcagtcaaacaagatgcctaaagaatggatgtagcatatgaagcttccactagagaaactcaaatggtaatggacacaacaagttagtgaatgttaaagctctgggaccagtgttctacggagagagcacacagcagcatagtaagcatcgatcagaggcaaggcgtgcgtctcgtccagtccttagtgtgtacccgctgctggagtttcacgtgagggaccaaccaacggcaggggcagcaggaccatatggtattattatggctcttgttgctcatgcttaattaatcgcacaatggcctgctcttcgccaacaactcctcagcttcaactcgg

SEQ ID NO: 194891 - DNA, 291 bp, Zea Mays
aattagaggaacttgaggtgtagtcgacttcgctatcctgacacgtacatagtttgcattcggtttaccttccgaaatcgagtgtgacagtttcctgggatcgacgatcaatggcggcaaccaagaacgcaactgctactacacgttgtcatcgcaacaagcagcgtgaactgaggagcgcgtgaatatgcaggtaagaacacacaatgtgcccgcgcaattgccacaattttctcaagtttttcttgactggttaaaaggagattacatgggcttgaagcacgttccccg

SEQ ID NO: 194892 - DNA, 619 bp, Zea Mays
gaaattagtgagctctagtggatgattcgaggcacggtttgcttcactggttgcacaattacatagcggagcaggcgaggtcggcaacttatagcaggcttgagcagtggccggtgaatttggattgagacgcgcggcggccggagagcaagaaggctactgacacagttggttcgtggagaataccgtggcggactcaccggcgatgatcggatggctaacatgagtcacggtggtgcggttaaaggctggaggcgtggcgcaaccgcggtgaatatcgcggttccggtgacggccgtaaggccacgtcaccggcgcggggaaccgagggacagcatggccacagtagcttgaacccatccgcgacgagatcttttcacggcgaactcaattcacagcccagacgcacgaatcatggcgagcagcactaatcccggcgaagggtcaccggcggccagctcactgaatctgcggattgtttttggttactgtaccatcacgatctccttcagtcagtctgacagacagaattgtgacgccaaaatcttgaattttcgcataagaacttactaatccgtttgtagcaaacctgtagccctatgatccagctataaaccga

SEQ ID NO: 194893 - DNA, 332 bp, Zea Mays
agagagtcgaggtcaggaggtggggaggagtcagcaaggggaaaagtattctcatcgaaaacaacatgtcgagagatgatgtggtggtgagaagatcgaggcatcagtaccccttgtgatcagaggaccacgagggtcgagggaggtcagcgagttctcaggtgcggtttgtctcaaccgcgtccatctctaactgcatcgcggcacgctatgccgcgtgcctcacggcctccgtgaaagatcgaggcttgctgtcgtagcatgccagatgcaactgcgcctccagattgcgaggcatcaggctcggcaccgattggtcgctgagaaggtcc

SEQ ID NO: 194894 - DNA, 454 bp, Zea Mays
gctcaacagaggtataaacattttgcagataagaagcgggttcccagggagtttcaggtcggggaacaggttttgctcaagctccagccttatgctcaaaattctgtggtcaatagaccttgtcccaaatttgcattcaagtattttgggccttacacagtgactgagaaaattgggccagctgcttatcgtttggctcttccaccagaagctcagatccatcctgtcttccatgtttcccaactcaaaccatttgttccaaattatactccggtctttgatactcttcctcaaccaatggatttggacaggggatctctggctccggtagagatcctggatcgcagaatggtcaagaagggcaatgcggctgtggtccaagtgctcctcaggtggtctgggttaccatcatcatgcgctacttgggaggattttactgtggccaagaccagat

SEQ ID NO: 194895 - DNA, 358 bp, Zea Mays
ctaatcgcgattttttgggcccagtagccgcataaatctgttggcgcccctaaaccctaaagcctcccctgtgcctgcgcccctctcctaaactttctgtcctctgccgccggcggctgctccagcctccagggctctccaccgtccaccagcgccggcgtgcagctcatccttgaaggtcgtccctgccccctgctcatctacaaggcacaagatgagctcgtcatccgaaggtcatccctgctcccctccttcccccttttctgcactctgcagttttgcattctgcgcaacagtacccatttgtttgcagtctgccctggccctgctcatctagtgttctatacttctatgttct

SEQ ID NO: 194896 - DNA, 742 bp, Zea Mays
ccggctcggcgttggtgtacctcgacttgtcaggaaacgagcttacaggagaattcaccattgccggccggttccagaacctgaggcatgtgaatcttgcacacaaccagttgtccaatgctaatttgctggtgtccatgggtgggatatctgggctagagtatgttaacctttcaagcactgggctgcatgggcaaattcctgctgatttctcttcccgattggttggattgaaggttctcgatttgtcacggaacaatatcagtggggtagtcccagacatgagttctcttggcctacacttgctggacctgtcggtgaacaatctcacaggtgagatacctgtggcattggtgaagaagctgacatccatggatcggttcaacttctcatacaacaacctgactgtttgcgcatctgagctctctgcggaggcgtttgccactgcatttgctcagtccaggaatgactgcccaattgctgtgaatccagacagtatcgtgaaaagtagagggaaacataagggaatgaagttggttctggctgttgtgctctccttgttcttctctgttcttgggttgctttgcttggcagcggcatgtcgaagggggaggaagaggtgtgatgagctgcctgtggttaagcaggtgtcgtcgttcgatgagcctgctgtatcagggccattttctttccagaccgattcaactacatgggttgctgatgtgaaggttgcaacttcggt

SEQ ID NO: 194897 - DNA, 359 bp, Zea Mays
gtttggttggctagaacttgggctaaatctaatggtagctccggaggtgcggggaggtgggtctcactcccttctccaccggcttctccttaagctcctaggggaaaccctgctccaatcccggaggcggtaggcgtggttttatccgaagccatctgccagggggagagagttactactatatatatacgcatatgccaattttttgcaaccaagttattttattcattacactagttcattacaagcatacagttaccacaagtcgcactacacgtgagcgctttctaaggtacttccgaactcctttttctaaggtgtccccaaattccttgagaaggtcatcaaggctagctagg

SEQ ID NO: 194898 - DNA, 569 bp, Zea Mays
gcaaagttcagttggtgttcacttgttcctcaatggaggccaagaacaagaaaaaagggtcaaaggtcatggtatttcttctcttgttgattgggcaatccggacaagtctttagtgatccatgttctttatagcactctatctagaatatcatctggtagcccgtggtgcccttcctttagaccttaatggggtagctttgttcctttacctgctactgctagcgatgttgcaaacaagaagtggattatggagtggcgcacaagaatgtccacctcttggctctacatggctctgctaactagctcaactgtgacgaacaaccgggatttctgatgtcctatcatatcgccacggctgtttgttcctttgccaagtttatatgatgctattacctttttggctggaagacaaggtcacacgtcgttcttggatttttctattattgccctctctagaaatggttacatgcagcctttcctgtccagtaatgatttgccttctgtcacttaactttaccaaattggacgtctgattctacgtccctatcaaccagctgtaattactac

SEQ ID NO: 194899 - DNA, 936 bp, Zea Mays
tacaattccgcaattatgagaaactctttgattacataaactcgaatccacatcttaatgctgaagtcaaatttggtaccctggaggattacttctctacattgagagatgaagctgaaaagataaactattcacggtcaggtcaattgggttctgctgagctgcaaggtttcccaacactttcaggagatttctttacctatgcggatagaaatcaggattactggagtggttactatgtatcaaggccattcttcaaagctgttgaccgtgtactagaacagacactccgtgcctcagagattttgggttcatttgttctaggatactgtcagaagtttcagtgtgcaaaactccccatcagtttctcacacaaactgacagcagcaaggaggaatttggctctttttcagcatcatgatggggtaactggcacagctaaagatcatgttgtggtagactatgggacgcgaatgcacacttcactgcaagatctacagttatttatgtccagggcaatcgaagttcttttaggagatttccacgatagatctgaccctacattattatcacattttgagcctgtgcaggaacggtcaaagtatgatgttcagccggtacataaggttcttcttcctcatgaagggaaggcacagtcagttgtattttttaacccattagagcagacaagggatgagattgttatggttgttgtaagtagtccagatgtttctgttattaattcaaatgggtcctgtttgccaagtcaactttcccctgagtggcagtttgtcagcgatgaaaagatttcgactggtcggcaccgcctttattggagagcttctgttcctccactaggtttggagacctactatgtggttactgggcaggattgtgaaaaggctattcctgctgtagtgaaaacatacacagctg

SEQ ID NO: 194900 - DNA, 1430 bp, Zea Mays
gcttctcctgcggaggtagttccgaccaatttactggttgataagttgtcagagaccacatcctctgctagctcattggttaaaactgatggtcggtacaaggaggaccatgtggaatgtggtattatgttgaatttagctacattgggaactgatgagatggatggttctggatgtgctggttcatcttataatgatgcaggagggagattaagctccagttgtgtttcttacttgaatgacaaatccaatacgacagattcttcagaatttgacggatccaccttcactgaacatggcttgggagaagaaagcaatagctaccagaagttaacatgcccctatgtttataatcccagttatgcaaccatggattccatctttagtaggtggaacagcgacaacagtgggaactacagtgtcgatgttgaggctaggttaaccgtcaaagacgaaaatagacatgatcattcgaaactgggggcttccacagggcggagtaatgtgaggatggaatgccagttgatagggtcatgttttagtgctactcatgctgaagacacaaacgatcctctagggatcagatcatactcctctaaggatgttactgatagttgtagccatactgaaatggttcagtgcagcagcaagtcctttcattttaaatcagggaggaggaacataaaatcaagtaaaacaccaagctatgttgatttgactgcgtctaacagagtgagaggttctaataggcacaagaacaatggaaaagatagttcagcagtgtggcagaaagtagaaaggaatgacaagatggtatctaaagcaggccatccgagcgatacacctgttcatgataagggtgcaaatgaagttggtaagaagggtgtacaggaagatccaacaagaattcgggcaaaacataatccgaataagaaagtgtgcaaacagaagccttcaaatggagcagttgaattggagcctgccaaaggagaagatgcattgaactcatgccatacattttctggacctttctacacgaagcaagcaccctttctacgccagcaaagaaactctttttcgaaacaaggttctcagtcattgaaaaactactgtgctcctaggaatggtatccccaaggtggcaaaggattacttgcagcaagaagaattacctatgttggtgctagttcatgccaagaacaccagtgataaatcaagctcatattcaagttcagctgatgaagttggtctaactggagtcagcaacaactatccaactgagggaaatgagagttcacaacctgatattgaggtagcagcgtcagtatcttgcaacttggttccagatttggctccacaagctgcttctgatgatttccacatatcagatcctcactctttacgtcctgaaaacaagggtgcatccaacag

SEQ ID NO: 194901 - DNA, 384 bp, Zea Mays
tattgtgtaacacgactcttaggtcgctattatataaccgtgtgaaggatgctcccgagggtcatgtgactaaaaggggttgtagtggcaaagctagaagtaagtttaatatttttaaatgattaattgatagcacctatcgacatcgtcatgatttttgttgtatggcggatcgatgccttgtcgttgtagttttggggaattttcggaaatgtgctggtgctttactgatggggttgaatgtacttgtgatgtattagaataactgcgtgtcgtacgagcatccgaaaatggtgaaagttggtgtatgttggtaattagaaaatagtcacgacgttagccaatagccaagcttatgccgaaatgtaaaatatgggaactttg

SEQ ID NO: 194902 - DNA, 375 bp, Zea Mays
ctctgtacattcgtgatcttggccctgctgttgaatttggagatgcacactggcttggaagacagggtattgcattagcgctccactctaccgctgatgttttggccgctaaagatcttcctgttgtcatgacatttctcatctcacgtgccttggtaagtaatttgtttttatggatcttatcattgcagatttgcagtgccacttacatagttacatttaacttttaatgcttctcatgacgaatctacaggctgatccaaatgttgatgttcgtggtagaatgattaatgctgggatccttattattgataggcatggaaaggaaaatgttcctttgctatttcctatttttgagagctacttgaataaaag

SEQ ID NO: 194903 - DNA, 577 bp, Zea Mays
ctaagtatggtcattttattcccctggctcatccttatacagcctccaaagttgcacatttattcatgtcgacagtgtacagactgcatggattacccgaagctattatttcagatagagatcgtgtttttaccagcactttctggaaagaactattcactatggcaggcacacagctgcgtatgagttccgcttatcacccccagtctgacggccaaacggagcgtgtcaaccagtgcttggaaacattcctccgctgcttcgtgcatacctgtccatctaaatggcatcaatggctccatttggcagaattttggtacaacacatgcttccattcagcactgggtcgttctccattcgaggtgctgtatggccgcactccccgacagctgggcatcaaacctgtggattccatcgcaaattcagatttgtctacctggctatcacaacgcgagttgatgtctcgggtggtccatcagcacctacttcgggcacgcaaccgcatgaaacagcaggccgacaagacacgctccgaccgcgagtttgctgaaggcgattatgtttacttgaaactcca

SEQ ID NO: 194904 - DNA, 325 bp, Zea Mays
ccggcgaggtagttagtcgatcttgtggacctatagcatgtaactgacgttttctattcgatcccttcttaacgcacaaaaccacccgttaattagcccacacgtagcatcaaacgaactctggtgtaaccatctcctaactcgctaccttctcactcactaacgatcaaccacgcaacgagagcactttcccttcttcccttctccttatatacccccggcccttatccctctcctgtgctggcctctgacctctctctacatccttttgtttgttgccctcctccccatatcatcctcccttgttcgtcatcgtctctccctc

SEQ ID NO: 194905 - DNA, 447 bp, Zea Mays
agtttgttcagtttacaacattcatgttttatggttattggaaaagaggtggtctgttctgtctgcgtaagggaactattctatttttatttagggtttagtaaactgaacaaactaactcaattttaggaatggtatgggactactgctgtataagacaaacgttttgtctgtttgcagaccacctcttttccaataaccagaaaacagtaccaaacagtacccctattaaagagttttatcgtaccacatgttgaagtacatttatatcctattccagtcacaattttactaatcagtttggttattggattatgagtggtagtaacaaactaaacatattttaacacacatcgtgtgtctattgtgtacatgtatagttttgcacacattttatcttggttcgctgtgtgtctaaaacagtggtaaaattattcaccacaacca

SEQ ID NO: 194906 - DNA, 385 bp, Zea Mays
ccccaaaatcatcatcatcatcatcatcagctgctgtatcctgagtgtcgaactgacgaagagcagcgtcctcggcctgagagtcaaaaacaggagcagaagctggcacaggagcctcaggcgcaagacggtaggatcaaaaaacgaggcgtgaggcctcaagtgtgccctgaaaccgaggaggctgaatcagctgcgcaaagatgtggcataagtagtgagcatatggcaactgtctacgagcacgaatcccatccaaaacggtgtcctcgatctcacaaataaggaaatccacgacgtcaaactcagagtgggagaccagggcaccaaggagccagagctgaatatgtgtggtagcctccctgtatcccatcctcggcagaag

SEQ ID NO: 194907 - DNA, 293 bp, Zea Mays
gtgagtttgcttctcagccttgggaagattccggaggggagcaattaaggcctcaatgtcctctgaggatggtcacactctatggcccgggctaccatctcgaacaggaggattggagacaaagccagagaagggactatgcggaggcaggttccatgcagagtaagataagggaggaccagcattcgaaatcctgcccctcaatatcatgtcaagtcaccctagcaagtcctcattggggatttgcatgttagtgacccgggtaggatcattgacgctagtgtacaagtaag

SEQ ID NO: 194908 - DNA, 389 bp, Zea Mays
ggaaaggggaggaatgcaagtgatggaactgattcagaaagtaattcgtttgacaagagggatgatatgtctgaagatgaactggtagtgcttggtggaaaaattgatgattcagcggacaatgtcaatattgatgaatctgaggacaatggaagtaaaaaaggagtcaagagaaggcgcaagagggtgcagatgaaggctacagctgaaaggagatctgaattctaatactctttgttagaatataggggaaacatgaattatttagtgctatttgtaaactaattagaattgccttcacagaatttggaagaattggatggagacaagtagacaactacaagacaagctaagctaaggagtaaggacgtcaagagtcaagactcaag

SEQ ID NO: 194909 - DNA, 382 bp, Zea Mays
ttttggcgtgtctccagtgatgccctcctccgcgtcgctctctgtgctcgcaactccgccgcatggccgcctcgtgtcgtggtcggagtctacgactgctctttggccggtaagaacccacccatgccgttagcccgttcttcctcttcgagtagagcccatcggaataaactttgtgctagggcggtagactatcctgtgtccggcaatggccaccgccgcggtggctgggcgcgccgccgtggctgtgcggaagaaagacgacaacctcggtgtcgtgggattatgatccaatggatggggctgcttaactgtttgaagcatgtttgggaccgtagatctagaatctgacgggtgggaatgtgtaccggttctgatcaag

SEQ ID NO: 194910 - DNA, 669 bp, Zea Mays
ttcgtcctcgtttctcctcgaacccacccagcagcgccttcttccttcttcccgcccaacctcggccatgcccgtagcggcgctccgtcctcccccggtcgctgtcggcgcgggacgccgcagcgcccgactccaggcgcggttcgccctccgcgcgagctccctcgaggcgtcggcggcagtgacggtgacagtgaacgggtctgcagaggccgcggtggagaggaaggagaaggtgcaggaggataaggacaacgagggactgccggtgaaggaggagcaggagagggggctggaggtcctctacgacgacggcttcggctccgtgaccgtcaaggactacttcgcggcggccaaggtcctgtgccgggacgacggtgggccgccgcgctggttctctcccgtcgagtgcggccacccggccgtggaccaagcgccgctgctgctcttcttgccaggtgcgtgcgtttcttcagctcaccaaaatcaatcatcccaatgcttgtctttgaagaggtgctggaggtgctgggcaaacggaggaatcattctggtttggtttcctttctgtttctgtacatgcctagtgatccacagcgaattgacaacactatatgcaggaatggatggcgtcggcacgggactcatcctgcaccacaagtctttggg

SEQ ID NO: 194911 - DNA, 483 bp, Zea Mays
ctatttttgtgtggtgttttacttgagtggacataaacaccatctaaggatgccatgaatagatgggattattgggaaccaggtatcacaaaaggtcattagctagcccaataacgtcttcatccactagttgtactctaataccctctagtgtgaatacaatgcccacaatatcatagaaacgtcatttgaggtttaaaaggtgatctattgttttgaattctttatattccaactttttagcaactgtatggtggaaaaaagttgtcttacaaccttaacctatgtttggacagttcactcacgcaatttggctaaattttccatagtctttattttattttgagaaatgatgtggtatattgatgtgtggtgttttacttgagtggacataaacacaatctaaggatgccatgaatagatgggattatagttaacatattatcacaaaaggtcattagctagcccactaatgtcttcatc

SEQ ID NO: 194912 - DNA, 1353 bp, Zea Mays
cggtgatgtcgccatcgcgctcgcctacgagagcgcgggcttcgacgccgccgcgtacatgagcgcgctccgggcgcgccggttcgggaggtggatgctctggacgcccaggattggttccacgcaggatctcatcacgcggtgagtgccatgtctggtttcgcgccggggagggatttgggttttcgttttatcttatttttactttgtttgacttggcgtcagctcgtgttcgcaggaactttgcaaagctaccggtgggcgttgtgtgcgttgccgacgtgcagttcaaagggagaggtgcgcgtgattaggggctggcttgttgctcttagtgttttagtcctgatgaatttgcaactttgattacaaagctctcgaattttatttcaggcgagattgatgctctcttatacttatgatctcattgataaaactgatgaaactatctgctgaatgctgtgtaacctttaagattaagtgcttgaaaaatgcagtctgactgaacacaagtagaatcttactgtagtgtgacaactctttatcaaaataactgttttaattgattctacttttttgtggcaacacattcttaaccagttggctaaaccagatcatacatagcattcccttttttctttcatctttctaatcacataattttagtatgcactaggtgctattaagagataacaaatttaatctttgctcacgtatcatgcaggccgttcaaagaatgtgtgggaatcgccaccaggctgtctcatgttctctttcacatcacagatgcaggatgcacggaagttgccccttatgcaatatgttgtctgcctttcgataactgaagctatcaaggagctgtgccgtgccaaggttaggttatagttcagtgttgtcatgtttgctgcttattgattgcattttgagtcccctgtttcctttatgctaactacctcagttgccatttcattctgcctttgtgataaaactcagggactaccagaacttgatgtgagaataaaatggcctaatgatctctatctgaaaggattaaaagttggtggcattctatgtacctcatcttatgaacccaaagtgtacaatatttgtactggtaaaatgcatttccaatgttgcccattctaagcatttgatctctttttttttttcttttgacaaggatgggattcctttgatcttaatcaggtgttggtttgaatgttgacaatgagaagcctaccacatgcttgaatgctgcacttcaagaggcaaatcatacatcacccatattgaaacgagaagacatattggcatacttcttcaataaatttgaaaaccttttcgagatcttca

SEQ ID NO: 194913 - DNA, 302 bp, Zea Mays
ctttttagagggtccgagaacttcgttgatgaagtagaccggatgctgtactggatatgtatgtccttcctccatccgctcgactactaacacaatgcttaccacgtgagtcgtgcaggagatgtacatcaacagatcttctgctggctgattcgtcgtggcccggtgtggtggcttgagtactggtggtgtagttaggaactttttcagtgcttctagagcttcctatgcctctatggtccactgaaacttgtccacctttctgagcagtttgtagaatggcatgcctttctcgcctagcc

SEQ ID NO: 194914 - DNA, 735 bp, Zea Mays
cgatcatggtgcagtgcgacttaggtgaggtgtgcatatgtgtggcgacgatgcagggggagagggtggactgggatggcatacgagtatgggaatgagaactcataacatgtttagggagctgagtgcacaacttaaaggtaatggtatcgggatgagaattcggaacaagggagttaagtttaatttgcatgtaatcggactagaatgagaactcgggacaaatttaagaacgttaggtgaaatttactctttctatagcctgatagagagagaaaaatagagcattgtattgagggtaagaggattacatatataggaaaggctacatgggatttgctctaggcccataacacatacatagaagtttaacaccccccccccccgcatttgaaactctagctacgacagatgttgagactagaccgaaactctgagaacatcgaggacggaagacccgtggtgaagctgtctgcaaactgtgtgttattcagaacgtggagaacacaaacgtccccgacgacaacgcgctcacggataaagtgaagttcgacctcaacatgcttcgcgttggtggtggaccaggttgacgaagaggtagacagtgctgaggttgtcacagtagacaagtgtactcctagtgagggggttgtggagctcttgaaggagatgtcggagctagatggtttcgtcgttcgccatgacgcggtactcagcctcaatgctggagcagga

SEQ ID NO: 194915 - DNA, 421 bp, Zea Mays
ctcgacactggcgccacagccgacatatcgtcttcggctagtatactcctgtcccatctcccccctccttccggcatcacggttggcaatggcactaccatacccatcacatgtcgtggcacatccacactctcctcccccacctctatttatcaccttaacaatgttctggttgcaactgaccttgtgcgcaacctcctatctgttcatcaattcacccgtgacaatgcatgttcgattgaatttgacgcgtgtggtttttctgtcaaggaccaacagacagggcacgtgactcttcgctgcaatagtggtggcgatctctacacctacccctccacaacagctccctcctgtagcttcaccaccacatcatccctgtggcatcaccgccttggccaccccggtccttccagcctcgcca

SEQ ID NO: 194916 - DNA, 495 bp, Zea Mays
catcaacataggcttctactcgcttgccccagtgatcggctaagcatgtttgaatggctctctggtaagtcgctccagcgttcttgaggccgaacggcatggaggtatagcagaaagctccaaatgaggtaatgaatgttgttttttcctcgtcttcttttgccaagctgatttgatggtatcctgagtagcagtccaagaatgacagtatagaacatccggcggttgaatctaccacctgatctattctaggaagtccgaagggatccttcggacagtgtttgttgagatctgtatagtcgacgcacatgcgtcaatccactttattctttttgagtacaagaacaggatttgctaaccactcaggatgcagtacttctctaatgaaccatgccgcgactaagcgagctagctcggcacggatggcttctctcttatcgggcgtgaaacgatgcaacttttgtcggatcggcctcgcctagggatagaccttca

SEQ ID NO: 194917 - DNA, 366 bp, Zea Mays
tgatactgccactcctttccaagggttttcattgattcaatcggacgaggaagatatttggtgggtgaggaaaggcacaaagttacaagaatctttcaacattgaacctgttcagaagtctgttaagcaaacttctaggggtagggcaaaagtggttcgtaaaacacaaagtcttgcacaacttgcagctgctagaattgaaggtagccaggggacatctaccagtcatgtctgtgaaagcaaaatgagctgtccccaccataaacctaatattgatggcgataatgttaaggattttgatcacacgagggtggcaaatctgactgaaattgggaagtcactaaaaagacttagattgcttgagag

SEQ ID NO: 194918 - DNA, 589 bp, Zea Mays
ttgggagcacgaccgtctttcttcccgacgtgtttaccacgcttggcgttgctaccaaaggactactgcaggggcgcctgttcttgcttgggcggaggcctgacggagccgaaggcgaggagagcggtggccagcagggaggaatgatgtgtgaaggtgagttcctcaagaagcagatcgctccgtacctcgaggaaggtaggaaaggtcgcccgcaccgaaggtgaaggacgatgttggcgaagcgctcgttcagaccgcgaatgacgttgaggacaagggtgcggtcatgaacgggttcgctaaggtcatcgagagcgtcagccatccctttaaacttgcggcagtagttggtgatggagagatcgcctaggcaaaagttgcggaattccgcgtcgaggaagagtgcccgagtctcacggttcccgaggaactgagacacaattgcaagccaggcggtacgggcagtagcgtcacggatgaggacagcatcagcgaggtcaatggtgatggtgctgacaatccacgacttgaagatgcagtccattcgaacctagtcaggagaagtaggcgcgaaggtgtcggtgag

SEQ ID NO: 194919 - DNA, 779 bp, Zea Mays
ctcagtgtgatctttagaagccttcatgaagagaggacattgcagctgaagtctttgcataataactttggctgtcttcaaacagcaggcggtgagctttatcaggagatcaagatgatgaacaagaggcttggagacatagaaatggagaacaagtaccttggcaaagaactaagtagaactatgagtgtttatggtggatctattgtgcaaacagcaacaggaaaaggaaatccagggcgaagagatgccaaccttctgaattcaaacaggaaaatccaacaagattgtcatgtaaatctggaggtggaacaagaggaagtttgcaatgctgattttcaggagtcaaatgaaacactacaggatgaggtccgtaagttaaggagcgaagtggaaatgcttaggagcaaggagaaggctgtgttcaacatcaaatcctgtgatgaagagatcatgaaattgctggctaacatgcaaatggctatcatgaatgcagctctgttcaaagagaaggttcttgagctcatcataacatgcgagagttttgagataagtgccatggtacagaaggaggttctgaaggaagaaatcatacaaagaaattcatatgtagatgagctgaaggacaaactaaatgctgttgagattgaaaacagaagactgaaggtcgacctaaatggtgatttcacaatgttagggtcattgcagactgaagtcagtgccctggaggagcaaaccttatctctcgctaacgaccacttgcatacaaataagctcag

SEQ ID NO: 194920 - DNA, 517 bp, Zea Mays
ctagcctatcatgtatttcattgttttggattccaccccttcttgtatggccataaatctaacacaacatatgtattttcacaacacttatatgctcatcatgacgttttttgtaggccaacattttacaccaatacaccatacaacatagtctaatcgcctccctataaaacttgccttttagcttttgtggtgtacccttttgtcacataacacgcaagatgcttggcgctacttccaccctactttgattctgtggctaacatcttcatgaatatctccatcactttgtagcattgatgcgaaataccgaaaggtatccttcctaagcgctacttgaccttccaaaatccaaactatcatctccttcctcatgtgtaataatgttgaagtcacatgtcgtgtatttggttttggttatgctgagtccaaaacctttggactctagagtctcgtaccacaactccagttttctatttattctgctcgactttcatcaattagcactacgtcgtcc

SEQ ID NO: 194921 - DNA, 345 bp, Zea Mays
gacttacttgctactgaagaacctaaagcacttaggtgcatatgttatcggattgttcttcaattttaaccaggaccgacttatgaatgctacttgcttccaataattcttgggctgcgataacactcgtataagacctctaatcgatcaacaagacatttatttatccaaaggggcatggaatgtgatgattgacaaagcgaagcatcacattgccatacaacaaaaatcatgacaacactgacagatactatccactaaccgttgaaaaactaaacttacttcccgctttaccactacaccaccctttagtcacgtgaccatcgggagagtccttcacacgat

SEQ ID NO: 194922 - DNA, 368 bp, Zea Mays
ggcctgtgagtgtcccacgctgaaggtgatcagaatggagcactgtgagagaactatcttgtaatgggtcaacatagtgtgtcgagggcttaaggagcttaggcttgttggctttccagcatctgttcaggcttatcacatggaacacattttatgtgacatcctgcactacaatgggattagaaaggttgagctgcaatcctaccattttacagacacgcatgtttgcactgtagctcgttcatgccagggagctctgcaggaacttatattggatgagtgcccgaacgtcctgggcaactttgtggtgtgcctcagagagtcttggcccaacctaaccaagttgaccttgaatcgtattggaatca

SEQ ID NO: 194923 - DNA, 349 bp, Zea Mays
ttctgtctacatgtcctccaaccccgttcagcaccagcgcactaaacatgtggagatcgacattcacttcgttcgggaacatgttgctcttggcaatgtccgtgtcctacatgtaccgacaacttcacagtatgctgacgtcttcactaaaggcctgccgtcttcggtattcactgattttcggtccagcctcaatgttcgctcaacggacgtatcgactgcgaggggatgttagacaacaatattcattgccttgtatataggtgtgatgcctggcttccttatgcagccggccagccttgtatagcaggttaggatagagagagatttggggaagagtccaggatgg

SEQ ID NO: 194924 - DNA, 589 bp, Zea Mays
caaatatgcttatcaggaatcccaggttgaagaactaagccctccagcaagtcacagagatccaaaacatgtgcaagcgcctaactgaaatcgcaccccttatatcagccacccaattaagatttgttagagcatcttttacctgccttttggaagcgacacgcttagggacatgctcaaggaccacaggtgccacctcaccgatgcatctaccattcagccaccgatccttccaaaaaaggatgtcatgcccatcaccaaattgagacacaactgcaacattgatcaaggcttccaccgctccacaggcctgagcagggaggaccgaccaaggcttagagtgatcggttctttggagccaaggccacctagctcgaagcgccacgctcaaaagccgaagatcagtgatcccgagcccacccagatctttaggcctagtaaccttaccccacgccaccaaacagtgaccaccattggcttgttttcttcctttccaaaggaaacctcttcttaccttgtcaatagctttgatggtccaattagggaggtccaaagccatcgcagcataaatcatttttgctgtgagaac

SEQ ID NO: 194925 - DNA, 301 bp, Zea Mays
ctatgggctggagcctgaaaaggagcactacggttgtgttgttgatttgttagccagagctggtagaatacatgaggctgaggagttgattggaagaattgctgctgaggaaagagatggtgtggtttggacatccttgcttagggcatgtgctgctcgaggggcagaggaaactggaaagatagctgcagagaggatgatggaggcagagccatggggttcaggagcacatgtggtgatggccaacctctatgcaagcaaggggctgtggtgtgaggcagcacaggaacgccatttgatg

SEQ ID NO: 194926 - DNA, 1971 bp, Zea Mays
gcctgactcttctataaactgtgaggttgtggcctttataaccatgaactttgtagtgaagacaagtactgtgaacttgtaaacttgtctgaaacacaccatttaaccatcaagtattaagggataatttagttgaatgccaccctcaagtttgttattcagaaaaataccagttgttgcgacatggctggtaggtcctgagctcgctggtcaatgacacattgaggccccatgtcggtatttggtaccggcagtgcaccacaggatgtatcacaaggtgttttttgtggttgacgaaattgactgtagcttgatggttcgcgtggaaggtgacgtgacacgagaattatacaggttcaggccgccgaaagacgtaatacccatcgccctgtgtgttgtggtgattgtattgcttgagctcgagattgcattggtgtgcagacgattcaaggttctggtatgagatagctatgagatgggatctaccgatgaatcatgggggtccccaacctgccttatataggctgacggatttagggttacaagttagtttctttcctcatcacaagtgtgataagtcccgcgatctcggggatttgttcttgagtcgcccgtgagtcctcgcaccctccttaatggaaaaatccgtcgctctgccttgatctccaagccttcatgtcgtctttgggtttgagttggtcgatcggtccatgaaatcatctgtccgacctacttagacccttcaacagcccatgtacagaacccacgccatgaggacctaggggatatctatcccccacaccccatgcatagtatcatattgttatatctatgactgccatgccacaagaacatttatcgaaacaactctactctatccagtcagaaatattgtggtgttttgggattgtctgaagtgaactattctaaacttctgctactacttttactaaaatattgtccaaaaatgtactcatatcacttgcaaacattcaaactaacacattaattgtaggaaactaagcaaggtccggtattgttgctttcagttactcagtcatttcctaggtttccgaaatgatttactttctgtatatattttgcacaaatctttcatctggtacacaacaatttaagtctatacggtttcctagtattttggatttctcacccaggtgatttcttaaataatatactcacctctctcctctttaattgcttactatgccaccagaaaatcctatgtcgcacatgataaatgtgcttgttactacccaatacccattgggtttttaattaactgaagtgcgagcttttgggtggcatgtatctgtaaatcctatgcaactgttttcttgactatctttgttctctggatgattatatggttgcacctattttttttttgtccatagcagttcttctaatagcctgtttttgttttagtccttactgcaagattacaagtaacacaaaaaaggttaattggaagctcatgatcctatgtcatatactcatttattctctttgcagtatcttgctgtttctgcgcatcctcctggttcttcttaccataaacttggcatgcccttaaccgggagaggtatcattcaagtttggtgtctgttagcaccatttgaagattcacattctcaccagccagtgaatgcattcaataatggtaagcaaagaggaaggcctagaaaaataccttgtagtgataagctggtacctgttccaaaaggaccaagggggaggccaaaaaagagatcttacgatgatcagttagaacctgttccgaaaagaccaaggggcagaccaagaaagtatccattaccagttgcaaaatttgaaggttcatctcaaaacggtgaaagtcaggatattattctttttgatcccctttctacttcaagttttattccagatgacctttcattggcttctgtcatgccaactgaaaagtctgtg

SEQ ID NO: 194927 - DNA, 980 bp, Zea Mays
aatgtctgcaaaatctcgtgaaggagctttacttggatttgagtgcctgtgtgagaagcttggcaaactatttgagccgtaagtgaggcatctcttcacttaactgttgctctgattccaattgattcgttatattttctttcttgtaggtatgtcattcaaatgcttccgttcctacttgtgtgtttctctgatcaagtcctagcagtgcgcgaagctgctgagtgtgctgctcgggcaatgatgtctcagctcactggtcctggtgtgaagcttgttcttccgtcacttcttaaggtatcaatatatcttatttgatgctatcaaatcataacatttattgtgtccaaatgttctggagaatacaagtgtccagttcatctagttatatattgaaatctgacaaccacttaacttctgctgaatatttaggccattggcaccacaaactactagtttgttttcattaacttgaaagagcagaacatcttgaggtccatctattacatttttttttaaaaaaatctacacattctggaaatttgttggcttattttcatttgtgctgttcgtacctttatgttagttgtttaaatgaagataaaataggtattcagatactttacaaaattttaagctagtcacattcactttcaaaaagtgtcatacggtgaatttacttagcttgtctaatacaagtttccttgaagcgcatatttggatgaagatcattaatgttggatagattagaataatgggccaaccctagagagggttggctatatagagttcatacacgggcctcatgggcctagccacatgggcctaatccatatactctaacaattaacatggtttttccagggtctagaagataaagcatggcgtactaagcaaagcagcgttcaacttcttggtgccatggcatattgtgctcctcagcagctatctcagtgtcttccaaagattgttccaaagtt

SEQ ID NO: 194928 - DNA, 399 bp, Zea Mays
caagattgcaggccatagaaatacaataatcagaaatcggcatggcaagccaccaagagcatacctaaccttagtttaaacccactgaaaatagtttattgttgtttacgaccatttttctctgctgttgtacctgtcgtgttctcccttgcgaaaaaaatcagctgctatacatgtcatctcttttgaccaagcactgcaaagccacggaggcaccatgacctatgcagcgtctgatctttaccgtttgccacgtcgcaggagctagagcttgtggtgctatcttggcgctgacacgctctgcgacgtatcagtcaactccgcgacgccggccatcgacgatgacgtgcccgccgagcccgacgtgccagccatggcgatcagggaggtgttcggcac

SEQ ID NO: 194929 - DNA, 528 bp, Zea Mays
tggcctttctgtgaaggatttgcaaaccaggaacgtgatcgccaggtgcaatagctccggtgacctctacccgttccatgcaccctacaccagcacctctgcattactcgctgtacccacctccctgtggcatcgtcgtctcggtcaccttgggcatcaagccttgtccaaactcattacctccagtgtcatttcctgcaataaagatgatgtcaaccacatatgtcatgcgtgccaacttggtcgtcatacacgtttgccgttcaattcatctagctctcgagcttctcacaattttgatttaatacactgtgatttatggacctccccaattgttagtgtgtcgggctataaatattatttggtaattcttgatgattgctcccactacatttggacgtttccgctccgcctcaaatccgagacttcttccacacttgcaaattttttcacttatattcgcacccaattcggcatcaccatcaagagcgttcagtgcgataatggccgtgaatttgataattctca

SEQ ID NO: 194930 - DNA, 622 bp, Zea Mays
atggttgcggtcatctaggggatctgaaaaataaatttcagcatgtaaaatggatcaggagctcattgaatccagaggagtcatatcggaaaattaaaaccttgaagcagataggtgatgggaacaactacgcatccaaagttgcaaggaacttcaccaatcatctggatggttctgatgagcttgatgggtattttgctgatatttcaaatagagagaatgctaacctttcatttggacaaggtttctataaacgatcaaaattgcttgatgctagaaagtcctctgcggttttgtcgagggatgcagaaatgaggcggttgatgcagagacaggcagagaccagttacagaaagatggaagagttcatcataaacagactgagagaaattatgaggagcaacagatttgattttttcattccaaaggtaccatcactatttgataattatttggatgagtccccttgatggtctaatatgatgtactaatacttcacgcccatatccgttccattttacaggtttccaagattgaaggtaggctaaaaaacgggtattatgctcgccatggctttcgtaccatcaagcatgacatccgtaccatgtgccaagatgcattg

SEQ ID NO: 194931 - DNA, 1412 bp, Zea Mays
cggccaccgaaagcagccactgaagcttttaagcctcttttcttgaacattgggcatgaggattttaagaatactattataccatcatgcataaagatgctgaaaagaaatcctgaaatcgtactacagtctattggatatcttcttaagacagtccatttagacctaagcaagtattccatggagtttatgccagttgttctgcatcaagctcggcattcagatgaagagaggaggattaatgctttgagtattataggaacactaagtgagaagtcaagtgatccagatgctctaccttccatggtcaatgctatcaaagctgttttaggaggtattgcatgtatttttatttcctaatatctatcgacctatcatgttcagtggtgttatcgcttaactcatttttaatgcatgttccagtttgcaattttgtgctgtaattcatatatctcttgacaaacttggtttgggcaggctcagaaggaaaactatcacttctataccagagaattggaatgataaatgctttagagcagctatcaagatctcctccaaagcaaataggcagacttgccccctcagtatcaactttccttctaacgtgttacaaggatgatggtaaagttccattttatgctttttagcctcatctaatgaaattgattcatagtttttctgtattatcttattacaggtatcgaggaagtgaaattggcgattctatcagcaatagggtcctgggctttggtatcagctgaagctgtccaaccagatgttgtttcatttattgctgcaggcttgaaagagaaagacactttaaggaaggggcatctgaaatttttacgagttatatgcaaaaactctgagtctttaacaaaggtaagggagtaacttccagttttgtatacataatgaaccatcatcctgttcactacatttttttaataaaactagactctggggaaaggtgccccaatggcatttattttaagaagagactgtaattctgggtctagacaaggtcctgaaggctgcctgcccaggcggtgtccgttaggaccctttttctcctcttaatataatgtcacacagccctcctgtggttcagaaaaaaggggaacaccaccagggctcaaaccctggtgggggcatctaatttgacggacctaccacctagtagtgcgtctgcttttattatcattattatgcttttctttgcttaaggaagagtggttcaatggctgaaaaaatgcaggcactaaaggctcatattaactattaataaaactgatctgctccaggttgcttctttattggatcatttgattcagttgtcaaaaactggcttcagcaaggcaacacagcggttggatggaatctatgcactctttgcagtatcaaggcttgct

SEQ ID NO: 194932 - DNA, 382 bp, Zea Mays
tgagcgcatgattagacagaaacccagggttacttctaaaaaatttcggacctctctgtaatggactaactacggtcctgtactgcgggtttaaacagagaaaacacagggactattgtgaaaagccaccgccgaagaggtatgggctgatcgtggtcgcaggatatgaagtgaacggtccagattaaattatgcaatcctctgaatcggtacgcactactgaccgccagatccagatcggagggtcggtaggatgtccacgtacacaattgatcccggacgcacgccaccgatccaagggctcggattttatttggcgcacagggatactccaattcaatctaaaccacccactggcgatcggacggccagggggcccttc

SEQ ID NO: 194933 - DNA, 287 bp, Zea Mays
ctaaaaccgcggctcatgctaaccaccgatggaactaaatcctcggcacccaccacccatttagattgagtccagtagtttcctttttcattccacgacatcccctgcacatccttgccggtggcgacttcacctccacatcctgccagcggcgacttcaactccccatcctgccagcggcgactttacctcccatttcttgccggcagcaacttcacatccccttcagcactctgtcccaagatcaggatggctccagggaggatgggatcacgatgcaaaaggga

SEQ ID NO: 194934 - DNA, 543 bp, Zea Mays
ctattgataaaattagacgggctttcctctggaagggtagaaaggaaataaatggtggttgctgccttgtggcttgggagaaggttactaggccgctgcaacttggtggtcttggcctcccaaatctgctttacaaaagctgggcactgcaagccaggtggttgtggctacagaaaaccgaccctagcaggtcctggattggtcttgatatccctgttcagccacaagtcaaggcgttagttgccatttaagtgatctcccatgtgggaaacgataatgatactctcttttggattaataggtggttgagcgggagttccgtcaaagatttagctccattggttttctcagaggtggacaagaagttaacttccactagaactgtggcccaagcccttattaatggtcagtggatcagagatatcaagttacctctcactttggttggaatgcaacaataccttctcctttgggactctattagtgaggttgttttgtctccagaaactgatcaacatgtttggaggcatgaggcatctgggc

SEQ ID NO: 194935 - DNA, 277 bp, Zea Mays
cagcttccacctatcctggactcacaatagcccagcaaggggattgggaggcatgcgtcagaggctccactgctgttgtcaacctggcaggcatgcccataagcactagatggtcacccgaggtccgttccatttgttcaaatctccagtctgcagtagatacatagatatatctgtaatctttgccacgattcgatgcatttatctccctctctatgtcgtccatcatagactacctgccttctctttcgcagattaagcaggaaatcaaacagag

SEQ ID NO: 194936 - DNA, 635 bp, Zea Mays
gttgaattgatttatgttggtaggtcaagtattagaactttgatggaagaagagatggccagcagcacacagcccttgaagcaagcacaaagcaatgtcgctgggatatgctctgaagatattgatctaaacttggctggaagtctcatggaaatctacagatctcatactgaaggccaagaaaccaggaggtcgattgagtcaggtcgcagttccatttcgactgacgaagagaagaatactgaccctcctgctcatcactatcagatcccatctagtatccagagagctctagaagatgttgctgaagcagttataagacatcaatctgcaaacaaaaaatacataaacagcggtgatgaaactaggtccagagaattcgttgatgccctacagctactgagctcaaacaaggaattgtttgtgatgcttatgcaagatccaagctctaggttgttagaatgtctccaaaacctttacatgtcactaggaagtaccaggttagactctgaagaatatgacgaaggaactgagttgcaaggtacgacagatagtctagagcagtcagcgacttctccaagtaaggtgaaaagaaggcataattctttcttgaaggaggatgggttggtcacgag

SEQ ID NO: 194937 - DNA, 658 bp, Zea Mays
cgatcgtcaacctccactcccaggtcgtcgctgtgcaaaacatccagagtctcgttcacgtcgtcctcgacctcgccaacaacaactacacccgttggtgcgatgagttccttctcgtcactggcaaatactccctggacagccacatcctcgacgacactcccgcgcctcacttccccgacttggcacgcatggactgcgttgtcagtcctggatctccggctccatctccccggaccttgctgaaatggccatggaacgcggcgccactgcccgcaccacttggctgactctcgagaaccagtttctcgggaatcgggaaactcgcgccctccacctcgacgctcagttccggcacttcgtccaaggtgatctacctgtctccgattactgtcgtcgtttcaaaaccatggcagatgccttcggtgatcttggcgaactagtctccgaccggacgttggtcctcaacgttctgcgcggcctcagcgaccgtttctccgacatcggacgtcatgttcgcctcggtcgcccctttctgacgttccacgacgtccgggccactctcctgttggaggaactcacaatggctcatcgtgcgtcttctccatccgccgccctgcttacctccaccaaacctccacaaggcgggacttcgacg

SEQ ID NO: 194938 - DNA, 419 bp, Zea Mays
ccttttggttattgcggccggggtccagtcgatcgtacaggagctgatccgcgccgcagctgctcgtcgccgctgtagctaaagctaaccctgctgcctttttgtcgtcgataggatttgtgctcgcgtgccgttgcgcttgtcgtttggcccaccacgggccatggtaactttcttggttctacgtaaatacgcacggatcaagatgcaaatctaaagctagaaggtttctctttctcggtattagtacatgctaatcttattggttaacatgaaagcttaactagtgctaatggttcccattactagatctagataaacacgacccgattaggcgattagacactacatgcagtagcagtacaactccttctagtacatcaacttgatgtttcttttcccttctcactttactctcg

SEQ ID NO: 194939 - DNA, 377 bp, Zea Mays
ctcattacctaacccagtgtgtatatttggtttctaccatttacaccatatgtataagatatttacgacacactcgtttacgcaacgaaacaaaaattcacaaaaaaggtaactgctcccgaaaataaggccatttgccattatttcataaaatctcgcgcatgcaatcccttgatttatggtgtccattactaccataaaaaatttatattccctaatcaatccacctcattaaatcccctaatcgatgcccctaatcaaatctcatgatttatagttgacgcatgtacatggggttgttaattcgaaccgcatcccagatttttacgcactataccgcagtgcataaataccttcatcgtgtagcataattagta

SEQ ID NO: 194940 - DNA, 3361 bp, Zea Mays
ctcgcctatctcatagtccttccccattccgcctctctagctggcctgtcgaggaccctcgccatcctccccaggcgcaccaccaaacggtccaaacccccagcggcggcgctaggatttgagtctcagcgcgccggcaccgccaccgccaccggcggtgatggcagggcaggagcgtaggacaatcgatctggaggagggatgggcgtttatgcagaagggtatcaccaagctgaagaacatcctcgagggcaagcccgagcctcagttcagctccgaggactacatgatgctctacacgtgcgcctccttctccccttactcctcctcgccgccaccgtctcctgcgcagcggccgcttggtttcacaccgcgatccgcctcgatccggttctgatctaggttttggtcctcttgtcgcaggacgatatacaacatgtgcacgcagaagccgccgcacgactactcgcagcagctctacgacaagtatcgggagtcgttcgaggagtatatcacctccatggtgagcctcctgttcatatctatctttcccatgtgaatgtctgtattagaacttcattgttttgtatttgcggcgttgtattaaggttagatttcctactcagagaggagtaaggcagcttggatgggagtttttttagcttttgttgacggggaacaaatcgtgctctcagagcctggggctcacatgagcacttcaaatctggtacgttctgtgagcaatcaacgttaaggtgggaggggataaatggaaaattgccatcgaatcgaaactgagttgaagggaggtaaatgaaaaattactgatcactgttgtattgctcacaaaggggctgattggtttgctgcgcgctgaaccaggctcgcgagatgcaggaagcgctagtttggttgcttggtccagctaccgagctaggctcccagcatgcaaaagtgcccactctaccaggcgccggggagacgtgagaatctgttgtttcgggcgagccagtctcgagcggtgcaagaacgagctgctttggcaagcatgcagagaagaaaatgctgctgggcccgagacatgcaggcaaccaatcgttctgtgagcaatcaacgttaaggtgggaggggataaatggaaaattgccatcgaatcgaaactgagttgaagggaggtaaatgaaaaattactgatcactgttgtattgctcacaaaggggctgattggtttgctgcgcgctgaaccaggctcgcgagatgcaggaagcgctagtttggttgcttggtccagctaccgagctaggctcccagcatgcaaaagtgcccactctaccaggcgccggggagacgtgagaatctgttgtttcgggcgagccagtctcgagcggtgcaagaacgagctgctttggcaagcatgcagagaagaaaatgctgctgggcccgagacatgcaggcaaccaatcgttgtctccaccaggcctggctgtatagatacggaaaccagtcaaagcgctactgcacctctagagcctgactcctgctttggtgtatatggcgatgtcctcatttccttctgtgtttctgctaaatgatacattgatcactagtcaggttcattcactctgtagatggacattcttttgggaaaaaatgagagttgtttgccatatatgataggtggtgaattcttatagtatatagaattttcctgatctgtttgattgtaatttgtaaatgaattaattaaaactttctaatgctgcaaatattgcagtggcagtgctctcttccccttcatctgtccatctcttgatttttagagggtaattcaatctctttaattttattgtaagcatcttgatttggtgaaacacttgatctagctacttgacgtgccttgtaacaattctgtgtccatttgtttgtacacttgtgcctgctgttctgttggctccagtagattcattagatgtcctgtgatattgctgtgtctattttcattcgctgtttgttggaacttgtagcttctgttatgggcttatcgagggtagacagcaaaccaggattatttcattcactccgtagatacaaatttctttttgggagaatgagggttgtttgtcatagatggtagaacccttttgtaataatatatacaattgtcctgatctgtttgattgtaatttgtgaatggagtaatcagaacttctttcatgctctcttccccttcttttgtgtattttaaatttctgcagcacaattcaatctctttaattttataattgtaagcatcttgattggcgaaacaattgtcccatctacttgacaaacaattttgtgcccattctttgtacattgtagctcatttcttatctttataccctttaaagcatgagtttcgtgcgtcatgcgcgaagggcgtagcgtcgatctgtttattctctccccacgtcttggctaacaactaggccgttaccttccagatgggccgtgagaaaacacctaagcgcaacataacaccaagccacacgcagcgcaacgctcctggataataccacctcgctagctgaaggagtatgagcgaccgagcgagctatagaaagggggcatgtctccttttcaactcatatctttcttggccttttggctaagacaaagtgtagtgtctgcagtttaatatctgctatgtgggccatatgtccactttaattttatttttttattggaagggtccaactttaatcttaaatttgatttttgtggggcgggtccatcacactgggttgccactggacccttgggtgtcatacaattgttgcgctataccatcaaatatgattggtgtaccgtcacacgggcattgtactagtatatcatgtagactgtagagagcacctttttgtgtttttgcaccgcctcctaatggacaggagttggacactaattgatgctatctatggcaggaagataaataatggattgcataattgaatacacatggatgctagtttcaatttgcaggagcttttctgcagcttgctaatttattgtttaatgagcatctttaatttataaaagaaacttatataccctccttgagttacaggtgtttttatgactagagattgaacccacgagttgtatgatgctttcttcattgtatttgtacgttcacttctgagagctttctcactaatttttaatttcatgcaggtactaccttcgctaagggagaaacatgatgagtttatgctgagggagctagtgcaaaggtggtcaaaccataaagtcatggttcgttggctctcgcgtttctttcattaccttgaccggtacttcatatcaaggaggtcacttaccc

SEQ ID NO: 194941 - DNA, 531 bp, Zea Mays
gccgtgtatttgggtacggtcttgtgtttctactgtatctttaatttcacattcaaataaaacttgaatagaaccacgttgatcggagattttttttgccaatttggagtaatttctttttattgcgggtgtcatattatttcaggatgcactttctacccttttctctctgtacattcgtgatattggcactagtgttgaatttggagatgcacactggctcggaaggcagggtattgcattagcactccactctatcgctgacgttttggcctctaaagatcttcctgttgtcatgacatttctcatctcacgcgccctggtcagtagtttgctttgtttatgtggatcttaacattgcagtgccacttatatttaacttttaatgcttctcatggtgaacttacaggctgatccaaacgtcgatgttcgtggtagaatgattaatgctggcatccttattattgacaggcatggaaaggaaaatgttcctttgctatttcctatttttgagagctacttgaataaaag

SEQ ID NO: 194942 - DNA, 308 bp, Zea Mays
gacggcgggcgtgccgccgtacgtgtacgtgagcttggggtggcagctcaaggaccccctcttcttctgcggcgagcaccagctcgttctcggcaaggtcaactggctgctgctgtacagtgacctctacttctccccgtcgttgtacgcggtggccgagttccaggacgagctccggcggctgttcccggccaaggagagcgtgggccacctcctgtcccggtaccttttccacccgaccaaccccgtgtggagtctgaccaccaggtactaccgctcgtacctggctaccgcaaagcggaggatcg

SEQ ID NO: 194943 - DNA, 993 bp, Zea Mays
ggatggtccagtacgcgggctggctctacctacccccttcttcaccgctgctccgtgaactgctcgcagctgtgcatgccgagggccacgaaggggtccagcgcacgctacatcgccttcgacgtgacttccatttccctaacatgaagcaggtggtccaagattatgtccgggagtgccctacctgccagcgccacaagtcagagcacctacacccggccggactcctccttcccctaccaattccgcagggagtctggacggatgtggcgctggacttcgtcgaagccctgccccgagtgcgcggcaagtccgtcatcttgacggtggtagacagattcagcaagtactgccactttattccactggcacacccctactcagcagagtccgtggctcaggcattcttcgcggagattgtacgccttcatggggtgccacagtccttggtgtcggaccgcgacgtcgtgttcacctccaagttctggaaggagatcatgcggttgatggggaccagtctccacatgacgtcggctttccaccctcagtcggacggccagtccgagtcggcaaacagggtaatcatcatgtacctgcggtgcctaacgagcgatcggcctcgccagtggctccaatggctcccatgggcggagtacgtcttcaacaccgcctaccagagctctctccgcgacacgcctttcaagatcgtctacgggcgtgagcctccgtccatccggtcctatgaaccgggggacacacgtgtcgcggcagtggctagaaccatggaggagcgcgaagagttcctcgctgatgtccgccatcgactggaacaggcacaggctgtccagaagaagtattatgaccagggacaccgcgccgtcacgtatcaggtgggcgaatgggtgctgctccgtctccgacaccgctccccggcctccctcgccactgactccaccggcaagctgaagccccggttctatgggccctaccgtg

SEQ ID NO: 194944 - DNA, 350 bp, Zea Mays
tgtaggtgagggggagttgcgaaatctttttgagggtgaggagctgaggataatgttgttcaactacagggagatgggtatcatcccgaagattgagccaatgtaaagtgtgatgccctcgttgtatgtatgtaaccgtaatttatatgaagctgcgtgccttcgttgatccggtcgtgcccgtaggtgacttgtgcgcggggaaccttttggaaaatacttcgattttgcgtacttgttatgctagtccggctgcacccgtaggcgaattttgcacggggagtcttttggagaagactttgattttgcgcacttattgtgctagtccggctgcacccgtaggcgacttt

SEQ ID NO: 194945 - DNA, 698 bp, Zea Mays
tttcacaggagtattaataacatgaccaatgttagtgttcatacctgccccactgtctgtgattatctgatctgtgcccttatatttatgctattgtacttgttctagatcgtcagcttgttcggatcagatgtgatgtcatcagtcgtagctgtgtggaggtaccagttagtgtcgacaccatagccatgaatgccatgagtggccgcaacaataatcttggtcttggaggagtatctttcattgaagtgataccaacaatctagggtaacgtgccctactttgccacatacttggcagatcttgttagtgtgctgggattgtgagcgtccattagacgaggagaaagacacacattgatggctacgaccactaggaccatgacgccctctgccccgaccatggccacgacacagttgttgctttcgtgaccttgaccagcaacattagcagaagcttgatgacctccatgaagtagatccatactgacattgaagctgggaggtggctacagtcacggtgacctgctcaacatgggccaccagagttgagactaccagattgtactcttcatctagtcccaccaggatgtacgagaagagttcttcatctatgtttttctttgtagatgtcatctcatatacaagaggcttcattttggtaacatattctagcatagtcatgccacctagggggtc

SEQ ID NO: 194946 - DNA, 350 bp, Zea Mays
ccaggattttgattgggaggttctccaggtcagtaacgcaactttgaagcaggtcgtaggtgcgttgtttgactggatgtggggtcctcatggtcgctctgtcgtcagggacacagctggccgagcgatggaacatgtgaagtcctttttgttttcctggtcgaggtggaatgttgtgttgtgcttgttgtttctgacatgttattctttttgttttaggcggtaagcgatgaggaggttgaggacttcgaaggattggaggattctttggtcactatggacgtctgcgttgagattggtgcagaagagtagtcttcacatgagggaagtggtgtcagagaacctagtgt

SEQ ID NO: 194947 - DNA, 805 bp, Zea Mays
gtgaggttcccatggacgatgtcgtcttgcggcacgaagccaatgatcttcttgtaagagcggatgttgacgtcctttccattaacgaggacagagcccgtcatcttgtagccgttgagcttcccggtgacggcgttgaggaacgtggtcttgccggcgcctgacgggcccatgacagcagtcacacgccccggccggagctcgccgttgatggacctcagcagcttcttcttcttattattcccgagcatcaacgtcaggtccctgaactcgaccttgatcaacggcctcgttatctccctctgctgatccttggccatggcaaccaccccggtgaaggtcaggttcctgctctcctgctgctgctggaacttctccttctcgatctcgccgtacgcgtacttgaacacctgtgtatgggtggacctgtgctttcccttgggcgcaggcttgtcctccttcgtgtccaccacgacgacctctccgccgtcgctgacgtcgacaacaaccgacggcatcaccacctccgtgatctcgctcctgctctcggacgcaaacacggcagagtctgacatctcctgcgtcatcagcggcgcctcctgcaccctgcggctggagctgtgcgggtccaccggctgccgaaacgacacccgtctcgagaacgtgcgcgagagatggccctgcatgccgctcacatgcctcctcgcaaactgtttcgccgccctccacccctcctgcgccttcagctgctgccgggccagctggatggcgttctccctcgacctcgctttcctccgctcgcgga

SEQ ID NO: 194948 - DNA, 494 bp, Zea Mays
gtttagagaatgctagtttgcggggaggatgtatcgttaagacataagtgtcgaagttcatttatattagtggtcgcgccacattgattgaagtgtctcgagtgcacgccaccatatggttgtatgcgagacaaggttatgcacatgatgagtttagtaaaaaaaatccatcggtgtctctagtgttaagttgaggtttatttgcgcgtggaaagtaataatatgtctaatacttagaactcttagtcgttagtagaaattgtttgggcttatgtagagaggtgatgacatgccgtaagtagtcatcacttcctctataattataagtcgagtctatacgcgttaggcgttccttaaattgtgatttgcaaataagtgtattttgtgtagtgtggatcgattgtgagtgcatgtgtcgcaagaaaagaattagtgcgcatataggcgatgaatgggtgtgatgaaatgatgacatgctttcatagtcatcatgt

SEQ ID NO: 194949 - DNA, 460 bp, Zea Mays
tgctgcctggtggtggttgagctcgatggctggtcaccggtgcccgtggagacgagctcgacaaccggactgctagcacccttcgcgtcatgcgtccaacacggatccaggatctggcaacctcttcaccccctgcttgtgccctaccacactccacagattcgtcgcgggcccatgcctgccgccctcccctcatcggcggctcggctccaatccacgacggtcgacagcggctccacctccagcttccaccgccagttcgccatagtgccgcgccggcctcccctccctggtctaaggccgccaccccgtcgctagaacactgaagctctagatgagatctcgtttctctttcagatttcaaaaaactgaagtgctagagtgatgagttcctgcttgcatcagcctcgtttctctttcagcatcagcctcgaggacctaggccgggagcgcgacgttg

SEQ ID NO: 194950 - DNA, 497 bp, Zea Mays
ctagattgcaaagggatccaaaacaaagtcctaggcatgagtgcttgcaactctcttcgggtcattgataattgcaatcgaggctgaaccaataatcgcaaaataaaagtcacgagcatgaagttcggacatttatgggcactactgaaataatgtgtggtgaatgtgatggttcaagtggtcttgtgagagacccatcccacatatgtgttgaataaacactgttccgctatgtaatatatctggcaaatggcatgaattaaaatatgcagttaataggattctgaagatccgtcatgagatcctaggaggacccatatctttgaattataaatatgcaacatataaatttcgtaccgaataatacattcctgacgaatgaacactctcctatgtagagagaatatctcctagatgagattatagttccttaatggaacctttccagaagaaataaagttcgtgttaaacaccaaagtttgataatctctaaaaag

SEQ ID NO: 194951 - DNA, 414 bp, Zea Mays
gaggggcctatgccacagacaaggtttgttctgaagaaagctctagaatttggacatgctgttgttgtagttgtaaacaagatcgacagacctactgctcgtcctgagtttgtggtgaattcaacatttgaactatttattgaattaaatgcaactgatgaacaggtaaacagttatggtatcctactattcatataatttgttttcagtttatcaacacacggcttatcctaatcctcatgttcatgttctgtttcaacatgccagtgtgatttccaaacagtctatgcaagtggaattaaaggaaaggccagtctatctcctgacaatttagctgatgacctaggacccctttttgaggcaattcttagatgcataccagagccacgcgttgagaaagatggtgccctgcaa

SEQ ID NO: 194952 - DNA, 354 bp, Zea Mays
attgatttggggttgttggcggtattgcggctgctggtttcttgtccaggatcgctgttggcttgcggagtgtcctttggcttccgctgtgtttctagctttctgtagtgcaactcctcagagcatgcaattcttttgaagagctggtacaactcttggagtgacgggtgggtccttggtgcagtgactgtataagtgtcgtgctcgaaggtcgctgatggcgtaatagactgcgatgtggtcttcgatcgatggcagttgtgacttgagcaggaggaatttattgtagtaatctcaaagactttctttctcttgctgcttgcagaggcaattatgcgagggcattggtgtctg

SEQ ID NO: 194953 - DNA, 590 bp, Zea Mays
ccctccctctctctgcggttcagtttaggtcgtcgtcgttcatcctctcttgcttgttgttactgatttcagttaccaaccaacccgtattactccaactcttgggtttgatgatgtacatcctctctttgctcatgtagcttagaactcggtttacaacatctcaaacaaaggaatccgtgctagagggtgtcgggcgcacgctcaaaggccgcgacgacctccgccgcgtctacaacgttgtgctccgcgcctccgccagaccgatttcctttagctttatgttaggtgtcatcagtggtccaattgggataaacctaactaaccatcttcttaatccggcttttaattgggagggcccacactgatctcggttggaacccaactaaccatcttcttaatcagatgtctgttgttcctctatagggctatggaggtgacgtcgctaatagtgactacactccatcaacaagtcaacacatcgtaggacgcgtcaacaacaacaacaatgaatgtatgttttcctatttctctcagtacaacatatctattcgtcattaaggatttacagttattctataggaaatcaa

SEQ ID NO: 194954 - DNA, 353 bp, Zea Mays
caatgagtggtaatggggatgcaacttatcctgccaaaagtaatgcacagcagcctagcagttgtgctcctgacgtgagaaaacaatcaaaagcaagcatcacagtttatcagcctgacatgagtgtctatttaacttctgacatggtcagttcttgtgagggatcatatgtttctgccggtgagccactgcaaaggagcttgtcatctggaagaactattgggaaagtaactgtggtgaataaaaggccttcttacccatcaagtaaggtggtctcagcacaaaagtcacaggataaggtgtctacatcatatcaaaatgatgcccatgagaagaatccttgcaacaaaaat

SEQ ID NO: 194955 - DNA, 306 bp, Zea Mays
cagtagcttgcccacccaatgatgttgagggatggttgccagacgttggtcaaggaggaacttgaggttgtagtggtcggtgcggacgcggaaatgcctgccccacaggtatggccgccaatggcgaacagcctgtacgaggccaatgagttccctctcgtatgccgcaagggaagcatgttgaggggccaccgacctaatgtagaatgccaggggtctcttgtattgtagcaacacggttctaaacttgtaggaggaggtgtcgcactcgacgatgaagatcttgatgaagtccgacaaggccag

SEQ ID NO: 194956 - DNA, 375 bp, Zea Mays
tggactggagggcacacctttgttttccctatgagagtgttggacattggagtatatgattccattttgggatttgactggttgagggcccatagtcctatgaactgtgactgggataacaagaccttggagttttaccatcagggacagagagtccaaatacaaggagactgtgctaaggttacagaagtttctcaagtgcatgtttttcaggtgcagaaatggttaaaagggaatgaggtctgggcttttgtgttgctggaacaggtggtaccaaagaaagaagaggtgaaggggcagttagcagcactactcacagaatttcaggatttattcgctcagcctgcagccttacctcccaaaagggtgtttgac

SEQ ID NO: 194957 - DNA, 393 bp, Zea Mays
tagaaacaagggcctcaaggtctccgtcgacctcggttcttcatctcaatcctctgaggtaccttcccagcatgattgctctcttatgctgggaaatcctcatacctccaatattttccctggacctgtcaaatttccatccttacaaaatctcttagattgtgatggaatctacccggaaattgctgcttccaccttgcagaaggtggctgttgatagatgcggtgtgccccctgtggaggcggccgtggaggtgctgcatcgtccaggaccaggtgaggaggacaacacccttgctgcaaggcttctcgagtgatcatgatgaacaaaagacttttgaagtgtgttgtgggaaggacaatttccttcttttgtgttcggaacccgttgctg

SEQ ID NO: 194958 - DNA, 610 bp, Zea Mays
tgctattgcacgttcccatgctgctgagctgatctttgtttgtgtgctaagaattgcaggaggaagcacacgtattatcttcaatatggttcgatctttgagcgtgtcatgccaaactgatgctaagcagcaactgcttgatgaaaaggctggtggagcaatagcagagccaacattgacatggtagctgtcaacctgatcaaaatttggacctgagaaaatgtgcactcctccacggaggaaagcaacagcaacttcaccaccatgagcagaataaactatttgagctagttgtcgaacatcatttggaagatcgtaagggtcaaagctgagtctgttcgccctgtcaacactgcactcagaggagctccgttcatctgatgtcgttggcatcggaacatatgtttgaggatttttaagatcctccgttggtggaatgcttttattaactctagtggaccaaacagtttgcatgggaggctgcccacctaagctagtagggcttccaaatattggatgaagaacaacaggttggcacgaagattcccagcattgcaccctccatccggtgatagaaggtccttcatcagggtcataaggagacatgtac

SEQ ID NO: 194959 - DNA, 406 bp, Zea Mays
cccaactctgttcctcaggttctatatccatgtccctggccatgcaccgcaacacctcatgtgttgtctccaacttttgcgccccttggaccctctcctcctcggccttccatgcacccaccgcagccctgcccgcttttcccagcagctgttgttgaactccttccacacccatcaccttcttctctgtcagcagctccaacttcgccatcaactccttccaccgatccccttcctccttcgactttcccgccatagactccagcatgcaccaaaatacacgattcccaaacagagaaaaatcgaacaccaactcacagtgcacgcgaagcccagactgcaggaaggcactcagaccttccgtcgaacaggtcgtgagcgctgctccctaccgcggccacacgcc

SEQ ID NO: 194960 - DNA, 442 bp, Zea Mays
caaattccatctagcagaagaagcactgacaacacaactcactgccaaaatcgaatcctccctcaacacagcagccaaatcagcagagggaccatcaggagaataatcaggaaccacaacatcacacaaggccagaacaccaggcgccgccaacatctcaaccgcagcacacgggagggtaggggcatcaactggttctgccaacgaatccgaagagacagacgccgccacagcatcactgttatccatcgacgcatccaaaagccccacatcatcagagggtccaacacgcgtcgacgaggaatgaagacgagggcccagccgcgagtgcaccgaaacccgaggcaatgaggcctgatcacccagtctccgcacccaccgagcccgacgactcggccccggctcatcatcagagggatccgatggaggtggctgcagctgc

SEQ ID NO: 194961 - DNA, 477 bp, Zea Mays
ttatcatagacatcagctttcgatgaaggcgacaagcaaccaaaggtgctatcgccatcgtcgccggattccattgccaaagcattggacaacctcacctagtagatggcatctctctgggcacgcctagaggccatggatatctgaccgtcggtgaccaccaccaccatgccgctagtgttcccttgtggcttgctgggctatgggacgcgggacggcagtcgtctccatgccagattcaaagatgaaggattgtgtcaatgtagctgagtaagaagagtgcccactagttgtcggtgatggtgtggctgtaggctgctgcatggcctcctagcatgtcggtaggtgcaggagatgtgcgatctgcacctgatttagccccacaccccttcgcagcttctccaagttgcgcatcactgcgccgcattgggagggcatgcggttccacatgtgggaggcaggcaggttctttccccc

SEQ ID NO: 194962 - DNA, 320 bp, Zea Mays
cacggaactggccttcatgggatggcatgaatgctccgtttactacgcaacatgaacaagcaaacatacaaaccagcaagtgtatcaataaatattcaatatagtggtcacgaatggtggtggatgggtgactatagttttgagtagagtttgtgttgacagagtagagatgcttacctgaagggtatattgaaggtaaactaacactagaactgtagtggcatagcggggtaccgagtgggtgggggtttgccttggctttggtgccgagggagtggggcggtagagggtaactctttgagtgtatttatagctgggtg

SEQ ID NO: 194963 - DNA, 931 bp, Zea Mays
aaagaagtggattggatgagcaaggtttaaagattgcggagaatcaagaaactagtcaaaagaacaggcgtaagcttgctgagaacacacgggatttcaaaaaggcatcatcagatgagaaactcagtttactcaattctttgctgaagagttatcaagaggaagttgataacctcacaaagagagcaaagtttggagaaaatgcatttctcaacatctatcagaagctctatgaagctcctgatccatatccagctcttgcttcaatgactgtatgttctttcaattttttcttctgttgtatacttgcattcttctaattcaattctcttgtactcccaatcacaaatgcacagtgggaagtccttactctttcaaggctgaaagattgcacatcatcatgaacatgaagcaacagatatcatcttattataatttacctaacatattaaatactttatatgatcaaaattcttgtatagcacctattttgtactaaatcacccagctgtattcccacactcgaaaaatgcaaggtttttttgtgcaacaaatgatgcggatttaacattgagaaatataaatgtatcacggtaagttatcaaaatgtaaaaaaaaacatgatagtagtttgtgaaaaatatgacgtggtctgttttcctccgtagcatcatgaattttcaacttcactttttttgcttgatcttgaatcagtttatctaacaagaggcttgtctgaatatgataggtgggtttaataaacaattctagtgttaatgatctatttcatgcaggatcaagaccagaaattgtctgaactggagactgagaaccgtaagatgaaactagagcttgaagaataccgtgctgaagctgcacacttgaagaaccagcaggcaacaattaggcgacttgaagagcgtaatcgcca

SEQ ID NO: 194964 - DNA, 372 bp, Zea Mays
gctcaaccttttcggagtcgcacgccattgagcaaccaaggcagctgcgtgtctggtagcctatttaataatccctttttgtttgtggttctgcctaggatggtcacctggatggatatatgacaaccaggacagttccactcacaataggatgagtagattgggcagaaagagaagggagggcctgatttctatgattgagcaaaggagatgctgagctgagcccctttcgtatggtttatgcagcggtgctttatggctctgttttttgtttcataccgcgcttgagtggctaagattgttctgctttccattacagagcttctgcactctaccatcttctgagctgatgatacctgggatattctttga

SEQ ID NO: 194965 - DNA, 292 bp, Zea Mays
gttggaagggtatatatagcatgttatgggccaaggcccattacaaggaaggtatacacagtaacgtaaataacactctaacaccccctccacgcagtctcaactctatcctgtacagatgttgagattgcagcgaaactcggcgaaaacactcgacaacagctccttggtgaagatgtcggcaaactgcaacgtggtggggaggctgagaatctgaacgtcaccagcggcgactcgctcgcggacgaagtacaggtcgatctgcacgtgcttcgtgtgctaatgctgcacg

SEQ ID NO: 194966 - DNA, 311 bp, Zea Mays
gttttgtttcgagattcggttgttccttgcgttgacgggccggggctggctcctcctggatctggggctcaggcgcgtaggcttgggcgttagtagatttgattcagtcggtatgatgtcgttaatcgtttgttttagtatgtgcaaatgatactggggttgtggggataggattgcgcatgtttgccatgtttagttgcagaaatatccggatctgtttcttgcgttcaatgggctgggtctcttcctgtttagataattgtaagaaatggacgggtgttcataatcgacagagatccgattgcttctcg

SEQ ID NO: 194967 - DNA, 819 bp, Zea Mays
tgattatgtgtctaagttttgtgagtctgatgattctgggagttcgattgtgtggacggaggggtcttcggaagaggacttggattattttgcagcgttggatgtggctgcggcagagactcctccacgtgtgatgggcgctgaggttcatcctggtgcgagtgctgggtgtaggcggcgaagagcggtggcgaaacggggagtgggtgaattgtcacgaggtgaaaggcgtcatcgtggtgagatggagggtggtcgtcttcgtgtggatgtgactggcaaacgggaattgttgtcctcgccggctggggcgtgtgtgggtgagggggagctgcgaagtctgtttgcgggtgaggaattgaggataatgttgttcaactatagggagatggatataatcccgaaggttgagccgatgtaatgtgtgatgccctcgctgtatgtatgtaactataatttgtatggtaaggctgcgtgccttcgctgatccggccacgcccgtaggcggcctgtgcacttgatcttgcgcatttattgagttggtccggctgcacccgtagtcgatttttgcacggaggatccgattgcacccttaggcgacttttgcacggatggtcttttgaggaagacttcgattttgtgcatttgttgtgcgggtccggctgcacccttaggcgacctttgcacggatagtcttttcaggaagacttcgattttgcgcacttgttgtgctagtccggctgcattcttaggcgacttttgcacggatggtcttttgaggaagacttcgattttgcgcacttgttgtgctagtccggc

SEQ ID NO: 194968 - DNA, 1366 bp, Zea Mays
agttagcgatgctaatagtgctgtattgagccatgatggtcacaacttacaggcctcaagagcagatggcatgaagagtttaacgtctactggcaatttttctctggagtcctctgaaacatttgatattgataacttcttggatcaattgggaccacggtacaaggattggtctggtcgtggccctatccctgttgatgccgacttgcttcctggtgtagtacatggctacaaaccaccatttagagtacttccctacaagattaaaagcactcttagagataaggaaatgacaactctgcgtagacttgcaaggcaaactgctcctcatttcgctctaggtattggagtttgtatctagattgcatgctttgattaattactactcaatcttcaattcatttcaacccgttgtcaatgtacttgtcggtggacagggagaaacagagaacaccaaggcttagctgctgctatggttaaattatgggagaaaagtgctattgcaaagattgccatcaagagagggattccaaacacatgcaatgacagaatggcagaagaaatcaaggtaaagctatacaaaattcctgtatatgttacatttatctgttagctcaccctcacacttatggttaagtctgtggaatctgataaccatacgtctagacccaatctagaatatgaggttagcttgcttaattcatataagtttgctttgtatgtatctattcttctcttgctctatatcttcgggtgatacaatgttcttcacattacctcctgggatttgtctgcttattatatgtttagccgtgaaagtctggttgttgaggatgcaacaaggcacaattttgcaatgggtgctgtagatcatccattgatagatcttttgttgtgtatctttagattggttcttctgaatgattattaactgctttggttggtcattgaattcttgctcgctgcatatcatacttgctgagtgttttgagtctgtgtaacaaaacacttgcagaaattgacaggaggagtgctcttgtcaaggaacaaggagttcattgtcttctacaggggcaatgatttcatagctcctaaagtaaggcaggtcttggtggagaagcaagaacaagccattactcaacaggatgaggaagagctggctcggcttaaagcatcagcctcaattattactatccccaaggatataaagggtcctctagttgctggtactctggcagaaactacagaagcaaaatctagatggggaaagtcagttaatgataagcagagggaagaggagatgaagcatttgtctttgttgaagcatacctctcttttgaagaacttgaagagaaaactgattttg

SEQ ID NO: 194969 - DNA, 621 bp, Zea Mays
gtgtatgattgtgtaaaatttcatcgtagttgcctttactctgcaccacaacagatttcacagcctaataaaattgagaacatatctggtgcagttgacctttgatcatcacaattttggggaaatcatttaagcttgcttttgagatgtctggattcatgcaacctgttaacacatgggagagtttaataacatcaatctggtctttaaatggacacctgaactttgtttcagtgtttaagttgtccgtgcgaattgcttgattgtagctcttagccacttaacaaaaagcgagttgcataggttttatcgactgttctagtttggatgccaatgattttgcatgcgtcatttcaatatacattcttcactcagttgggctttgcatatggttttatccattgtcctagttttggtgccaatgatttttgcatgcgtcattccagtatgtattcctcacccagtttggctatttctgagtttgatgcaagttgattctctaagacctcctccaacaattcccccttccatatccccttattcgtgcttcctattcatatttaaatacctccccctcaaatactctccccattatttcacttcctcttcaaccgttcccac

SEQ ID NO: 194970 - DNA, 273 bp, Zea Mays
tcaggatatcgaggagagaagcatgggatcctattagtgccttcttcggttgcgaagggtttgagggagattgaataggagaataagataggatttaatcccctctaatccgtgtttaaccgaataagccctagcttagataacgtggtctgttaccagcccttctaagcgaggatgacttcaactgggagcaggggcggatttgggccctgggccacctgggccatggcccagggcgcagcgcaaaacccctcttatatatagacctttttt

SEQ ID NO: 194971 - DNA, 290 bp, Zea Mays
gagaattttgaaaggtgagcttcatccagtattttctttcggagctcagggtccttgggaacaaccaatcgatccccaaaccataaaattcccttactgtcctgacggaagcacttgtatttttctgccttctgcttgagcatgtctttgataacctgaacacctttatccccaatctgtgcctggactatttgctcttgcaatgtgggctccaccgagatataacttaattcaccggaaggaacaacttccaggttcagcttacacaactcatcacatagggtggtaac

SEQ ID NO: 194972 - DNA, 306 bp, Zea Mays
tagatgttatttactgtctagtcattgcaccgttgccagtcaaaccgatgtgattaaatacatgttgcaatacccgattatgagtgataggattggtaaatgggcttatgcacttatagagtatgacttggcctaagaaccattgaaatctatgaaaggtcaggtcgtagcagattttattgtagaacatcggatcaatgatactcataaactagacatatcatacctcactgttactccctggactttatattttgatggatcagtttgcaatgaagggcaaggaattggcatcgtgcttgtttc

SEQ ID NO: 194973 - DNA, 530 bp, Zea Mays
ggggctgagaaagccgatgtgctgtggcggatgatgccttgttggagcatggccttacactgggcttcaagttcatctttctggagctgtggatatctgtaaggtcgtactgctactggtgttgttcctgggaggagatgaatccggtgatcacagcacctagatgggggaaggccactaggtgtctcaaacactttgtgaagctgctgtagcagacattccatcataggtttgggctctgccttgagtgaccggactgcaggtctcatggaaatgtcccagcgctgcgaacctagtcccttccagagaatacgttgtcctctcctccagaatgccatacatagatcttcaagatcccaaagaatgggccccaaagtgcgcaaaaatgtgatacccaatataatgtcaaaggaatctagaggaatggcatatgcgtccatcaagaactcttcaccgggaatggacataccaataatgtcggcagtgaatcttgtcgccatttgctactgtggcctggaaaccttggttgg

SEQ ID NO: 194974 - DNA, 329 bp, Zea Mays
ggggtccacaatcttttagacagattaggaacaagtttggtcactcgttggaaacaattagccgcaaatttagtgaagtgcttaacgcaatttatatgatgtcttcggacgtcatcaagcctaaggacacacatttcaatgagattcatcctaggccgcgagagagtagattttggtcacacttcaaggattgcataggtgcaatagatggaagccactttcccgcttctgtcccggcctctgagcaaccgaagtatattggtcgacacggttatgcatcgcaaaatgtcatggtcgtttgtgacttcgatatgaggttcacatttttc

SEQ ID NO: 194975 - DNA, 897 bp, Zea Mays
atggctgaggtaggcgacctatggtgcctcaatggagcactttgagcacttcaggtggaggtcgtgtgtgtggaaggcatcaaggatgagacaaacgtgttgcaggtgctcaaaccacaatgaactgtagatcaaaatatcatcgaagaagacaagcacgaacctacaaaggagggtcataggattgtcgttcatgagcacatggaatgtggacgatgcgttagagaggctaaagggtatgatgaggaattcgatgtggtcgtggtgggcatagaacactgtcttatcaatatcattgggatgcatccacacttggtgatagctggaccacaagtctagcttggtaaagtacttagcgcatggagctcatcgaccacagagatggagaacttgtccttagacgtcttgttgtttagcatgtggtagttgatgcaaaaccttttggagctctctactttcttgactagcagcatcggtgccgagaacaaagtgcttggctgaatgatgccttgctccagcatggctgcgcactgtatctcaagcttgtccttctatagttgtgggtagcaataagggcagacgcccaccaacgatgtacctggcagcaagtggatcaagtgatcatagggacgcgcaggcgcctgtgaggctcgtcgaaaactgcacagtactattagaggaggcgagtctaacaacggttggtggtggtcaccggtgatggagcagagcaccggttgtggtgtgtcgtcgcgaggggagcctatgcccttctagaggacgcgttgatcacccctccagaataccatgtagaggacctcgaaatcccataggatgggccccaagctctagaggtagtcgatgtccaagacgaggttgaacccatctaggtggatgtcg

SEQ ID NO: 194976 - DNA, 419 bp, Zea Mays
ggtgctattatgtcgattttgttgcatggcgaataattgtctttgctggtatggcaaagcgatgtttcgctttaatagtcatcgccttctctgagtagtgagtggataaatgtcatgattattgattggaggttctacaagagtgctatcgttgtataaaatttatcggaagcaagtagcattcataagtcggtccttgttgaaattgaagaacaatctgataagatatgcacatacgcgctttaggtgcttcagtagtaaaatgtagtcttatggagttttatgccatgtgttaacgctcttcatgttagatctcctaaaatgtggtgttttaggtgacttgtgtgttatccagtttaagttgagaaatggttaagaaaagctaattaatctgctcctacccatgttttgagttacaa

SEQ ID NO: 194977 - DNA, 555 bp, Zea Mays
gaccatcaaaacagagcccaccttatccatccatctctcctcccagccacacgcaccagttcgcagaactccatcaccgcacgactcttcgtcccttctccactgccacgctactgtctcttccttctccgtcgcggccagcctcatcccttccgtctgactgtcgctgcctctgccgctgccagcctcctctcaaccatgcctatcatatccgctgcattgcagctgcatttcccatctccatcaccgcccatagactgcctttgctgctcgacgtccacatctccctggcacccaccatacatgcctcctcccccgccgccacccactgttccaaccttctcccatgccgctcagcatccggatctgcacataagggcaccagggatagcatgtccaaccaccgtggccgacaggagccacctagataacacctacccccctaggctccacggtaccccaacacatagcacataagcgtgcctaggtggcaggggaatgacaccttttggaacaaggagtatacactaactgaataatctttctctgtttcag

SEQ ID NO: 194978 - DNA, 557 bp, Zea Mays
cgggaggctacagcttttctgctggatgttctgaagccaaacttgccggatcatgcttttcttcaaaccaaggttagtatttgattgttcatttcaatatgaacatttgccttagacctgcatgctgcttaactactcaatgtcttctgcttggattgtcttgtaggttttggagatcaacttagtgacttacccaaatgttgcagatgccattcttgcgaatggtatgttcagtcattatgaccgtcctcgtattgctcagctctgtgaaaaggctggattatacttgcgtgccctccaggtcggtaacctttgcattgttttggctgatctcttctctttaatctctgtgttaaaccaatatcgtattttctgatgcagcattattcagagttgcctgatatcaagcgtgtcattgtaaatactcatgccattgagccccaggtttgtggtgttcagttatgttcttgaaatgtatctgttgttttcttgtttattaacaacttccttgcacaggcacttgttgagttctttggcaccctttcaagggagtgggc

SEQ ID NO: 194979 - DNA, 289 bp, Zea Mays
ctctgatctgaagatggtgtatccgtggccgttgatccggtttgggcggccgggatcgcattttgcgtaccgattcgctctacgggatctgtaacgtcgatatcggattcaacgagaacgatgtgatcgggtctagatagaatccagagcgttggtgatcgatccaatggctgttgaagcatactggttcgatctgtgttagatataatcggggccgtagattgtggatcgggcggactgaatcacccgatgacccttcactgtggtaactttgttaaagagccctcgg

SEQ ID NO: 194980 - DNA, 363 bp, Zea Mays
gttggcggccgtgaccctggccacatgtagatggatcctgtccagggattgtagtagttgtggccacctgggggagtggaagtgtggctggaaccaccgcggttgccaccggaggaccgaccaccgcgcttgccccgcttgccacggtgctgaaaggaaccgccgccactgccacgcccaccagtctgctgctggtgattgggtgaaggtgggcgcggctgggacgactgggatccagtggagctgccggtgttggacagggcagcgagggcagcggccggagcagcttttgccatcgtgagttcctcaagagccaggtcgtcgcggacctgcagaaaactaggaaggggattggtgcggcgc

SEQ ID NO: 194981 - DNA, 384 bp, Zea Mays
aaggggtattttgtcccctgaaggatcaaagaacctttgtttcatccccgaaaatcaggatctcgcctcagggaaagtatattgctacgttggatttgactggttttgtaaactttttttcacttgatggtgacttgcgcactgttccacttcaaactcttggaaaggctagacacctaattgatgttaaggacatcagttggtggacagataatgttcttatgttggtaagaaaagatggtagcattagcatgtacagcatcactgaagacaagatagtttccaatgatgacccggttttatctacaccaatattggagaaggcaaaggctactgaaggacatgcttttgttttgcaatctaggagatatggaacaaacactc

SEQ ID NO: 194982 - DNA, 810 bp, Zea Mays
catcgttctcaggaagtaatccaacggctgggactacaccccagctcctttataaacaggccacctccccatcctttcgacgatatcatgtcacctggccgctagctagggtttggtctttacggccgccgccgcttctgcagacgtcccgtgccctttgctgtttcagcgttctttcttgtagtttcatgaagcatcttggttggtttgtttcttgagtgtctcttccttttctcccctttgctcctctttgtgcagttttgttcagagagacgatgttttcctcttttttgtcgtccttaagaatttatttctctcttctgttgcgagctctgatgaggactgtgatgaaaaacacaatcaaaacacaccatctttcgggactgattggctcgatacgagccatgctgccaactctgcaattctgacgtccccattccagcccgcagattttcttttgcatttccacgcttttattcatgcgtctgtatgctgcatcgtaaaaaaattgatctgaaatactttgacagtggcctgtgacgaaactcagcaatcaaaaacaccatctttcggggctgattggcgcgagccatgctgtcacactgcaaagaattctgaggccaaacagagtataaccacttttgagtctgataccgcattggccatattttttttttcaggaaaatggtaacagcaaatcagaccagaaagacttcttggttcttaggcgtttcaaaatattgtagcctagtattttcatggtattgctattttttgaacaaaccactgaacggtacccgtaaaaactgc

SEQ ID NO: 194983 - DNA, 610 bp, Zea Mays
ggaaagctggagcctgtcgactgccaatctttagcacatgaattacttgagacaaacaagtgttacttcttagactgtggtgctgaattgtatgtttggatgggtagaattacatccctgatggagagaaagggtgctagtgaagctgctgaggtaacatttgttcagctagttacttatgctatttcattgtattcttagtgctacactattgaaaatgctgatgagtcttgctgagacttgctgatggactcattgattttgtaacatggcgtaggctgtctccttcagtttttacctttaaggctgtcttttggatctatattcctctatcttttagaggcttagttacttgttcaggctaattagaaatatttagagatattgcatattttcagaatgacttctttttgttgactatgttgttgtgatgtttattatttatttgtttaatactttaattgcctatgtagaaattgctctctgattcaaaccgaacaagaacacatataatcaaagtgattgaagggtttgagactgttacgttcaagtcaaaatttaaggagtggccacagacacctgagttgaagttgtcatcggaggatggaag

SEQ ID NO: 194984 - DNA, 282 bp, Zea Mays
ggtgtgagtgagtaggtaagcacaggaaatgctggcggaacctcaacaacctcctccaattttgtccagtttgtaaaggtaatcatgttctcattgaaaacaggcttgtacaaattgttcgaggctctgacccggaagtatgtgatgttgtagacgactccttcttttatcagaggcttgaacttttgtatgactggtgggaatattgcagcatggataccgtttccctgcacaaagcagcgatggaggaaacaacatcataataacaattaatctcataac

SEQ ID NO: 194985 - DNA, 287 bp, Zea Mays
gccggattggggcaactccgggcagcatccaccgctgtgtgggcggcgctgccgtcggcgtggtcggatgggagaagattgcctcggggccgtccgatctggtacgaacgacaaagattagatcgtagtgttaccccttcgctaaatccatcctgaacgctggatcgtgatcggagggtggaaatcagatcgcgtagactttaaacctaggccttagatctcggatccgagggccttggctgcgcaacggtttggatctaatctgatccgtggatgcatgatccaac

SEQ ID NO: 194986 - DNA, 1101 bp, Zea Mays
ttagggaggccgagctccggaggcaggtacgtgtccctttcgtcctgtttccttcttcccgccgcgtgctagtttggtttacgttgcttcttgcttgctcgtagttgccagttgggttgcttcggcgtgaactgtgaagtcgaaataattcgtagcggtcacgataattacttgatcgctttttactggtgcggtgaggcgaggccagggtagttgttctccgcccgtttctgaagctgttctttttttttttctggatttctcctgcgatttcattggccattaattccaaattggagttccttttggcgagacaaaacctgttttactcttttcatgtgcgaatttgttggcaagtaagggtgtaggaacgaggaattgggaggtgcagactgcagagtgtgtggattgtggaaggtttgggaaaattggatgagcaccgttaaaggatctctggtttagaaaatactactgaaagatttagttgtagaaaactagcacctgaaggttgctccgttgtttcgttttaccatccacgttgacttgtccggaaaaaaattggttggagcaacacaagcaccgaccgcgtggattggcttagaagtaacttgacacacatgtacctctgcaaaatttggtgaccaaaaacatggttggagctttttgttgcttaatgtgaattgtgatttgctagtcgatgttttgttaaatttgctctaaaccgtttaatgaggagtctcttgatgggtctctaggggcctaagttaaaaaaattaagcccgtctcttcacggactttcgtagtctttcgtagtccgatggttcttgtcgtagtccaatggttcttgagagttgtcgtgtttactgtttgtttgattcattttgggagtaaagtgtcataggaaacaactattggagtcgaattggactgattgcagtataggataacttgttgacttttcgaatgttgtttttcagcaattccgtgaatggttggcctgcaaagcaaggaagaagccacggagcccgtcgtggtcctctcaagaagaagaccatgggcagcgccttgaagcgaagcttctggctgctgagcataaaaggc

SEQ ID NO: 194987 - DNA, 456 bp, Zea Mays
gaaggtgagatactgaagagcgttgacaggtaggcagtgggatcgctgacaggggtgccgttctcggagaccttggcctgcatgtccatcagggtcacacatagcttgcaatctagcatgtcggtgtgctctagggtatctagagtgtattggcgctgctgaagaaatgggcaaacactcaacaatattcccctagaaagtggtgatgagtacccaaatcctttgtcctgaactcatgctgaagagttgtaatgatcaggtgcaggaggcttgaacaagaggcaatgagcacaatgacatcaacatacaaaaggaggtacaatgtcactgtcatgctagtagatgaacaaagatatgtatgacttaacttcaacaaatcccactaagagcaaatatgtggcaaacctgctgtgccaacctcggaaggcctgcttcagaccatagaggggcttgttg

SEQ ID NO: 194988 - DNA, 644 bp, Zea Mays
caggcgtggcatttgctccaccaaaacctactttcatcaatcacaatgagatagcaaagaatgttctacaatttcttcaccaacctgcaaaccatcctagctggactccaccatcaactgagtacatgcattctcgtttgtgctgtcaaatatgcaaagttgatatcattggtacagacaatttacttgtttgtgatgcttgcgagaggggagtacacttgaaatgccttcatcagtatggcaataagggcgtccccaaagctgagtggcattgttctgcatgcctgactcagagtaagggaaaacccttgccaccaaaatatggcaaggttacaaggactgtagttgcatcaaagactgctccacctggtggtggagcacagctttctttgcaggaatcagcagaaaacatggctgcaaaggaaaatcaccaaaagttggctgcaaatggaaatcttatgaagccattctccattcatggtggcagcacagtacccgacagtaatgtattggcactgagtgctgtcatggctggttcacaatcacaattagtttctaccttgagaccatcaatagtcgttaaagctgaaacaccctctaatggaaaggaaggaactgggcaaccatgcaatactgcaatacaa

SEQ ID NO: 194989 - DNA, 1994 bp, Zea Mays
gttttcatcagttgtcgtcgactcatccaagcaggacccgcggtactcaaaccctcggtccttctcggcggcggcgtacgggatagcagaggtggccatggcggcggtggccacggtgagctctgccagtgggctccttgctatgctgcaggagccggcgccggagctgaagctgcacgcactcgacagtctcaactccgtcgtccacctcttctggcccgagatctccaccagtgttcccaccatgtgagcccggcctcccccctcctcgcttctgctgggcgtacgcggttgccgccgctgtagctgcagtgtttgcgcgatttgttcaggcgttggtttggctgaatttctgaagtgtttcgatccgcttctcttattgatgatgatgactctggaagagaccttgacctagataccgtcttttttgcgcaatttcttcagagtcagtcgtctgtgcaagctgaacgtcgtaggtcacgggttggttctgacacgtggattccagaggcccaattcgcgtccgtgtgcaagagtgtgataactatactttcgtacattgattgtagctgaactggtgtgccactcttgtacttcttctgcccttacttggatttagcttgggttttgatgggaaggctaagctattcgaggcaacctataaggaaagggtacagtacccagtaggagtgagctgagtgtaggtacttcagattttgtttttgaaatttcatgggtggacaggtgtacatttacgattgtggttatgtcttgataggaaatattgtgtgaaactgtgaagtgagaatgtgaaggcttggtctttacagatgaaaggaaaaatgaatgcatgcattatctcccttcaacaattttgtttagggtattccctgttcggttccgttatgtataattcagttgcagtatgataagcttgtttttggtggttatgtatctcgatagtagttgctttcttatatattataaacctcttgtttctggaatgcctgttccgcatggtccctttgtttgaaatattaacctcaatttctgtttttattaatctcaatttctatttttaattgatatatagctagttagatttcattacattcctatgtttgtttcatggtagctatcagactttttgatacaaatgtagcttaattttaattctcatttagtttgtggagctactctgccccatatttttcatggtgaagatgattggaccatcaattaaagttcatgactgcagaagcacacaaagtgtgccttttcttgtatttcctgttttccaataatttaagtcactaattagtttctagctgttatctatctgcagcgagagcctgtatgaagatgaagagtttgagcagaggcagcttgcagcacttgttgtttctaaggtattatgcctcaattttttttatttctatgaaaagatcattcttctgtattgttaaatgttaatactgaagtgtgttgtatatcatataggtattttactacctgggcgagttaaatgattcactgtcatatgcacttggtgctgggtccctatttgatgtttccgatgattcagactatgcccatgctcttttaggtgaaaagggtcataagttttgagcttatatgaatgatagttttattatgatatcttttggtcatcatgttgaattgctggttgttctttttcagccaaagcattagatgaatatgccagtatcaagaccagagcctctaaagctgcaaaggaggaagagaacattgatcctcgattagaggccatagtggagaggatgcttgaaaagtatgataagattatattgtctggtaccgtcaatttggcggatgggttatgaatctaatacaaattctttgactcaggtgtattcttgatgggaaatatcaacaggccatgggtatggctgttgaatgcagaaggttggataagctggaggaagcaattgttcggtgtgataatattcatg

SEQ ID NO: 194990 - DNA, 306 bp, Zea Mays
ctcggacaagagcgagagcaacaacgacgactaagtggagaaccagatgctgggacgtggcggtgccgtaccagaactccagaagagcaggaggaggctggcggtgtcttgctagaagatatagatcagcagcagtagtagcatcaatgcatcaccatcgtctttcgatccaactccatgcatatatatcatctgatcgaatcttctccaattctagcttttggaccaactccgatccatagcgctagcatttctcaactaagtgaacttcgctttgaatgggatctaagtgaaaccactcaagca

SEQ ID NO: 194991 - DNA, 516 bp, Zea Mays
cgcggtaaagctccttggtgtcgtggcaaaaagttaccgaggtggcgaactctggttaagcggcgaccccgtgccctcaccggaaaccgccgcgcggaaagcttgccagtgcctccgcggttcgcgcttcttctccaactccagtcgacggcctataaattgagccccccctcggcttcgccatgtattctaccagctattgcacccacctgcatcccaaaccccccaccagagaacttggatttgggatttcccccaaaccgggttgaagaacaccgtgaacccaagttcaccgtggaaagctctcctcaggtgcgatcctgttgtctttagtcttgttctagcatcctcatgtgcccttgatgcttaccgagcttccaattcgaactaagaaaccaccactcgtcgggaacacaaccaaacgatcatggccttcgcggttctcgtgggcaggctagaataggtcaccaattgtgcgattaacttgggggaattactcggggtagcttggatttg

SEQ ID NO: 194992 - DNA, 459 bp, Zea Mays
accggtgagagcatggagagagatgccaacatcatccaatgtttcaccaccctcatcatcttctgttaattccagcaagaaaacccctttgtttgcacatctgtgatcggcagtatacttttcagtacaatggtagcactcaccactagcccgctttgctgctaattcttcactggaaagacgcttgaaccgagggcgttggttgccaacaactgatttaataggcgtactcacgccacgggctgcagggcgcgccgtggagtgtgtgcttacagccagctccatgcgacgctcatatgctcgagcaaggttgattgctgactgcaaattagttggcccttggagttcgacgtctgtcctcaatggctcacccaagccagcggtgaagaggttggtctgttgacgctgtgaaagattgtcacaacggcaagcaacaaggaaaattgacgtgtataatca

SEQ ID NO: 194993 - DNA, 334 bp, Zea Mays
gttggtgcccctgttgcctactcggcctggaacttgcctccttccaaggcctttacccatttcgtgtcaaatcctcctgctggtgatggcggtttgggccttagagtgcgaccctctgccgaagaagttagtgctttggttgctttgcatgaagaaattcctgatgatgaacggcaggttcactttgaggtgcctttggatcccagtgatgcagagataagtgctatgcttgatatgttagccgaggattcttctgatgctgctcctgctggaacattggcagtggcgcctctcctagaagctagtaaagccttggatattcagaggtctgtca

SEQ ID NO: 194994 - DNA, 450 bp, Zea Mays
gtcaaaaaaccatggaagatgtgtgttccaggtttgccaagcctagaaacgtgtcgtggatgaattcacgtgtcggtggtgccagtaccggacgtactaggtagagggccccaaccatatgtgccagcatctcaagggaccagcagagacagcctccgcgacggttgtggtgtagcatggcgggagtgccggcgcaacgcacggttgtcagagcggagtagacgaagtagtcgaggatgagacgatgatgctggcgacgaggttgtgctggacgaagcgaagaggtaggcgtagcgacatatcgaggttcctggagtcgcgacggtgagagccacgacgcataggaaacgagcctcaatggtgccagtggagcacgatggtggtgtttgtcggcgaagaactctatgacaagtgcggtgcagaccggcgacggtggctgtcacccctagg

SEQ ID NO: 194995 - DNA, 330 bp, Zea Mays
gcatgggtttctagccacctattatgtaggatataagagatggataggttagggaaacattagctaggggtaagacagtttatggtgagaaaggactccttgttgggtggtaatgcatctgaagattgagtttgacttctctccttccctgacgaggttgatcttgttcttttctggtcttggtctcattgagtcggggtcagcgtttatcatcggagttaccagggtatggttaagatagatatgggtgagattgatgtaggccaaaagtttgtttgaggttaggtggagatagatagattatgcaatccatcaagactctattggcta

SEQ ID NO: 194996 - DNA, 521 bp, Zea Mays
gtgttagtcaaagcgaagggcagtttcagcaggtaatatattgggttacttgttatgtgagagctgcttgttgttttgtggttacacttgcatcataaaaacttgttctgctattgcaggtcagctttgtcaacagaattgccaccataaggggtggaactcatgttgattatgtcaccaatcaaattgccacccatgtgatggcttttgtgaataagaaaaacaagaatgcaaacatgaagctacacaatgtgaagagccatttgtgggtctttgtcaatgcgctgattgacaatccggcctttgattcacagaccaaggagaccttgaccactcgtcagggaagctttgggtcaaagtgtgagctttctagtgatttcctcaagaaaggtatgccatgcagaacattacagtttgtcatcagatttttgcttctcaattaatgctaacactcactttgaatgattgcagttgagaaatctagtgtaatcgataatgtcctctcttgggctgatttcaaa

SEQ ID NO: 194997 - DNA, 288 bp, Zea Mays
taaatgggcaacgtctcaccggagataggcgcggcaagaacggggattctcggaaatggcggagccacgacagtcctccacccccggtgagcgattcagtgattcttggtcgatctcctgccccaacacttcgtaaaacggcttcacacacccgagttcacctctaggctacctttgggggcattttcccgctgctgtcaccgagttatggcggtggcggatctctccaattctctcacccgagcgctctctctttccgtgttcggggcgacgacgactagatgcagt

SEQ ID NO: 194998 - DNA, 293 bp, Zea Mays
ggcgagtacaggcgtatgtgagtgatcatcgggtgagtgacaggcaggcccgtgggccgaggctcacgagcgcataccgaatcataacctggtcaggaccttcgccacgctaagttgctcgacagggacttggtctcctgctctgcctcgaaggtttgttcggctagggcttggtcgtttgcctcgcctcgctaagtttttcggtaaggacttggtcattcgctccgcctcgcaggttgtttggctgggacttggtcatacgctccgcctcgcagggttgctctactgggact

SEQ ID NO: 194999 - DNA, 578 bp, Zea Mays
actttgaaaggagaacaagctagggaagtgtggtatgtggtattgtaccaaaattccgccaacggcaaccaattcttccatttcgtaggttgggcatgaactgcacaccgcaggtacatttccacacattggttaacccgctcactttgaccgtccgtctgtgggtgatatgccgtactcaggttcagcttagtgcccaacaacttgaataactgactccagaaaatacttgtaaatattttatcccgatcactgacaatagacctcggaagaccatgcaagcggaccacctgatccaaaacaacttgggccacctgagcagcagtgaaagggtgtttcagagctataaaatgggcgtacttcgagaaacgatccaccaccaccaagattgtgtcatagccactggacttgggtagtttctctatgaaatccattgcaatatcttgccaagcaccttgaggaaccggtagtggttgcaataaaccagccggatggactcgctctcctttggccttttgacaaatttgacactgatggacaaaatcctccacatcagtcttcatacctttccaaacaaa

SEQ ID NO: 195000 - DNA, 371 bp, Zea Mays
ggccatcccatcatcgccggggaggttgccacgccgttggccacgaactcgcgtgcaccagtactctcttccacctccggcccccgcgcgtcctcctcaaaattcaccggccaccgcccttggagcctataaattgagggcggggatagttgcgccatgtaatcgtcaagctgtagcacccattcccaccctcgatcacccaccagcacgcacgaatttccaatttcccccaacttcgttctccgccaccgtgaaacgagcctcaccgtcgccagccatactccggtcagttcccgtcttctgctcccttgtttaagcgttctcatgcatctttgatgcttaccgacccacccaattgaactgggctgcca

SEQ ID NO: 195001 - DNA, 307 bp, Zea Mays
tggctctctccaccaggttgcaaaggttctggtacattgtccttgcctctggctcgactggctcgaggatggaccagagcatcatgactggtgtggacatgttctacccggggttgaggaagtattgggctccatcactcccctgggcaagctggtcgcataacttctatgcccgaggcttttcagccctaaagtagcattgccgatccatgtcgttataaactctgtcgagtctacgcacgagggcatcaagttcctcttgttgctgttgtaggctttcctcacaggcgaggatcgatgtctagag

SEQ ID NO: 195002 - DNA, 811 bp, Zea Mays
caaaagcttactgccagaattgtttcagaggctgaaccttctggaaagagtggcaaaaaattcaaatgggaattgtctattaggccatgtatagtcaatggtatggtttaagtttcaatatttttaactcatataaatcttacagctttcattcagttcatctattgctaaaatcttgtacgccgactgcttttcatttttatacctttttgtgtttcttaatctttgagatgactaacttttcttattattggatcttttttcttgaaattgaacaggagagtttgctcaaaaagaacaaaatcacaccacaaatgggattgtacgtgcttatgttgtcaaggtggataaggaatgggtctggttaactgtatcaagaaatgttatggctcatttatttttacttgatagttcttccgagcccagcgaactgaaagaattccagcagcgctttagtgttggccaagcagtgaaaggtcgtgttatcagtgtgaaccaggagaaaaggttacttcggttgaaggcacttgataaccaatgcacacaaccgaatatagatgaaacacaagaaccaaagtcctctgtgtttggacaaacaaaacaaggagatatcattggtggacgtgttcaaaaaattctacctggtgttggtgggctcgtcgttcagattggacctcatctccatgggagggttcattatactgaaattgttgactcttgggtgtctgaacccttgtctggattccatgagggccagtttgtgaagtgcaaggtcctgtctgtgagccgctcatcagaaggatcacttcga

SEQ ID NO: 195003 - DNA, 389 bp, Zea Mays
ggagagagatgagatacgccaagaaaggagggcgcaacaacagcagctgcaacagcaacttcaacaacagcaacagcagcaacaagtaccactgcctccaccaccaccaccagttccacctcgtgataagcaccgggaatttatgagtcataagccaccgaccttcgccagttcgccagatccacttgatgcagacgattggttgaagtcaattgagaagatgctgaatattgcacaatgcactgaccgggagaaggttttatatgcttctggacgtctgactggtcctgctgctgactggtgggattcttatactgctgcccatgatgctgctgatactattacttgggcagagttcagtacgcggttcaggaactaccatattccag

SEQ ID NO: 195004 - DNA, 426 bp, Zea Mays
ctggtgctcttcagtatctaactttcaccagacctgatattacatatgcagttcaacaaatttgtctccatatgcatgatccccgtgagtcccatctgactgctctgaaacgtattattcgctaccttcaaggtacggctgatcatggtcttcttctaccacgctccacatctatttccgagcttgtggtctatactgatgctgattgggctgggtgtccggacactcgtcgctccacttctggttatgcggtatttcttggagataatcttgtctcctggtcctccaagcgataaaaggttgtctctcgctctagtgctgaagctgagtaccgtgttgttgccaatgatgttgccgaggcttgttggttgcgtcaactcctccaagaacttcgcagtcctcttcatagaagcactcttgtttact

SEQ ID NO: 195005 - DNA, 305 bp, Zea Mays
gcgccagtattcttctccacctccgaccgccgcgcgtctcgtccaaattcgcggccaccgcccgttctccctataaattgagcccgtgactagctccgcaaggtcatcagctacccagccaccaagaattgctagtgatcgatcaccagtgtgcccgaattccttgtttcccccaaatcttttctctgccaccgtaaagcaccactccaccgtggtcagtccgttctggtaaggcaccatccaattcgcgcgttgttctcatgtccttgtatgctggtgatgctctccaaaccgtccaattaaac

SEQ ID NO: 195006 - DNA, 437 bp, Zea Mays
gtggatgctcatggctcaatttcatcaaatgggagcccttcagctgtatctgttgttggagatcgggtaagttgatagtttgccttgctgatagaatttaggctgttttgaggttggcatctattcccataatgcatacatgaattttgcctgggaatgtggtatcaatttctttacatgccataccaatggataattctgaacctgtcatgtaacatctgtctcaagctcgtcaagtatgaagcagaaacagaaggctgatgtttttaattatttttctttggcagaggaaccgtggatcaacctggggtggaggcaatctaaatagcatgacatcattttcttcaacactgggggaatggctaaaccatatccagaatattctggttggtgcttcatggattgctgcacaaatttcagaagaagcagcgtcagtt

SEQ ID NO: 195007 - DNA, 474 bp, Zea Mays
acggtattggtgtcaggagtggtttggtacgaggcaccgaagtcagccacccagttggtggtaggagtgggctgtgatggcatggggaacgaggagagagccaggggaggcacccccacacaacaactatgaggagcgctgggtccactagcggtgagtaggctgacattgagtatgtgcaatggagatggcaaggcctctatcatcatggagacaatctcggcactgcggaacacaaacaggccggtagcgtggcggtcctcctgaggatggacggaggtcggaggatgctatagcttgacgcagtcacggagaaccgtgttcatggcctgatcacaggacacaaacatgccccgggagattgcccattatgaagggatacacgcacacggtagggaggaacgggggccgctgcggagcaaaggacgagcgttgagggaggaaggggacgactgagagcgacgtggagggggg

SEQ ID NO: 195008 - DNA, 300 bp, Zea Mays
tggtacagacgggcgctggggttgacgcatggtcttgttggtggttgatgtcggctggtgatcgagcacttgtgacctccgttcatatgcgcgcgccaaactcaagcgtgattgatatcccgtggtgccatgagttccacgtcgatcttgatacgctccggaagtccagctgtaaacagatgtaccttctgctcctgtgacagtggagctgtttgggctagcaggttccaaaacctctcctggtagtcatccactgtcgtgcggaatggaaggcgtgccagttcgccgagaggattgctg

SEQ ID NO: 195009 - DNA, 665 bp, Zea Mays
ctcagatgcaatgcactcacgaacttgctgatgccgtctggtccctcgccgggtgtgatttcacttctagtttgcgtgtgctaccattgcagaaatatgacttaatactgggtatggattggctcgaaaaattcagccctatgatggtgcattgggcagaaaagtggttgatgataccgtacaacggttccacagttaaattgtttggtctccagtctgcaaaagggaaaaatgctgttattgagcttcgtcagctatcagatttgacagataaggatcagtcggtgtattccaccttgcccgccgagttacaagcattggttacaaggttccaatctgtgtttgctcttcctgttggcctaccacctgtccgtgattgtgatcaccatatctctcttctacctggtgctcaaccatttcatgtgagaccatacagatatgcacccgcgttgaagactgaaatcgagcgccaagtccaagagatgttatcttcaggcattattcaacacagcaacagtgagttctcctcttcagtaatcttggttaagaagaaagacgactcctaccgcttttgtgttgactatagacatctaaatgctcttactgtgaaaactcggtttcctgttcctattatggatgaactgctcgacgagttatatggggct

SEQ ID NO: 195010 - DNA, 480 bp, Zea Mays
agcccaccggctaacaaccctagagataactgctcctagatcctagggattgatccgatatggctaaacaacctactaacaaacctcctaacaacctgctaacaaacttggctgatccgatctgtttaacaacctactaacaaacctcctaataacctgctaacaaacctcctaatcctaaggctaaagactagctgccatctagccctaatcctaaccgccatcgcatcatgtgggggtggccacgccctctggtgcacttgacgccgccctccggatgtccctggcgcgctgctgccgagagtatgtttggccccacatgacatctctccgcccctcgatgaccagctcgtcctcgagctggaactgcagatgcttgtcgcagaaacaattcacgtcttaccaggttgccgaggctactgataggcccttccagtggatcagcacctaacggacgccccgagaaaaacggtagcaaac

SEQ ID NO: 195011 - DNA, 280 bp, Zea Mays
aaactgtagacactttagaagggtcagttgacactccagctttactgataatatggccaaggtatgctatctcttgcctgccaaatgagcatttggtcagcttgacttgccacagatcgttagatagcagctgcatgactaattccaagtgatgcaaatgagcttcccaggtagggctataaaccaaaatgtcatcaaagaagaccaacacacacttcctaagaagtgaggacaatgtcttgttcatggctccttggaaggtagctggtgcaccagtaag

SEQ ID NO: 195012 - DNA, 498 bp, Zea Mays
cgaagccatgtagccgcttagcctggtcatgtaccctaagttggtacacttcaccattccagaacaggtgccctagtacctacaactgggtccctatggaggagacctcattctaacttaaagtttggcttcctaagctctgctcgtcaagtccagttgcatgtctcgaatgatcgagtgcagcagagtgtgcgtcccatgggtgcgctactaaacgtcaaccttgagccgtatgcaagactaaaccctgatttggtggtagctagcctcaaacactcgaggctacctccctaagggccaaagtactaggggcggtggaaggaaatgagaaagtcctcccagatgtcaagtggcaaaacttatgatgttgcatacacttgaaccagagcaaacaaataataagcaactaagtctcaatagcatttttgacttgttcttaagtacattacattcataaaaataaaaactactgatgctgctatgatggcccgataggtc

SEQ ID NO: 195013 - DNA, 498 bp, Zea Mays
agaacctaaccttgcagttattcatggtcattatttggatgctttgggccctttcttgaagcatcatccagatgcagttgccagtgttgttaataagctttttgaactgttgacgtctctcccaatcacatttcaggtacatttatgttttacttaagtaaataccatatgctgtggagtgggaaccattgaggctggagattgatagccatcatacaattcaattctacgagtgatgttctagaaatgaaaatctgatactttgagctggccaaatgtttccacgtgcaatcctttcatgttgtttttttattcaaatttgaattatttggttatcatgcccatttcctagttttgtgtttacagttctcatttctgccatttaatgtatggctgtatctgcaggatccatcaaacaattctcgcctagcaaggttacagatctgctcatcattcattcgtatatcgagagctgctgataaagcacttctgcctcac

SEQ ID NO: 195014 - DNA, 337 bp, Zea Mays
gtgcagccggactagcacaacaagtgcgaaaaacctcagtctaccgcgaagactatccgcgcagaagtcgcctaagggtgcagccggaccagcacaacaagtgcaaagaaaccaaagtctaccgcgtcgattatccgtgcagaagccgcctaagggtgcagccggactagcacaacaaaagcaaaaacgacaaactgtccgcgccaagaccaactatatgcgcaccagcacaacataacaaagcacaccaaaccaagtacacaacgccttcgcaagcatagccaagtgcacgggggcacacaacctcatcatacaagcctttacacatatacaagcg

SEQ ID NO: 195015 - DNA, 607 bp, Zea Mays
tcgaagaaggcgcgagcgatcgagcatctgagtacaggtagttgagggcgatgaagtgtgcgtacttggagaagcggtcgacaacggtaagtatgatagacttcttgtggaccttgtggaggccctcaatgaagtccatcgagatattgactcacctaggacgacacgtcgaggggttgtaggaggctagctggctatagggtctctgccttgttgcactcagcactagcatgtgaggcaagtgggcatgtagtcctgaatgagcgtccggtcgtgggaatgtagaagtttgctcgtagccgcttgagtgtcctcatggtcggttgtatgggccaatgcaagtacctggtggtgtaggtcctcttgtgtcggcataatgatggcaagccatgaaagaggacgtcggtcacgtgccacaactcccaaagggttgcatcctagaactgctaacagagctggcctacctccgtgtcgtctgttgttgttgtgcaaatctcatcgaggaggtggaacaagggcctcaagatggcgtgtatagcctggcgatgtcggcgtcgtggtgcgagagggtgtttgttgtcttattgaggcgaccggggtgatactc

SEQ ID NO: 195016 - DNA, 377 bp, Zea Mays
cttggccataggagttggggttcctcgtccggggtgcgcgcaattttgtcgccgtcgcaagaattggccgtggtgccgcaccatcgcgcgggtggagccgtcgccgcatcataccaaggtaataagcccaccaacggattcgccttgacctcctctacacgtagcgctagggaatcgagaatttaacgtctgggcgtgtagttggggagctccggtcatggcgctccaccgcggtgagcgcgccgtcgggatttgggggtgctcgaggaaggaggcacttgtgccgttggatcggtttccagcggatgagtttagatcgtgaccgattcgttctgagccgtcgatctccgatgtgagggcttggattaaatctggtt

SEQ ID NO: 195017 - DNA, 333 bp, Zea Mays
tagtgtataggaccgcaagtatcgaaccaaatgtctttccctctctaatatctgctatgaattcgtttactttcatatggaacacacgcacgaccaagtcagaacggtcgcatggttgttgaccaggttcaaagcgtaaggcatctgctatttccctccacttggtattacaagtaaaagtcacaaaatatctggtggtccgtataccctacatatagccatcgcgtcctggtaattcaagacatggtaccttctaccaccagtgaagctggcaggaacaactacccgaccgccaatcgaatcagcattaacgaagcccttatcaatggcgtc

SEQ ID NO: 195018 - DNA, 450 bp, Zea Mays
ttaagattagaatcaactcactcgtcgccacacggtacgatcagaatcttatcctcctcacgagcaggaactttaggaggaggcacccaatgtgttttcctcgacttccgtgcccgagaagaccctccaccactagaagctccagcatcactgctaggccatgagtcccatccgcctgctgaccctccaccctcaaactgaccaccaccggaagaccacccatctccagctccacctccagcatcatcttcttgctcatagtctgcatcagccgcatcataatcggtcgcatcctcacccctcgcctccttctctcgagtctcgttaacatcctgcacatgaaacactttaatcattagattcatataaacattactatattgaaataaaataataatttagagtaatcacacctgtccctgcatatcaggtggaagatgttccatcaaa

SEQ ID NO: 195019 - DNA, 928 bp, Zea Mays
tctctcagatcgtgcagcttgacttgtcctataacaagttcacaggctccatccctgatgtctttggaaacatgaggtggctagagtccgtaaacctagccaccaacaggttggatggagagttgcctgcttccctgtcaagttgtccactgcttagggtaatcagcctgaggaacaactctctgtctggcgagattgctatcgacttcagccggctgccgaacctgaatactttcgatattggaaccaactatctgagtggcgctatacctcctggcatcgctgtgtgcaccgagctcaggacgctgaatcttgcaaggaacaagctcgtgggggagataccagagagcttcaaggagttgacatccctgtcgtacctctcgctgacagggaatagcttcaccaacctggcatcggcactgcaggtattgcaacacctgcccaacctgacaagcttggtgctgaccaggaatttccggggtggcgagacgataccagtggacggcatcagcgggttcaagagcatgcaggtgctcgtcctggcgaactgtttactcaccggcgtcatcccgccgtggctgcagagcttgggaagcctcaatgtgctggacatttcatggaacaagttgaatgggaatatcccgccatggctggggaagctggacaacctcttctacattgacctgtcaaacaactctttcagtggtgagctccctatcagcttcacacagatgaggagcttgacttcaactaatggctcgagcgagcggtcgccgacagaggacctcccattgttcatcaagaggaactcaactggcaaaggtctgcagtacaaccaagtcagcagcttcccaccgtcgctcatactctcgaacaatctgctcgtggggccggtcttgtcgagctttggttaccttgtgaagctcca

SEQ ID NO: 195020 - DNA, 425 bp, Zea Mays
cttttgtactccaccgtgtcctgcagaatgtgcggcctctagtattgctggaatgagtgtggaggagcctggtacaaacacccggttgccatgcattactagtccctcctgtgtatgccatggatcccctaagcttccttctttgatctgtgcactgagctgctgcccttcctcactgtgtgcacattcttcttctagatctttgtacagttggaaagtgggtgctgtcagagcataaactgattcattggttgtatcacggcgcgataatgcatccgccactgtgttaagtcttcctgctctatattctaccttgaagtcaaatccaaacagtttactaatccattgatgttgtggtactgttgacaatcgttggtccaacatatatttgaggctaaaatggtcagtacacaccacaaactatc

SEQ ID NO: 195021 - DNA, 1014 bp, Zea Mays
aaaaatcaaaacagcaaatgggctggcatttccccttcttcaaatgatcttttagagacaggatctagtatgcgcccaggagctccttaagagcactgagctcttatttcatgttcaactttcttgtgtttcattacgacttagtaaaaaggattgtgagttactaaataagctgctagatcatgtcattaaggggatatcaaatgaacaaacaagcatttctggaaattccaaggaccaatctgttctgatcaatgataccttcattcaaacgtctgtcctttttgaatgcagtatattggaaatttgcactgaattgaatgaaacagtggaagttggtcctttattacaggcagaactaaaaggatcctggaactctgttaagttgaatgtttcaaaattttgtcttttctcctgttcaaatgttggaggcctcaacaatgccagttttctttgggtgaatcatggtgaaggtgagctttggggttctgttagtgctaagaatgataaaatccctggagaaagtaaagattttcttatagtggcttgcaaggactctgcctgcaggcggggtgatggtgaaggtactaatgtgctgtctattggtgctgctggctgttctgtgacccacatcaggaacccaaagctaaaagagaattacacttctgttgatgttcgttctggcacaattgtagcacctggtggccgtatggattggatcaatgcgatatgcctgctgttcagttcaggctcagatagaactgaaaagtcagatgatagtaacacaccaaatagctatcagtctggtgaaccttattcatcatctttatttatcgagttggctgatgttgctgttagctatgaacctcattttaaacattccactctcagtgctggagcagccgaccgcaagtttttctcatgccttttagctgcatcatcatttaaactccataataaatctgcatcagcctctgcagctactgattttgatatccaattacgtgatcttgg

SEQ ID NO: 195022 - DNA, 611 bp, Zea Mays
gctgcttggaagtggccatgctatgatgagctggtatgtagctgcaaagaacgccgggtttacgccaagtattcaagcttttgaatctttgatcactgggtttgttcggttgaacatgctagacgatgccaaaacggtgtttgaggaaatgattgccttggagattaagccaaactctactattttggaggccagccttgagattctctctagaaaggaggagaccagcagagtaggagactttttaaaacgtgcaagggatggcaattgggagttgaacaaagccacagttgtgaggttgacaagaatatgcctagatggaggggtaatagatgaaatggagcagctgcttgccctaatacaaaagggaacacacttgaattctgaaacacaactgcaccatggaattatcaggttctatgctaatgcagatcgattagcggatatggaggatgcaatttatcggatgttggacaatggtgtgatgtttacgtgcccggaggatgttgatgtcataatctgttgttattttcgtcacagggaatttgataggttggatctctttttgaatcgcatccgaagtttgttcaagctcaataggtctacatatg

SEQ ID NO: 195023 - DNA, 506 bp, Zea Mays
gtgcgaccgcacatcacatctctcccgccgtcgaagaccagctcgtcctcgagctggaaatcagggaagcgagcgcgaaagtcgtcgtaatcctcccagcttgctgacgcagctggctcaccttgccactggaccaatagctggcgaatcccacgagccaggcgcccggctgtgaccgccgctggcacgggcaccacagcgccattgtgcgtggggggtaatgccgggggtgttgccggtgggttgccgacgaacttcttgagcactccaacatggaacacatcatggaggcgggcccctggcggaagctcgagccggacagccacgacgttgatgatctccaggacgcgatacggtccaacgaaccgaggcttgagcttgccggtggaggtccgtggtagtgatgctgccgggcgctgccggagtcgtagtagtgcccagtccccaacttggtactccaccggacgatggtgctgatcatagacacgcttttggaccgcctgggc

SEQ ID NO: 195024 - DNA, 399 bp, Zea Mays
gtttgttgtgtaatctgaacgagtttagaaataagaagggggatacagttgtcttgcctttgtggaacatgtccggtaataccacaattcaagacctttctcaagcacatgcattctctccagtctcatgtcctctgttccccctccagtggatctgctttgattcatgtgtcagtttttttatatgttagatggttcatcatgtctggtagtctaaatgcctcattaaatcgtattttaattcaaaagtttcttgattattagaataggaagtttcgtgattgttctaacagttagagctaatacacaagtgtggatgttatttctgttttgctagtattaacttcctgttgttgagtatcttggtgatgtttactactcccttggtcctgatatata

SEQ ID NO: 195025 - DNA, 456 bp, Zea Mays
gtttagtctccctcatccctggatcttaggcttctcctgtctcccatccggtggaggcaggcggctactccgcgatggcatctccatttgtttgggatgatagggggaaattgcttgcgaattctttggactgctcatctggtaaagcttttcagctctcggttctttcgagatatgtctcctcggtccatcatgtctcttctttgcctttggactccttactgattgcggtttttcaccgttacaattttcatctctcggctaagtcagtcaacttggctttgcaatcggttcttggtggctcccggcgggttttcatgtcgtaagaatcagatcgtcattttcgtttttccgtggcctccaagaaagttggtttcatggtcctggctctgaagcgcaccatctctgcaaactttgatgtttatttctatctttggagaaacgggagcccaaatt

SEQ ID NO: 195026 - DNA, 280 bp, Zea Mays
tgtccctgcccctgcaaatggtattccttcagttggccttcctcatgttgcttcatcaggactagtaacatccagcactcccaatatgaatggacatattgagcagagtaggaaaagaaagaatgttctaagtgatggaaattttgtggctgagggttctcaccaaacacagggttcaggtcatccaatgagcaaccaacatgctcccaataaaagtaaaactcatactgatggtatccagtatcctattgatagagattctgtaagcaaatcagttgac

SEQ ID NO: 195027 - DNA, 960 bp, Zea Mays
cactacttccactactccagaggtggtacctcctgagatctctcacctcctccttgacttccaaaacctttttgctatcccctcagttttacctccacatagagtatatgaccattccattccccttctccccggagccattcctgtcaacaccaggccctatagatattcacctctccacaaaactgaaatagagaaacaagttcaacacctcttagacaccggtctaattgttcccagtatgagtccctttgcctccccaatcctccttgtgcaaaagaaagatggcacatggagattttgtgtctattaccgaaaattaaatgccctcactataaaaaatcgattccctatgccacttgttgacgagatccttgatgagctagctggtgccaccttcttttcttccctggacatgactgctggctaccaccaaatccgtatgaaaccaggggatgaatataaaaccgctttcaaaactcaccacggccactatgagtttcttgtcatgccattcggcctcaccaacgcgccagctacctttcagtgcactatgaactcgatcctagctccttatctaagaaagttcgctatggttttcatcgatgatattttggtgtatagtgctaccttggctgatcacatctcccacctcagattagtccttactgcactccgggaccatcagttctttctcaagcagtccaaatgcaagtttgccaaatctgaactgagttacttggggcacatcatcacggatgctggagtggcaacagacccctccaaagtggtggctatgttacaatggccggttccaaccaatttcactgagcttcgaggattcctgggtctcacggggtattacaggcgatttgtgcaacactatggactgctcgccaaacccctcaccaatctgttgcgacagaaacaatttcactggactgcggcagcccaaacagc

SEQ ID NO: 195028 - DNA, 388 bp, Zea Mays
gttggcaccttctgtggttcctgtttcgtctccttcctcgagtttgccacgacaacgctcacagtcaaccgaggaagcatcgaaaatggtgtaccaccatgtagaccctactccgttccttcatcagggtttcatcatgggccacatctagcaccggcagataatggtacgtcagtcactcgagctcagcccccgcttcatgaagattgggcgatcgtccttattcagcatttcctagtgcttgagcttaactttcaaggcattgctgatgttgcatgagaatatttggtgggtcagtggggcctagaaattcgtgcaatccagggctcccatcttatacatgccctggttagattttactttgtttttatcaagataacatggtcga

SEQ ID NO: 195029 - DNA, 289 bp, Zea Mays
ctctcgcagacatggtatttacagagtctgcttgcatgcgagatgccaaggcgatgcaaatgcttcttgatggctgcagaaggtgttactgggtaattcaggaaccggattcaatcgataactttgcatttactggaacaaagcgatctttgggggaagtgaatgctctagtggatgaacttttggttgttattgaactactgctaggagcagcatcttcaacagcagcagcagatgatgtccgctgtttgattggatttattgttgactgcccacagcctaatcaggt

SEQ ID NO: 195030 - DNA, 525 bp, Zea Mays
ccggagcagcataacaagtgcgtcaatcgaagtcccttgttaaaaacgctccatgcgaaagacgcccaagggtccagccggacaggcacaataaaatacgccatcgaagtctctcgccaagaaaatggccaacatgcaacattacaatacaagttacagttacatacacacggcgagggcaccatatactacatcggctcaaccttcgggatgatacccatctccctataattgaatagcattatcctcaactcctcacactcaaaaagatttcgcagatccccctcacctatgctcgccccagtcgacgaggataacaattctcgtttaccaatccggtctactcgaagacggccatgctccatccccatacgacggcgcctaccacttcgcgaaaactcacccacactgtgtttcgacaccacccttcgccgcctgtgctcagcactcgcactaggaggatcagcagcctcaccaacctccgcacgtggtgaagactccgctgcggccacatttaacgcagca

SEQ ID NO: 195031 - DNA, 361 bp, Zea Mays
ataccatcaagaccatcgccttaccccctttcatatttttaatgccttcctaaccttatattcttggatcctatgcacaaagcgtctactagtgtcatcaaacgagtcatcaactgagatgttgtgttcccattcttccccattcaataatttatcaaaatactcttgtcgtttatgtctaattgcatcctcctttgacaagaggtgctctatctcatccttaatttggtttttatctagcctttcgtcatttgagtgagttcttcttttttgctgatctttctgcttgtatggtggtgttgacaatgcactcatcaagagggagattgcgaacacaaggttgagatctgcccttgtggtt

SEQ ID NO: 195032 - DNA, 281 bp, Zea Mays
ggttcatttgcaatctgcgcaagccgaaggggtaacttccaatctgagccgtccgatctacatttaagggctcagattagatcaagtgttatatgaaccggtattgaataatggccactggatcaagatccgagggcccgaagccaagacaccgcccagatctaatcgtgcgcgtcgaaggtggatccaacgacacagattaaactagtccaaacgagccacgcgtcactatcgacaccgttcactctaggatcaacggacggagacttgtcttcctcgac

SEQ ID NO: 195033 - DNA, 631 bp, Zea Mays
atttgcgagggagctaaattgagaatcgctgtctgactatctacctactgtttgctgtttcacacgtgtgtcgtactgtagccacaagtcctggaacaaaacagcagggtgaatcctttctgtcaaatttccacaccggatgcctattcgctatgggtcttgtattcagtggcagctggcaggaaactgggtacacgacggtgatgttcccacgtgcgatgagtagtatatgcggaacgcaggtgtataatgtattcatacgtttcggaaccctatgaaatttctcggtttcacccttaccaaccctatgaaatttctcggttttgtttgacttcactacaatctatctcagatgctgtttagttcgcacatttcatggcatgatccgatcacaacgccaatagattgcgttatttttgtttgtttaccatggggtgggaattgggatcgattagcatgggaacgggtacaagcctttagcgcacagtttacatccgcatgtggagcgcttgcttgtaatcgcgacgaggaaaaaacgtactaccctgataaatagccaaggcaaccaaacaaaataaggtaattgttgcattgcaacgaatcacgcgggatctcattgcattaccgttcc

SEQ ID NO: 195034 - DNA, 471 bp, Zea Mays
tgactggggcacggggtcccactcaattttctggtttcagtggagtttttatcttattcattgtagctataaaggtccattagtaagtaggtttctatttaggccccactcaggttttgggccccactcaaacttctcgctttgctcgccacttcaaagaaggggtaatgtagttgggagcatgtagcatatgtgctgagcactcgggctattcttgacttcctgtactataaagaggatgtcacatatgatgcaagctactgtactgccagaagaagagaaatattttgccgcagtacatggggccaatggtttcaacttttaagtccctttctacatcccacctgtctttttctgtctcgagaaatttggccactttgtattgactaatatttcttgtatttgagtttggttttctgcttcctcgctaagagaaaaatggagggtctaggggcatgcacatgataatta

SEQ ID NO: 195035 - DNA, 582 bp, Zea Mays
cttgttattcaccaggatcagttgttacatcaaagagattacacagtggatgagttctacaactagatcactgcagtttgatgtcggctagatgtttttggtccgcagttgtccaccgacaactgtgagttttgccttcgtcagtcgaccgaccttcagtttcatcggacatatgacttcctaactcgacttcgtgatgagtttgagcctcttcatgctcagttgtacgctagtcgtcctccttttcactaatggatgctattgcgggtgttcataatgagtcttcacgcagctggcttactgccatcttctttagtgttggctgctcattttgcattctctcgacttgctattactccaccgcctctactttcgtcaacaccccctactacacatggcggggtggttatcttcactgtaactattgtggtaaagatgttcatctagaggctttttgctacagaaagaaggcacataaggctcagacttgttgttctttatagcctgctaatagtgccagtagtggaggatctcagaggagttctgctgattcgatcactgctaaagctcctttgtcgcctt

SEQ ID NO: 195036 - DNA, 379 bp, Zea Mays
gcaaggatgttgaaacaaggaaaccgagggtgagattggacctgaatcgggctgaccacggcgaggtgttcttcgcggtgttcttcaacggttttggggaaaacttggaattggagctcacggtggcaggactgggggtgatactggacgatggggtacgtgatgaagttgcggagctaacggtgggctcaatttaaagactccgagagcggtggctcccaatttgcccacggcgagctggcggccggaggggaggaagaagcctggcgcgcgcagttacgtggccaacggcgtggcaacctctccgacgatgatgggatggcccaagggagtcacagcgacacggtagaaaagcaaggccacgcggcggaggaccgtc

SEQ ID NO: 195037 - DNA, 307 bp, Zea Mays
ggctaaggcagcagccaaaggcgaggccctgccctccgacgtgttctaccacgtcatcggcacaccagctgtccgcaacccagaaggcttacaaataaccaacgacgccgaaggccatcgcattgtcaaccttatcatgactgaagattggtgggccccaataactttgtatctataaggacattaccatccaagtgacatcaacgaggctaaacgcctcaagcaccaaagccgggacttcgcactagtcgggggccaattggacaagaaggggatcagtcagcccatgctgaagtgcgtgaccaaa

SEQ ID NO: 195038 - DNA, 696 bp, Zea Mays
cactgattgggttgtgtgtgtgggttgaggtggagtggagtgtgcacttatcaatagaagacaagagccgagaggaagggccacaatagcaagacgaaaattaagaggggcacacgacacacacaggcagccctacaagtggagctttggagggagggaggcctggcctcgtagtttcggtgccagtggtgaaaagtggcagctctgcccacattcctacaccaccgcccaccgcggggccaccgtctccatggcaccacttctccatctccaatccaactgcccttgcgatgctctgcctgctgcacattttcctcccactactacactttattaatcacacagaccgaatcccacgccttctctttccttccccttcgttctctccctgctgctctgctcctgccgcctggctgccgtgccgccgctgatccctctccctctcttccccctcaaagccccaattgccgggtgctcctcttccacccccattgccgactgcttcccgccagagagtggggaagggaggggggtgagaagggagatggcttcttggatagggagtgggtaagaatcacacgatgcagttacctccacctttctctcttctccttttgcgggcatattcttcacctccgcctgcctagatccttctttctttggcccggcttagcttccagtctcaccaacagttct

SEQ ID NO: 195039 - DNA, 386 bp, Zea Mays
aaaggttgctttaccttttttcatagggtagcagtggaggatttctgtttgacaaggtggattccaaggtctgaaatgctcagcttttcccaccgtgttcctgcttttgacattgttgacatcaaagatcatgatataccacaagggtcatggtatctggaaccaagtgcccttcctacaaggatcatacattaacacatgtatagtagcagaagtagccatagccctattgtaatgaactaatgactccacccttctctatccctccattttgaattgttctacttatctccattaatcatcttgtacttactgactcatttgtgaagagaactgtttgatcaactcttcaaaattcccatgtatgaccaattgcagatcaggtc

SEQ ID NO: 195040 - DNA, 615 bp, Zea Mays
cgagattcctaagataccgtttggattgttaaagatgggcctttcttatgcaattttcccttaatctgcttgatctttgcatcaacccgcgcagtgaaaccaatctttgttttctgcctggccttggaccgctccctcttccacattgtctggtcttcgacatctttctttagatacttgatctcttgaatcacatggtgatcaagtggattgcacgatctctggtaggatatgtgtatcaggtaggggatgttgcaagcagcagtcaccagaagcgtccctgcccagtatatgggagctggcccaaggacttctaacaggatctggtagttgtcgccggacctcaatgtcatcccgtaggcgaggatgaagatataccaagttgttatgctgccccatacaaagagatgttgaatccatgtgaaatggctcattgttagggcaatctgtatgttgacagcccagatgatgcaggtgaacatggtagttcccaccgcagccatgtccgcagtctgccctccagcacggattgcctggtcgtagaatatgcagagattgaggaagaatatagctagagaggagaagaggccgttccccatccatccaaggatccgg

SEQ ID NO: 195041 - DNA, 441 bp, Zea Mays
ctctagcgtggtgttcctcctccccacacttttgacagaagaacctccttcctggatttgattccccaaacctcgagagcacaatatgaggattagggttacatgggaattctgaagcagcagaggacgacgaaccaggagctccccattcaagaaccctacccgcaggaggtttgatgtgccagctcaagttccggcttctcccccaaattggagactcttgttgatcttcacagtgatctttgttctcccatttctgagtccacgacttctgctccatgcttgcagacttccctttcgtcgagctccctctgatccccagtctcggcaactccccgacctcctagcgggggcaaagagggatactccgccagccgccgcagaagttgacaaccgagtgcgtcggcaaatcccacaaacaggaaacgagaccggcgagat

SEQ ID NO: 195042 - DNA, 379 bp, Zea Mays
ctgacacactgaaactgaaagtctctatcaatggtgtggctctcattgctcttgtggattcaggatccacccatacattcatccaagatgctattgtaccaagactgggactgcatgtgactccaacagcaggactgcctgtcaaggttgcaaatggtgagaaggtgttgagtgggggcgtctgttctcaaaccccactcactgtcggcgaagagaattttaccacaacctgctacactcttcccctggatggctttgatgtggtgcttggggtagaatggctgcgttctttgggtcccttcatctgcaactttgagaagttgacgctgtctttttggcgccacggagacatggtgcgttggacaggcattggcggctc

SEQ ID NO: 195043 - DNA, 562 bp, Zea Mays
acagaactgggccgattctggcccagacggcccaagcctcagagaaaacggggcgcgcccgcacccgcgagggaggctttgcgcagaggccctcggcgttttgactaaaccagaacagggtcgttcactgttttcgcaagtcactgacaaatcacagaaagacccttcctcttctatttctttacccgacacgccctcgacgacggcagcgcacggagaaactccggcgagccactgcaccggccgattggggtgattaccggcgctcagcttcggccgagactaaatccgagtccccaagaatgtttcccccaacttaatttggctattcatcagctatggagctctggccacgttggccgtgagcagcgtgacaatatcgccgtgttcccgacgagtgggggtctcttagttcaaattggaggctcggtgagcatcacagggtgacaagagtgctcaaacaagagagagtgagggatggacagacctagaaagggctggccacggtgaggttgctcttcgcggtgttcctgagcgttttgggggaaatcccgaattgaag

SEQ ID NO: 195044 - DNA, 891 bp, Zea Mays
agtctatgagctgctccagggaaaaacttaccgttcagttggttggagcactttgtttgattgcttatctatctatgaggagaagttcaaaaaatcaattcaatcttctgcaaacatactgcctgattttcctgagggggatgcacaagcgcttgttgcatatttagctgttcttcagaaggtgtgagatttcttgtacttattcatttgttttgcttgtcttggtcagctttgttcacagtaaactggatttccatctctgacgatgatggttttggaatcactatattttacctttagcattaccctccactttccatgactatctcatcattctgaaggtgtggcacctatcctacgttgtcgatttcatgattttgttcctccatcccttttacacttcaattctgtagttgtgactgcacatcatcagctatgcaagtttctttgaaaaatcagaaaatttaatcagcctttgtctcaccatatcactcttgcttattttatacccattgagaggttcgttactggcttacagctgcatctagattttggaggcttagtagaatttttaatgaatcaatacacttctgatctctcatctgtacgcctgtactggccataaatgagtaccacagccaccactactactaagttgcttgttgtgccagatacactgtgtctaataaagtgttctctccatcatgcataatgattctgttgctactgtgttttctcaaaggaagctgctttgagttgtctacatgattagataaatcattaaattcgtgtacatgctgtaggtggtggaaaatgggaatcttacggaacgcaggaagtggttccctgacattgaacctttattcaagcttctcagctatgaaaatgtgc

SEQ ID NO: 195045 - DNA, 866 bp, Zea Mays
gtgaaatttgccgctttccatgtgctctcgcttgaaggaagtaatggtctcacaatattggatgtagcagaaaaaattcaggtacacatatatatcctgaacccccctcctcccgcccctaaagtggttatcttcaattttctaagctgattattttcctgttcagaaatctggattgagagacctcacaacaagcaagacacctgaggcatccatagctgctgctttgtctagggatgcaaaactttttgagagaactgctccttcaacatattgtttgaagtcgccttatagaaaagatccagctgattctgaggccgtgttgtcagcagcgcgtgaaaaaattagggcctttcagaatgtgctttctgactctgaagctgaaaaggaggcagatgaagctgagagggatgatgattctgactgtgatgatgctgatgatgaccctgatggtgatgatgtgaatattgaggtggaagaagacaaggatcctcttcttgccgtcaaggcacaagacgaagtaccgagtacaactacagttattggcataaagaccaagttagatagtgtaggtaatgcattgaactcatcaagtagttttactaaatcagcaaaaggtgctcctctcccttatttaggcaggtccagtgcagcagatacttctaatgattcacctcttggaggcccatcagctaatcatgaagtaacccctggcgattctgaaaatactcaaattgatgaaagcaatcaaattgagccttgggtatgtgcactagcagaaggagactactgcgatcttagtgttgaagaacgccttaacgcactggttgctcttgttggtgttgccactgaagggaactctattc

SEQ ID NO: 195046 - DNA, 419 bp, Zea Mays
agtctatatgaaattttgaaattgcaagtctacaacttacaggaccataaccaacaactatatgagatcatcgtccagcttgaaatgatcaccagcagctccagcttcttcttctgcaacatcgttctaaagtaacacatagtaagtatcacttactgctgaaaaaatggtccagtttctccggcccctgggtagccgccgatgagacaggtcacaggagtgtccgagtccgagggaaagataggtgacagaggggggagagcagagaagagtgaagaagagaatggaaatggagctggagccgccgtcctggcctcagggaatctgaagagactgggcggctaattaatattggcttcagggccttaaacagctgttggactaccctgagcagatttaagttgatcgtctgattgccc

SEQ ID NO: 195047 - DNA, 410 bp, Zea Mays
tacgcctcctgcgcacggcctaaaactccctgctcttgcctgcacgcctcgctctgcttagcatcggagcgcacggacgtcgcagccatggttgccagtagaaccttgacggctgctactggtctccctgcccctagctcgagcgtgcatagccgatgggacctccaccgtttcccctcctcagcgtgctccatgctgagctcccgcaggccacaacgtccgggtgccgatctccatggccgctgaccaccggacagaggcacaatcccgtggacctccaaccctgtcgagccctctcagcctctcaggtccgcaatgaaccatgctacaaccggaggaatcctttctctctcctccaccaccgcatggcgccaccgagcgactgccgccggcctacatgcgatgagtcc

SEQ ID NO: 195048 - DNA, 364 bp, Zea Mays
ttgatatgcaagttatgccttcagaagcggaatcttatgcttactagctacaatacaaatgcaagctatatccagcctcaacaaaagggtaatggccaacaaccagtgaccgctctcagagttaagtttaaggttagttcttcccattctggtgaacctgctcccaaagtcgaagcccagctagtcgcaagcgttaaagcacagccatctgcgaaggtggaagctcagtcgagtatgaatgtgaaagcccggccagttgtaaacgtgaaaacacaaccatttgcaaaggtggaagctcagccaattatgaatgagaaagtccagccaactgcgaagatggaggtgcagccactcgcgaagatgg

SEQ ID NO: 195049 - DNA, 697 bp, Zea Mays
cgcagagggtgacagacatggctttctttgctgaggatgtccatcgtttggcaaggtactaatacaaaatgatgggtgttcagttaccactgcactaaccagtgatctgtttgctggctattatctggttatctactattgcattttggaattatcttgttgcttctagtatatacatattacttttagtagactacagtctccatgttctaatttgcttcggatttctacagtgcgagcgtagatgggcggatatttgtgtggaggatagatgaagggcccgatgaggaaaacaaaccacaaattactggaaagattgaaatcgccatccagattgtaggtgaagctgaagcttaccatccaaggatatgttggcactcacataagcaagtaaagccttacataacacccctcaatattttttttgcgcatcaacctacaaagtgacttcaacctgtatcctgcaggagattctttttgttgggattgggaactgtgtcttaagaatagacacaactaaagtgggtagaggaaaagactttactgtggaaggacctgtaaaatgtcatcttgaaaagcttattgatggtgtccgcttagttggtaagcatgatggtggtgtgactgatttgtccatatctcaatggatgagcacccgcctggcttccggatccaaggatggcacggtttgtacgaa

SEQ ID NO: 195050 - DNA, 720 bp, Zea Mays
attcaaatgcttccattcctacttgtgtctttctctgatcaagtcctagcagtgcgtgaagctgccgagtgtgctgctcgggcaatgatgtctcagctcactggtcctggtgtgaagcttgtccttccttcacttcttaaggtatcaatatatatgttctatgctatcaaattgtaacatttgttgcatccaaatgttctggagagtacaagtggccagttcatcttgttgttatacattgaaatctgacaataacttaactttccgccgaatatttaggccatctgcaccagaaaccactagtttgtttccgttaatttgaaagagcagaacatattgaggtccatctggtaaactttttttttaaaaaaagtctacacattctggattttttccacttattgtcatttgcactgttcgcacctttatgttagttgttcgaatgaagataaaataggtattcagatactttacaaaatattatgccagccacactcatttgtaaaagctacatgaaacgaatttatttggcttgtctgatacattcaaaattttccttaaagcacatatttggatgatccttaatatgattttcagggtctagaagataaagcatggcgtactaagcaaagcagcgttcaacttcttggtgccatggcatattgcgctcctcaacagctatctcagtgtcttccaaagattgttccaaagttaacagag

SEQ ID NO: 195051 - DNA, 309 bp, Zea Mays
aaggctgcttacggggtgcgtcagcatcctaacatgggatgacgccaagattccctgctgtgcttatcgagatcagagcacctgctccgtcgaggcggaaatcttcctgaggtgttagccaaaaccgtcccttgacgtgcgccacagttgagtggagtggctgtctgcgggattcacggcgtagtaggtggccaagactgagctcgggcgaggcgaagaattcgcccgagggtcgaacttgacgtcgggtgaggcggagaaatcacccgaaggctggacccggggtcgggcgaggcggagaggttgtgc

SEQ ID NO: 195052 - DNA, 307 bp, Zea Mays
gtccaccgaagccgtcaaactgcgcgcacggatcggagcccgttacaacgaactgagcgccgcgcgcggactgccacctcgcccagcgatttaagtatcgccttgtcgccgcctctgttagtcctgctacctcgagaagaattaccctaatcgccattggcgctcgacgctggggagagaggaagaagcgtgctccggtcgccaccatgatcgcgcagagagagtgcgccgggagtcaccacttcggagccgagcgaggtggagaggatagcccgtggctggggtgcccgtggtgtgtgccatcagg

SEQ ID NO: 195053 - DNA, 315 bp, Zea Mays
gttttcgtgggcccccttaggccctgacagagagaaccatgaaatcaaaagactggtgctgcatgggtcagtttttctgagcttgatcttagtcgctatattttgctatccaaacatgtattttctgaattatctatttagtcaacatgtaattgtagcttgatcttagtcgctataagcccgactaactgcgattagtcgaacgactttgaaactctgctgcggtgtgccacttaacaagtttaaggacctagaaatgcatttttaaagttcgtggacctaagtgtcatctcttgacaagtttagggggccgct

SEQ ID NO: 195054 - DNA, 699 bp, Zea Mays
aagtcgctgcagaacagcaacccaagccaaccatcccacaggccatagataaacaagaagcagaaacagacgcgtctcccgcacctgctgcaggagggctttcaaggcgtctgagtgtgaaggacaggataaacatgtttgagagccagaaaaaggagcagactccaagttctggtaacagcaactcagcaggtactggtagggtggttccagggagaggtgagcaccgcagggttccttctggggcctccatggagaagttagttagaaggtggagcagtgttagcgacatgagtattgatctcagcaacaatgagagcgttaacataaatgacaaaaaggacaatggaactcctgttgtgactccaacatctactgatttggaggccaactctaaagcaaaagctgatgtggactctaatggacagaaggatttagtcacatcacactcctggccttatcaaaaggataatgtaccaatggatccgactaccacagatttgtgcccaccctcaactttaagtaatacacttgctcctcatagtgatggtgcaggaaacgacatggttataaactctagcattgagagtgagtcatcctttgggaaagaagcgggggttattcaaggactcacaaggatgtcaaatcatgctacttcaaatgtttccactcgaaaccatctaaaatcttctgcaaagc

SEQ ID NO: 195055 - DNA, 375 bp, Zea Mays
tggattgcggaatgccgtgcagccggacgatgtcagtgaagaacacctgagccacactcttcgccgagtatgggtgtgcgagggggatgaagtggcaatatttgctgaaccggtcgagcacggtcaggatgacagacttgccccagacgcgtgacagcgcctcaacgaagtctagggcgatgtcagtccacactccttgtggcacgggcagtgggagcagcaggccggctgggaggagatgctcggacttgttgctttgatagacgacacactcccagaccagatcctgcaccgcgcgcttcatattggggaagtggaatcgcagcggagatggtgctgagtgcgccggacaccctcgtgcccttcctcgtgaac

SEQ ID NO: 195056 - DNA, 489 bp, Zea Mays
agcaaggcttttgactcagtttcgtggccctttttgttggaagtcctgcaatttcttggctttggctcgttctggtgcgacatcatgcctaagatgttcagaactgcttccactagagtcctggttaatggagaaccgggtgatctcatatttcaccaacgggggctgcggcaaggggaccccctctcgccaatgttgtttattctagtcatggacgtgctgaacttccttatcaagagggcggcggatctaggtcagttactcccccttttaaggcggggtgctggacagagggtatcaatgtacgtggatgatgtggtgctcttcgtgcagccggtggcgagtgagttaaccttgacaaaatagttgttgcgggttttcggagaagcttcggggcttgtcaccaaaatcagcaaatgctccataacaccaattcggtgttcggatcaggtggtggaggaagtacaaggagccttgaactgcaatgtg

SEQ ID NO: 195057 - DNA, 653 bp, Zea Mays
tgttttcacatttgactagtaaatccaaaagctcctgggtatggacagttgcttcacgaaaatatgtcataaggccaataagagccgtattccacttattgactatcttcgtgaacgttgttgacccagatgacattagaatctgcctgacacggttctcgaacactttcatatgttcatcatcaaccctcaggaaggcaattgctgtcctttcttttgtctgttcattctgcaaattccataccccatcctttgtgttgctgaacgcctcctgagtcatccgtatctttggcagtatccggacttcaaagccacacatgctaaaaagcaggtttggattgtccttgctgtaaacagagacaaagttattctcccattctaaagttgtaatgctcctcggaaggcggttcttcatatcccagaacacacttcttccaagattcacatcatgtttcataagcctcattcttgcatctctgggccaacatttcttgttattgtaaccaaccatgttctcattgttaggatcaggatgttctgtcaagtaacgctgaatgagatcccgtgcttcctcatgggtgaaccggaacaatatatgcaccttgtcaatatatcgagaatacaatctgatgggatgccttgtctcaactttt

SEQ ID NO: 195058 - DNA, 386 bp, Zea Mays
ggcaagaaatgagctatcttagtcaacctatccagaatgactcaaatagaatcgtggttccgggaggtattgggcaatcccacaatgaaatccatgcaaatatcctcccatttccaagatggtatgggaaggggttgtaaagtgcctgccaccttcaaatgactagccttgactctttggcaagtgtcgcactcagatatatacttagcaatttcccttttcattctggtccaccagtacaaagatctgagatcatgatacatcttgttactgtcgggtgcatggagaatttggaaaggtgagcttcatccaatattttctttctaagctcggggtttttgggaacaaccaatcggtctccaaaccatagaattccattgctgtcc

SEQ ID NO: 195059 - DNA, 279 bp, Zea Mays
cacggacaaaaagagcgagggcggacctggaagcagctagccgcgatgaggcggttcacggcggcacagtcgaccgaattgggggaagagggaaattctccggctatggtggctaattaaaggcgggaatgggtgctttggcttcgggataacatggcgcaacagatccggccaacaatttataggagcgctaagcggtggtgtccaattttgaaaggggagaccggcgtccgagaggagaggtgagtcaccggcgtaaactattgtggcgcttcccgg

SEQ ID NO: 195060 - DNA, 2592 bp, Zea Mays
cagtgatgcagatgaaaagatcaaacaatttagtgatactgtaagaaggtttgttgcttaaattcctgaacttcatgacattgtttcttgactcttatacagagctggtccacatgcatttagtattcaggttctttttttttgaaacataatttagtgttcaggttctagcagtgatggaatagaaatcattattgcagcggcattatcagacaaacatatccactatcctagtggagtttttttttccagcatgcatgagagatgtgtatcattatattaagaagagaagaaaaaaaccatacaacaaaggaggtttatagaaactccgacaactccacatgaccccctctaagcttttagaccaaggacataggcctgcccaaagaggggaaactagccccttgattgaccagaaaaaaacaggattcacccattggttggctggagggctaggatgctagaaagttcccgggctccagccaaactccaacggttgatctcatccttgacccaactgaagacctcactaatgttaggctgaattccatcgaagacacattgattacggtggttccaaatgcccaggctcccagaatgataatggaaccgaagcctttttgcactggtacagtaattgccctgtttgctccttcccaccattcgtcaaagcaagaactgccatgttgaggagaaagtttctcgagatcaactgccttaaggatgttgtaccaaacctgccgggagaagacacaagaaacaagcagatggttcattatctcctcttcttgatcacatagcaagcatctatgtgggtggggcaaacctcttttagcaagccggtttgcagtccaacacctgtcaagtgccacaagccacatgaagaatttgcacttccctggtgcccaacttttccatatcctctcccatggcctaattgtgttgatgcaataaataatccctcataagctgatttgacagaatatattcctgaaatagagagctgccaaatatgtttgtcctccacttctggttgtagagtccaatctgcaaggacgtcccacaacattaggtattctgccaaaattgctactataagtggtccttttatgtcttgcacccacccacttgtcagtactgaggtggaggcgtgaggatgcgtgggcgcgggcaaggtgcgcgggaaaagtaaatcaatcgtttgaatttgttgtgtcgtgtgggccgtatgggcagtgtaagtgagtttggaggccgtattggcctgctaagggaagtacttaaacattgtaataaggtgacttgaggattaagaaagaagagaaagtgagaaacagaaaccaaccacatacttgcgtctctcggcctagcgccgaccgtgattgctcacgccagcggcgacgcaccgtctaccacgggcatcacaccactttattcctgtttgaggatcatagacactccttttttggcccttgcagagatcaactcagctaaatgaggtgttagttgatgaatactttgaccatgtatccatttatctgtccagaacaatgtagtctttccattgcctatctctgaagtctgaactaattgccattgaaaagaaagcttgaacagagggatgcacttgtatttgaaaagatgcccatgaccggtttggttgtcttttgaagccgtagccaatgcattctaagatcccagctcatcagttgtaaatgagagatacccagccctccaaattatgttgcccgagtgaccttgagttcaaaattagtttgctgccataatgagatttgaacttacaactgtcttgaatttggaaaaaaagaacttaaatatgttgaaggggtgttcccttgtcattgttgtttaaggagccatgattagaaatccatatataattcaatgcagaatgcacatgctcatgcatagaatggtagaagcacataaatttccacgttcgtatattgtttcatgtgacaattggattttatttgcatgatacacacctattcatttgggacaaggaattgaaccactctgactgttgcagatctagaatcttatttccaggggtactacataatgtatgttgttatttgaaacaattagggtcttgttaatttaaacatttgactatttgagaggttgtattttcttatctagattcactccataggttccaattgctccagaaattgtcatgtgtttctgaatctgataggtggtaaagttctgcattttgagcattactctgagtctctgataattcaaagtttttttttctgtattggcacagactagaagggactgtaagcgaacatgagggccttttgctaactgaaaggcaacaaaatgaagcagctaatgctgcacttgctgaatctcaagcgagaaatgaagcactggtaagcaagcttgaagatgctgtgaaacaaaatgatctcctccatgaagctgaccaaaggttagtgtttattccagaaagtaatgtggccaactctgcaaactgtagcatcatcaataatccctaatttgcatatctataaggtcatagctattctttaagaacaaaaaatagcccaataacac

SEQ ID NO: 195061 - DNA, 400 bp, Zea Mays
gcatcatcaactaaatcctccatcaggctgcgcctcataaaaatcaaatttatattatgcatgtcaattgctgcatagtcctcaagattaacttgggtatctctttccatctttctatggatctttctcctcttatcaggagaaaattttgcagccatgtcattgtatccattggtatctacataagctgaattgagatcgatagtcacttgtctactatcagttactgttgaagtctcattcataagaaaatgcatttccaaaagctttaacatctcaaagtgagcaacccgtgctttcctgaacaagcgatgaagtctcaagtcacaaataatttggcttttcctctgaggatcgcgaaggttattcttcttgatataatcaagcagaagagtctgaa

SEQ ID NO: 195062 - DNA, 1533 bp, Zea Mays
ctaagatcgtgcagctccactccgagccatcccgccgccgcgtcctcctcttctcctcctccggccacccaattgcctccgcgccctggccaccccttctcccacgcctccactcgctcggtttctccagctccctcagcctcctcgcacttctctccgacggctcgctcctccgcttccgcctccccgatctgcaacccagcccttgctccagtcccgttcccctgctcccgccggcctccggcggcgtcgccgacgctctattctggggcggcggtgtagccatcctcacggaagacaaccgcgtcgtggtggccactgacatcgaggtcgacgatcctcacccccgtcacctcgccgacccaggcatcggtgatgaggaacatgttctgtgtatggccgtggtggaggcacagtttgtcatgtcagggagcccagaagtgctgcttgctgttggcgaccgggtcattgcggttgacgaggatggcgtacaagtgcttggggaagagctggagattggacccgtgcagaagatggcagtttcacccaatggcaagctcctcgcagcatttgcacatgatggtcgccttctcgttattcccaccgatttctctaggatcatattcgagtatgagtgcgaagtaagttatttagctctactgcactgtgctgtcaatgtctgagcttactcggtgcttttgttgagcctccaagcatgaattgctagatcaaactctgaaattagataattatcaagccatttagctgaatgaatggtttgggaggttctgattgatgatttgtcctacataaaaatggcactgaatgtgttttttttggctaatttatgcttcacagtcttgtgtctgagaagcaacagttttagttacgtctcttgtcgattggtcactgttggagacttaagtaagcaaatagttctgtctatgatgaacattgtgtttattgctaccacttgaattcttagttcccaaatccccacttctgctctagaatagagcatgtaggtggtcggtgccacattcatacctagcacctaacagatccctaacaaaagagaaatataactttacttggaacttttctcttctcttttggttttttttcttttgccctagccttcattttgaactatatctgtgcattttaatcaatagagaaatagttactgaattgtactctaggttagatacgtttctgccctttatgttgtttttagcactgtcttgtacatttgttcatcatttaactgcctttttttggctatcttgtagtctgcattgccaccagagcaaatagcttggtgtggactagacagtgtactcgtctactggcctgaagtgcttttgatggttggtccaaatggagatcctgtccaatacaattatgatgaacccataaaactgattcctgagtgcgatggtgtaaggatcctatctaactcaagtatggaatttctacaccgagtctcagactctaccacgtcaatttttggcattggaagcatgtccccag

SEQ ID NO: 195063 - DNA, 394 bp, Zea Mays
caatgccgatggggcctggggtcaattgcttgctggtgatgatgcttcgtcgggggaccgcaccgatccgcagatggggtatcgccgcgctatgcactggtattctcccttcttgttcgtgccccacatttcgccctcgtttgccctcggtaatgctcggatccggcccttgaagctcagatgggcacgtcaccggcggagccatggccacatcaccttgaagcttcttcggccactgcgaactcgccctctgttctcctggccatggaatttgtgatcgatgacctgtccaccgtcgcgcgtgggtggttcgctgaactccataggcgggtccaaacccaacgccgtctccatctgcgcctccctcgccaacgtgttcgccgacttcgaccac

SEQ ID NO: 195064 - DNA, 403 bp, Zea Mays
cagggctccgtgttgttgccactgccatcagtcgcaactgcactacgtccggctcccgctcggcactagacattcgtgtcttcgcccgcaccacgcgcaacctcgccgcctatgccagctgcagccccaacggccctgtcggctgcacccttgaaggtgtaccatcgacaaccacgcgttgtcttggagacgcccgtggctcctacgccgactggactacccacttgtgttgttcccatcacaccgatggtcaaccatcacaggatggccacccgcggcaaggctagttttcgagtgcctgttgcgttcaatgccacgacgccctcgctcgtcctaaagacctatcgcagcgcccttgccaatcccaattggcgccacgtgatgcaagaagagtacgacgctc

SEQ ID NO: 195065 - DNA, 293 bp, Zea Mays
ctcaccgctccaaaaaatgctttgctaagtttggtacttctccatgatatgatcatcttcgagtttttggatgcacatgttatgtcttattagcaccccgcaaacggactaaattgactgctcaatctgttgattgtgtttttcttggctacagtcctgaacataaaggctatcgatgttatgatccatcttctcgtcgcattcatatttcatgggatatgagtttcaatgaaaacggacccttcttccacaactcgtccaccagctccacatactttcccatagagtccaca

SEQ ID NO: 195066 - DNA, 321 bp, Zea Mays
tgaggggttatgaactgcaggcagagtgagtgatgagagtgtttgcatattaaagtgcactgcacgatggaggattaaggtgtttgtggatgttgagcgtttacttcagcttattcaatcttgtggcatttttaatgttatccctgtaagaggatctccaatgtggacacgtccatcacatctcgcaagatgggagctgccaagctccgttcggtttcagtgtagaacctcacgctccttactatcctggatcctcctatccttatctggatgatgatatctagcaacaatgatagcccgtcatcgactcggacgagtagc

SEQ ID NO: 195067 - DNA, 442 bp, Zea Mays
ctgggcttactggtttcgcaccggggcattgaagcaaacccagacaagatcaaagcaagagagacaatgaggcctccagcccgaatcaaagacgtccagaagcttacggggtcactggtcgcccttagccgcttcatctcaagactggctgagagggcactacccttcttcaagctattgcggaagtccgggccattctcttggaccgaagaagcagaacgagcctttcaagagttgaagcagcaccttgtgtccctaccaatactggtagctctgaagccaggggacccattgtacttatacattgcagcggctacggaggcggtgagcatggtgctggtcgccgaaaggacagcacaacatccccaggggagtcagaaagttcccctaggagaaggtggtggcccgaccaccacgatgttgacggaaggccaggattttg

SEQ ID NO: 195068 - DNA, 773 bp, Zea Mays
aatttttggatttgtcaagatcaggctcagcttctttctgctgcaggagttcctttatagttgtcgtctgatctgggtttgaagcaattgcgttctctttcatttggttgatatggctctctttctccacaagagctgcttccaattctttctgcgtgttggtaagatatgtcgtggtagtttctgaatccatgagcttgtttttcaattctgccctctcaatacttaggacagatgtttttcaattctgtcctctcaattctgcttccaattatatttgtttgttacaaaatactttaaattgtcatttcatttaaactatttattgtaaactagaaagtatacatacatatagacagatttgtacacgtaatcatgtacaaaattcgccacacctcaaattttgtgcgtcctccgccactgctcgcccccacacctcgccctccatccacctccccaaatgacgtgccttcctggaattaaaaaggcagaagggaggccacacacgagaccaccaatcggacacacgcgagtacatccgacgcccaccatcagccaggtgatggtcgattacgagttcatcctgcgcaattctttcttagtgttgagtatgttgttctttttttctagacataggttacatgtttatttcagaaataagtttatgcaatgtgtttctgcaatgtgttgggttcagtcatacattggacagtcacaggtaggttacaggtttatttctaaaataagtatatttctgagacataggttacaag

SEQ ID NO: 195069 - DNA, 328 bp, Zea Mays
atgtagcatatggcgtccttgatggggccgaggacagatccatacggcgttcataggcgcgtgccaggtgcatggcccgctgcaatgtagtcggagtcagcagttcaacatcagtccgaagcggttcacccaagcctgcggtaaacatctgagcttgctggagctgtgtcatatcctcgcagcgacttagaatggacagaaactgacgttgatagtcttcaacggtgccggtgcgccgaaggtccttgagatcagccataccgttggtccgtagaggtggtccaaaccgcatatgggtgaactcaacgaagcgggaccaagtgaggac

SEQ ID NO: 195070 - DNA, 350 bp, Zea Mays
gagtgtacaagtagtaagctttggcttgtagatttggctggaagtgagcgtttagccaagactgacgtgcaaggcgaacgacttaaggaagcacaaaatattaacagatcactttctgcattgggtgatgtcatttcagctcttgctacaaaaaacagccatataccctacaggtttgtgtattcatataactgcatatgtaactatttaactcatttgttctatcgctcactatttatgtgccttatctggtcagaaattctaaattgacacacttgctgcaagattctctaggtaagatgatctgcttgttcagggaaaaccattgccatgattatgtctaacttttt

SEQ ID NO: 195071 - DNA, 753 bp, Zea Mays
ttgatgaatagagcttgcaagatcttgaccatctcgatggatatatacaaagaaatgggtatgaagtagctgtacagcatcaaggacgtcaacaaatgaaagaaagatgccagagctgctctctttggatcatagaatatggtagtagcatctggccgaagataccaccgtttgagctcaccatctcttaggtcctctttggtccagatcccaaagaagacagaaccaagtaatgcaatcatgagtagagaagacattagaagataaataatttgatccattttcttctcaaccttacttcttttagatggtggatcagttgcattttgcatcacttttgtatcatggcctgtgaagatgacagccccatatatgtagtcagtgttccgtagttttgagtctcgaagaagaagctgtagggatgacaggggatactgctggcctctccattccattgaaccgacaaaggagtagaggttcgcatttgggtcttcgcattttattgtttgtctgacttccctgaactttatgtcctcatgtaaatccaatgtcaccttgagagcttgtttaattttcaaatttgtttcaccatcgaggttcatggtctctacataacagattccatccggatagttagatgaaagcagaatcatatcagcggggaagaaattatccttctccacctttattacatctccaactttgatattcttccattttgactcttcaaaatgaccattccccctatgcact

SEQ ID NO: 195072 - DNA, 347 bp, Zea Mays
ctccaaaggttacagagggaagaaggtgtggaataggttttaatttattcttcgtaagcatgtgtatgggtttgtcatttaatcaggaattcaatatcacataactgatcattagtccgaagctcatatgttctagtacagacaactcaatggcaaagaacacatgaatcatcagagacttatgtttattgtatgagcttcgacttcattatatcttcgaaggatacgggagtgcaacatgcgagatgttcgcgaatggccgacctctgtagcggtagcattgttcatctattttaagggtcgagcctcggtacatcttatgaaattatacgtttgccccttcctat

SEQ ID NO: 195073 - DNA, 663 bp, Zea Mays
tccaaactggtatatccacatatgatgcatcgagaaatgagagttttactttgcaaggagccgtgcttatgaacataagtgatctacctggtttaggaatgcttgcttctcatatggttcatgggaaatttgcatgcccaccatgtggtgaaaatgtatggacgaaacaactgaagaatggtcgtaaatcatgtttcctaggtcatcgcaaatatattgatcttgatcatccgtaccgtttcgacgcaagttcctttgatggaatgatagagcttggcaaggagccttcaacttattatggtcgtccaattttgcatgagatcactgcacttggtaatttcaaggactcaaaaacttataagtcagtaagtagtttgttctctttgccttactgggatgataatattcttagatacaaccttgatgtgatgcatatagagaaaaatgtgttcgataatttgtatgacacaatatcgggtttagaagggaagacaaaagataacctccaagctcgtttagatcttgtagacatgaacatcagagcggacctacaccctcaagtaaaagattcgggaaagttatacctgccaccagcaagatttggtatgtctaaaagtgagagacgagtattttgtgatgttattagaaacataaatgttccag

SEQ ID NO: 195074 - DNA, 496 bp, Zea Mays
cccctactgacgaggatgtccttgcggagcaaaacctagtaaaggaacaagctgcaaacaatgcggtagatcctaatgttgcagttcaaatacatggtctacgtaagacatatccaggaactttcagcattggatgttgttgcaaatgctctaaatctaagccgtttcattcggttaaagtaagttttcaattagtttttgacataaaatacatgcaactatgcttgtcatcatctgattattcattgcctaaaactttattcagggcttatgggtgaaccttgagaaggaccagctattttgtcttcttggtcccaatggagctggaaaaacaactacaatcagttgtctgactggaatcacaccaattacaggaggtgatggtaagtatcgttcattgaagcagcattcttgtttctttgtctcaaaacaacaacttccatactaataatacatactaaacatctcatagcattcatttatggtcactctgttc

SEQ ID NO: 195075 - DNA, 430 bp, Zea Mays
atagcctttttactagagcggatgagtgtgggctgttgcatccccttgctggtagaagtaccagccaaaggatctaatgttcgcagatgactaggatgaacaaaagagggttgaggcaagatgcttttgttaagccagttactgaggacttagaggtgaccagagaaatcttgaggggctttggtgttgcctctagtgtccaaactaacttgcaaaaaagtttttcctacccaattcggtgtgacaatgaaagggttgagttggctgtccagaccttgggatgtgcctcaaaaaacttccctacaacttatcttggcctccctctgagcagcaaaaaacctagtgctggagaccttgttccttggattgagaaaattgctgccaagcttccaggatggaaagttgagcttctaaacctatccgggaggat

SEQ ID NO: 195076 - DNA, 602 bp, Zea Mays
cagtatactagattgcaaaaggacagaagactagaggagggattaccagaagtgctcatctctgtttgagcctttgaggtctgaacagagcaggagggagtggaggatggtctgaactctgaacagagcagaaggaagcctggagcagagattgccgcaccctggatgctggagcagggacagctgcacgctggagcagggacaggtcacaggtcgaagcagagatgagggcgacgggccggcagtagatgagggcggcagcgctcagcagtcagcagtccagctccaacaagcagatgagggcggcggcgctcggcagtccagctccagcaagcagatgagggtggcggcgctcagagcagtccagcaaccaaatgaaggcggcggcgctcagctccagctagggcaaaagactgtataaggggctaagggcagcgacgctcagtttcagctcccatgatgggccggcccaaatggaaaagagcagatacctgcttcatctgctggagcccaaaacagagaacctagtcggacacaaccctaatcggacgactaatcgccgactaatcgcgattagtcggacgactaggtttctagtcgcc

SEQ ID NO: 195077 - DNA, 408 bp, Zea Mays
gccctccattctacgacatcgcaacgactcgtcatcgtgccacgcgtcgatgcgctcctcgtcttgggagagtggggtaatgagttccaccgggtcatgctcgacccgagctggtgttggagtggaagggtccggaggtgttaccgtcggtgctggagtgcgtggtggggaagagttcgtcgtagttggagtcgtggctggagagcgtggcgctggatttggtgaagacttggggactgtggtaaacttgctcggtgaagaagaggtgcctactcttctaggtcccttgaagtggacgtactcgatggtgaagtcgtcgtatgtcggagtcatgcctcatccccgccttgtcccatgcccatcctcgtccttcatcgaacactacgtcgcacgtcgtgtgcacacgtg

SEQ ID NO: 195078 - DNA, 418 bp, Zea Mays
ccgagaggtcctttcggcggtcccaggggtcccgaaggctgctccacatcagcggtggaggagcaccactatctcctttggggcatccgactaccccgaaaacatggcaggggccattgtactgccgctcatcaccacccctgtcatcgccaacatgcggctgcaccatgttctgattgacggaggggccggcctcaacgtcatcagtcatgctgcattcaagcagctgcagatcccagggtcctggctgggaccctctcgcccattctctggagtgggcccacaaccggtgtatccccttgggagcatcgcactcccggtaacattcggggctgaggagaactttcgcacggagaacgtccagttcgacgtcgcggaggttaacctccccttcaatgccatcatcggtaggccgacc

SEQ ID NO: 195079 - DNA, 323 bp, Zea Mays
cctgccacttcgcgaaaattcacccacactatgttttcccaccactcttcgccgcctacacccagtactcacactaggaagatccccggcaccctccacacgcggcgaagtctccgccgcagccacatccaacgcaacaaaataatccaagccttcatccgaggactcctccgtccaaggaaacgaactcccagattcaccatcagactcaaaacactcagacactgaaccaaacaaactatcatcggcaggcactacggttgaggccgccataaaatcagaattgtcagcagcggttgcttgcgcaggcccaaatgtcggaa

SEQ ID NO: 195080 - DNA, 841 bp, Zea Mays
tcatgcaaaaaccatgaagaaaatcattttgacatccatctgagagataccaaaagtccaagaagaagaggctgcaacaacaatcaaagtatgaacaatcgtcatatgtgcaaccggtttaaaggtttcatcataacatagcccctgagtctgctgaaaacctttggtcatgacgacttttatatcgctcaagtgaaccatcagatttggtcttaatccttaagacccatttgcatgttataggtgtactgcatgagagggtaaaggaacaagatgccaagtacccatacgatcaagagcatccaacaagtcgccattcaataatactagaaacttcatgataagtggatggttcaacaattactgcaacaacacgtggaagccatagcgagtcggaggttcaatggtactacgatcacggagctaatatccttgatgaatcggtaactcatcaacaaactgtgactcattatcaatctataggtcattagaaacagcaggggagtcatcattgttagtacaagcatcaacaataggttcttcatcaggaccgactgtgggactagagcgaggacgacgaatgtaggttttggtgataagtggtttagaagagaaatgtgaaggaggtgttaaagtagaaggatttgtgatgggatgagaacatcagatggagatatggtagatgatggtgtattggaagatggtgacacatatgaaggagcatagatggtaggaaggcacatcaaggaggtgaactatgtagaaaaggaagatgaatgtgtgattgagttataaaagaaatgtcgatttttattaaaactcatatctcatgaaatatgaa

SEQ ID NO: 195081 - DNA, 311 bp, Zea Mays
ccaggcttttggatatcttggaagattatcttatgtatagaggttatcagtattgtcgaattgacggaaatacaggtggagaagatcgtgatgcatccattgaagccttcaataagccaggaagtgaaaagtttgttttcttactttcaactagggcaggtggccttggtatcaacttggccactgctgatgttgtggttctttatgacagcgattggtatgagactatgctaaacttgattctgttgcttaccctaagaatgaatctaatgcctctgttatttctgtgcctccaggaatccacaagctga

SEQ ID NO: 195082 - DNA, 460 bp, Zea Mays
gtggagggacaatggaacgacgagtatagacacgagtaataggtagtcgatgtgatgaagctggtggtgaatatgtctctggtggagatataggcaaaaggggaccaggcaagtgcggatataaaacagtgtcattacttgaaggaaaacacaaaaaaagatgtggtctctactggagaatacgaagaggaagtagaggaattataaaagaaaagacaattttcaacaaatgccacaccacgtgagatacgcatgcggcgagctgaataatcatagcagtgatagccattatgctcataactgtatcctaaaaagacactcgacagattgaacagttaatttggtgcgctcgcggggtgctagcagaacataacagatgcaaccaaaaactcgaagatgatcatgactagtaccaaagagtacctcacccggatatttgttgactaatttagttgatggt

SEQ ID NO: 195083 - DNA, 465 bp, Zea Mays
aggagactcatgttcgtcttcctgatatcctacatacctactcctctttttcttcttcttacttttacatatcttggtccatttaatcatacggtattatttactttttgtacggccctccaccttgccaaaagaaggatcttttgattttatccaaggtatatctacacatttgtcttgagaagcaaatagacgaacatatgatacacaggagcattatttaaaggcacaaattaaactgtggtgcaatcgaggaacctcagatctaacgagcgaggacgatattcaagcggcaatccgacctgaatttcaaattactatcaatcttcatgctatatattatccgtctgattggttgatcgcatcatctcgtctacgtcactgcatatatttggactacataaagtaaataataccgtatgattaaatcttcatgaacggtatgtgcaagattattgtatttct

SEQ ID NO: 195084 - DNA, 276 bp, Zea Mays
gcaaaacaaagtagttaatgtgtctgaacaaagctcaacagtgagccggatcagcccggcagctaaattactgatcaaggaacatggactggatacatcatcactgagagcatcaggcccccgtggcacccttctgaaaggggatgttctggcagcattgaagtcaggtatcaattcaagttcaaccaaagaaaagaagtctccagctcaaccttcgtctcagccaactcgagattcccaatctcaagcatcctctatttcacaaaaggatgatac

SEQ ID NO: 195085 - DNA, 775 bp, Zea Mays
ttggtgagagttcaagcaaattaccctcaatcattcctctaaaagaggtaaaattttcctgtcacaagtgagcataggaaatatgtattcatctagtttattactcaatatctgattcttctccacgtctgtactagccacccattaccttgaagccatcagaaactgagcaggatgcaacagaggtagccgttgtaaaactattgatcaaatcctactatgacattgtaagaaaaaacattgaggatgcaatcccaaaagctgtaatgcactttctggtaagtttactttacacagttgctgtgatatcagtaaaggctaatttggtactatgtgcttccaacttcctcacgcaataattcttaattctagagggttatgatatttaatctccaccatacgtctggataaaagctttattgcctgacatagcagctaccctacttagaggattttgttttatggtagatatatactgtcagtactcaaaattactgtctaatcaggacactgttgtttgacagcattgtttttttggcaggtgaaccatacaaagcgggatctgcacaacttcctaattcgcaaactatataggtgcataagtcaacatttggttgtatattttcttatggacatctctgttctgattataattgttctgaaacaatgatatattgtgcagagagaacctgctcaatgaattgatgagggaaactgatgaagtacttatgagaaggcagcgtatccaagaaatgcttgaaattcttgaacaggc

SEQ ID NO: 195086 - DNA, 875 bp, Zea Mays
ccgggggagaggtcaaggaaggcgagcgacgctcggcaggcagggcatcccgcgaggccgcgacagaggcggcactccgctcccaccaacccacaacaccgatcccctcctcgccgagccgccgccggggataagcgtggggaagtgagcagccaaaatctaagacaccgatccccgggcgtgagtcgcgaaggtagcggcggagaaaagggcggagccacaacgcggtcgtgagcccgcagccaccggttccgtgcggctagacggagagagaggtatccgctcgctgcaccctcttgccgtgacccgcgagacgctaaaaaaagccgacgggatttggcaacttggcggtttggttcggctgtagcgtgcgtgcgtggttggtggcatacgcggccgtctcgttgcttttatttatttcgatccgttgatgtttgattctgcgtccgtccgtgcgctgcttcgtgaatctgctgtgtcgcggcggcggcggaggaatccgcaccgccgtgcgtggggttggtagatctgttcatccctgcgtgtgtttccgccgctgaggcgttttcttcgtaattcttttcgggagtgctctgttacgctgcggagtgggtcgcacgctcttttctggatgcctatggtgttgacatgtgggcgtagggaagggccgaagcccgaaggggacagccttgagctttctgcttgttttttcgggtgctttttaaatatgttttttcacgcatttctggttcccttttcccccgcgtggtgttgtagatcgatgaacagctaagcgaacaccatctgatgttcgtcgttgtttgactgttgcatgacaggttgcgaggcttgctgttcagccatgtcgacggcgc

SEQ ID NO: 195087 - DNA, 1297 bp, Zea Mays
cgccagagcagctgttcgcaagtcattcgaccctgcaatccgggccgcctccgagagtggggccgagcaatgagttgcttactcaagttccggggaactattgcactttcgatcttgcgccggacctcactcgggcaaatgcgagcaatgctgctggtaccattgattttactcgggctggtccctccagcagtgctgccactctgcccaagtatccgagacatggattgccagctagcagtagcaatgagcagtcctcttttggagcgcttttcccgaacagaagtgctaatggaatgggtatttttacttgtcaaagttcggctaacgaaggtaaggttccagtgaatttggaggcaatgactacatgtccataatcgtagctttcctgtgatctgaccactcgcggcaatttcaacttgcaggaatagcaaatgttggtgtgcagtttcaggactcaagtgtccatggactgcagaaattgccattcaaatcgatgactcatcagcatcctacactgcctggtgatcgaatccgtgtcacctgtatgaatgttggtgggttgaacttgcaatgttgttacaacctgacttgactaccacagtatcactgtggcggtagtctttgagatggctacaaagttacactgaacatttttttgccacatctaaaatctgtacctgggatgtcctcaagtaaagacagtcatttgaatatgcacgattagttgtgtgcaaccaaaacatttacatcctccttgcaagaaaaaaacatttatgcccagctattggacgatgttcctgctttcagcattttaatagcaatatacatttggtaaaagcgagaaattttgagattactattggttgatacttataacaatatcttgatgctatttcccaaatcaattatcctcatttgacatacattgttgaatctcctgacatgcccatggcacttgaataggcggagagttttttgtgggcgaagctgggctttttggagttatctgcttgtgtcatcggttgcgaatgtctgtagctaaattctgcgaggtgctaaaggattgtcctaactattttcttggtttcacatttaacactgccatatattttttctgctggtaaagctatccaatttatgcctgaaattttaaagttatgtgctcgcatatgcttgttacagcatgctggaggaattccagaaaaagctggtgaaattgtctgcttggagaatggcatgagtattgcacaatggttcaaattctgcataggggtgagtattacatcaagccgtg

SEQ ID NO: 195088 - DNA, 506 bp, Zea Mays
tttcaaggataagttcaaagtaaacatttaggtagaaggcctcaatatcgcaagggtcaaaggcgacaacagacaagggtatgagagaaaagatgaaggcattggaaagccagtgatatgagtacaacaaaaaatggagttacgtccaagcttacacgtggtaaagaagaggatatagccaagggtgaggtaagtaaaacaccactctcaaattgagattggagactggagattttagataacagacataatgtaatcacaaggcaagatagagtgatgagaagggtaaaggaaataacaaacaaaaacacaacaaaggatagagttaaaaactcgcaggtgacaaagaagaggatacacccaaagggaaaataggtaaaatgtacaactctcagattgggatgggagagagaagattttaaagggcaggtataagataaacatcaaggtaagatataaaggtgataagggtaaatgtgataatggtgaaaagcataaccatggac

SEQ ID NO: 195089 - DNA, 455 bp, Zea Mays
ggagattcagcgacaagtacaagaattactcgataaaggttatgtgcgtgagtcccttagtccttgctctgtccctgttttattagtcccaaagaaagatggctcatggcgcatgtgtgtagattgtcgagcaattaataacattaccatcagatatcgtcatcctatccctaggttagatgatatgctggatgaacttagtggctcgatgattttctctaaaattgacttacgtagtggatatcacccaaattcgcatgaagctaggggatgaatggaaaacggcatttaaaaccaagtttggtttgtatgagtggttagtcatgccttttggtctcactaatgcacctagtactttcatgagattaatgaatgaggttttatgtgctttcattggaagatttgtagtcgtctacttcgatgacatcttgatctatagcaaatgtctagtagac

SEQ ID NO: 195090 - DNA, 467 bp, Zea Mays
ctcgaatgcccttcataagctagtgatgagacggtacaatattctactagcacaacctccaaatgtgtctcaagtgcttactgctgcagcaaaacatgtttggctatggaaagaccttgtggctggggaaccaccattggcagagtccccatacataagtagtatagcaaatggcagtgtggatcattcgaatacatcgaacaacatgggttcagattcttcagacgcaccccataacagtactcaagggcagaatagcattccgggtgatcagcaaaaaggtggtaacagcaaggcagataaacaatataaagttaagcaacctcggaaaaaccagtcagacaatgtatctaagccaacaaggaccgatgaagcttcagttgatggagtatctgatagttctaaaggaagcactgctaccgagccaaatcaatcccagtcttcatcatcctcattaccaagttctg

SEQ ID NO: 195091 - DNA, 567 bp, Zea Mays
cgagagtactagcttcgtgccctcatcgcttcctggcgactcggacacggacagtgtgtgagactttttcacagccgcattgaaaacgtggcagcaaggcgtcggcttgaggagctgaggtactgatgaatgaacagcagcagcagtagcgtagtagacagtagggttggaaagtcgggaaccaaagttgcagtagaacattgtgtgtgccgtgtcctgtcgaacagacgtggtccaaggaatagaaagaggttcggcttgaccactgacatgccacgcctacatacatacagtcgcgagtctgacggagtgcactgcactgtacaccgaaaggcggagggggtgctgcatgattgatgatgcttttcgttgggtggcgattgaaatgtgattcagcagcggtgggcgcgaaagggcacacagtgatggacggaacgccgaacgcctgctcttgccttgccttagccttcctgtgggctggctgtgacaaccttgccttgcattgcagcagcatggtgttgtgtgtggggaacgcctagctagctgccacgccacggggcggacgag

SEQ ID NO: 195092 - DNA, 491 bp, Zea Mays
gaattgtcatgtgccgtgagcagccgtgacttcgttgtgttttgttgcctcacgcggtaaatagttggaaacaagcgctgcccacagcaaaaagctcggccgcagacatttccggtgctgcgggcgctgcgcatctcttgccacccaggtgggagtttgtgggccagtccgtttgaaaccgtgacactgtcgtcagggcccaccgccagtccaccttttcctctcaccccatcccatctccggatctatcgccctcgccatcggcaatcggcatcgccaccggtagtgggagggagcaagggggggacccaggccaacgccgcgcacctttgccctcttatcatcatcaacatcaccacgggcgggggagacggccctcgaagcgtacccgtccccatcctccttttccgaaccaccggagcgcggcggcgcggcgcgagacccttcccggcttctactcctccgatcctccgcaccggctgacgagtagc

SEQ ID NO: 195093 - DNA, 396 bp, Zea Mays
ctcccattgcacatcttttgcagcgctagacctacacaacacccttctctgttcgcgatgactggctgagttccatcgctgcaactgttacatctttatagccatgcattgtctttcattgttgtaaccaagttcattggtggccgattgcttttctaatattttagtgtaactcgttattccttaaagcgacttatccatctctttccttttatattcatcttttgtaaattattgatgacaatcctgaagtttatgtagatttatcagaaagagtccaagtggagagtcttcttgtgtttgcatctatttgttccaagtgcgcttcctctgacaataatagcttggatgaaagcatctgtgtgcagcttctactaggttttccttccattattc

SEQ ID NO: 195094 - DNA, 323 bp, Zea Mays
tcagacaggacaagggcaaggaggtttaccttgagcagtaaggaggcaagaagaagataagattggatagagccactcgtgcagcagttgtagcagcagcagatcaggcagagcagggtggtcagctaaggattgcctccaatcagatcgccttcagggtccgtcacctctcatctcgggcttgctccactcctgctctcttcgacccttcagccaccactccaccttcctccactacggcagctcctgtcgctcttgagccttccaccacacctgttgcgctccctgcctccaccacaccagcttccactgctcccgctccc

SEQ ID NO: 195095 - DNA, 432 bp, Zea Mays
tgaaaggtttgagtagtcctacgtgaaaaacatcatggatgcgggctcctttaggcaattccagacggtatatgccactgagccgatgcattccagaacttggaagggccctgcataccttggtcccagtttcccttttggtcggctgaccagtgattgtgcctgtcggtgtaacaggtgtagccaaacccagtcgcccaccttgaactccagatctcggtgatggccatcataaaaccgcctagcatgttcctgggcctgtaggagtctgtctctgacttccgcgagaaagcagtcctgttcgcgaaacatttcttctatagttggtgtagctgctcctccttgctggtatgggatgagtggaggggggtctctgccatagaccactttaaacggggttgtcttcagggctgagtgataagaggtattgta

SEQ ID NO: 195096 - DNA, 630 bp, Zea Mays
cacgtaactgacacggtgagtgcgtatgctccgcgcgggttttctggcttcgtggtcacgacccgcgttgtagttggccgcgtttatacttgcatattatgactccaaccgtttcataaattgacacgtcgatgcggcttggtcggtgtggtgtagtatttgggatttatgattgtatacttcgatgttaacaactacatatcattttgggatttattatattacgcactttggcgtgggtcttaattaattattttttgtaaactgtttacgatactttgcacagctatttatgcttcttatgatcacgcagttaccaaaccttcaccctgactgtgcgctgactagtggacccacagtcccttgccgctcccccgcgggccgaccgagctaataattcagctcgggtccacccacaacagacaacagacacaaaccctaaaaaaatcagttcctccccgtcgtcgtcattcgctcctgcgatcgccatcgacgaccccccccacctcttccaccgccgtaatctccgctgttcatcgattcaccgccgtcgttctccttccctggtacgtttcccctctcattctttcgagttccccccattcttttacatagttcagtcgctaatgt

SEQ ID NO: 195097 - DNA, 311 bp, Zea Mays
attttatctgtaaacaagttaaacccaaacggatgcctggtcgtcgcttgttgacagttaacacaagatcgaacaaagtcacgcactgagggcttcattcctggccagctcaacactgccttgatgcaccggtatgtaaccagaaagcctgactgcccacacagagtgctatcgtgcaaagttttcatggtccgttgctgcacttcatggctcgaaaccagccagattttgttcttgtgtctgatcactccatgcactaaggtgaagggttccaactgtccaccggttgagaagatagccattatcttttg

SEQ ID NO: 195098 - DNA, 701 bp, Zea Mays
cttcttcctttctcacagtgtcccgcaacttcttcctttctcacagtgttcgataactctgttgtttcaggcctgccttcacgcccgctactgggtcgagagactggccactgctacccatctgcgtaaccgccttcctaccaaggcagttcgtcaccccacccccttctttgctctctttggcacctcttcctcctacgaccacctttgagttttcgggtgcgcctgctatcctaatctttctgccactgcccccacaagcttgtgccccacttcatttgtgtcttccttgggtactctcctgatcacaaggggtatcggtgccttgacctctccacccatagagtcattgtctctcttcacgttgtctttgacgagtctgactttcccttctccacctcctcttttgctatctctccggttggacaccatcctcgaggctgactatgtggtgccccctattgctcccctgctacctgccccgatgcccgcacgctgctcacacgcggcactatcgtatccagctaccggagtcctttgtgttgccacgcgcagctccctcttctcccacgctgccacgcgcggcaccgacgtctcctgcgctgccgcacgcggacccagcgcccccagcactgctccacgcgaccctgcctctgtccgccacgacgacatcctcatcccgcttcgtggccccattcacg

SEQ ID NO: 195099 - DNA, 384 bp, Zea Mays
attaaattctcctctgctcaacccagaagccatctaggttgatgacctctcttttcacctagatctggtaatcttttacttgtgaatcatgttgtgacgttatcatccgaatctctagatcattcatcgagatctaccccgtcatcttgttatcttctataacccactctcaagtattaaatatggatcagtctaatatctcattatgatcgttctcatactcttctctgaggatcatgacgctgttttatcgattttatctctaagcggtgtatccatttggttcaatggatgctgttgttgtctttggttctctggtgtctctaaaagctcatccatcttgatctcatgattggttcccctcatatccactctcgtataaat

SEQ ID NO: 195100 - DNA, 412 bp, Zea Mays
cagcggtcgagcgagtccagatgagtcagaagatggaggaaacagagaagttggtggaacaactccgactggagcagaggagcaaagaacttggagaaatgctaggagcagctgtggaaggggaacaacaccatcagccaccagttcctccattcatgaggccacaacaggaaaggagggaaccaccacgaggttttcatggtggcatgcatggtggtcagggagaactacgcccacatggggagcagtatcatcaaccactactgaagctgccatttccgaagtactctgaaggcgatccagtggtatggttaaataattgtttggaatatttttcgatcttcagtgtggcagctactatgtgggtttcagttgcatcgatgaatttggaacatactgcggcacaatggtg

SEQ ID NO: 195101 - DNA, 427 bp, Zea Mays
tagatgtgtccaacatccaagcaaataccaagttagcgaaccatactggatgctgccgcaagttcttgctccaaactgtagcacccagacatcattggaattgttaaatgttcctcattataaattggattgatacgttcatgtgggtgctgagcttctacgcataacaaaggttccatttctccacccttttcaatcaaaagatgtgttttattccgtagcctctttgttcttagacattgcaatctcatatctacttctttcatgcttggtctatgccctcctttggatcttaagcacgtttctataagtgaggagatatcattaatctcttcttggtctgcctcttccacaacttgagaatctattatttccatgagagccccttcctgtagtccttcaatgaagtaatgagataagttttgtt

SEQ ID NO: 195102 - DNA, 526 bp, Zea Mays
gatcgctattgttttccacaggctggtgtgccaattgttgaacccactacatattaggaagcttctgggattcttgagtggcagctagctatgattgatgaattggctgctcttgaacgcactggtacatgggatattgttcctttaccctcgcatgttgttcctatcacatgtaaatgggtcttcaaagttaagacaaaatcagatggttccattgagaggtataaagctcgtcttgtggctcgtggctttcaacagactcaaggacttgattatgatgagacttttgcacctgttgcgcatatgactattgttcgaactttgattgcagttgcagcctcatcttcttggactatctcccagatggatgtcaaaaatgcttttctcaatggcgatctacaagaagtttatatgcatcctcctccaggggttgatactccctcagggcatgtttgtcgtctccgtcgcgcattgtatgggctgaaacaagctcctcgtgcttggtttgagcgattcatctctgtca

SEQ ID NO: 195103 - DNA, 894 bp, Zea Mays
tcaattttaagactttcaacttttttaataaatcgacgtttcgtttcacagcttcattttgaaaagactaaaaggacaataacataattaagacattataatattctaattaaacaataccaaataaggattgcatttttcattatctgtcatctatcatttaacgtatagagttgaaatagagaatgagtatacgacagaaattaacatgcccagttcaactcgtccctagatgttgtgcttcagttagaacattataccgttgcctgcgtatcttctgttaccatcctcgtggatgtgtcgattcaaactcggaagaatgcataaataccattttttggaaggagaaaaaaagacaaataacatctcacgactcacgtgatcctctgcgtgacctcatgtgaactgggcatgttaatttcttacatatgctcattctccggttcaactttagacgctggatgatagatgtttgttaatgaacaatgcaatttttatttggtgctgtttaattaaaatcctgatgtattaattatgctgctgtccttctagtcattgcaaaataaagctgcgaaacaaaacattgatttattgaacaaagttgaaagtcttataattgagtttaaacatgtaagagacgactatgacagtttactgtcttatattgcaacatgcaacgaaatgactgaaaaatgtcatttaattagacagcgtgattaaaaaagtctctaatatttagttatgactatatgtctatataatttaatcgttatttagataaatgaaactgactaacacgtttacaatgacataagaaacatgttagtcttacagaaaatgataaggacattgtaaactaaacttacaactgtggaaaaattaaaggtgtataca

SEQ ID NO: 195104 - DNA, 746 bp, Zea Mays
tgccctcggggaagaagcgccaaaggttcgtttttccccctccgcaccgcaaccctcgccgctcgctcggatatactccactagcagtgccatttctggatgctccttcaatccaaccctactagtccctagatctgccaccgatccaaggcaaggcatggccaccgtgcggcctgcgtgcgtgcctcgctgctgcggttgtcggcaggtttatttagatgccgggcgtttaccccaactgaaaatctagattgagctgtcgtggactgataaactcaggtcagcactgcaggcaggagcagccccagaggacaaaatggctcgtctgttcttactcttcctcgtatctatttattctttctctctctctctctctttctttttatgtcgatccccattgcctcgtcgatccagatacactagggagtgctttccattgctatgaccatatatatatttgacaaaaaaggtctctggggtgagtagctacagagcgaatggaacactgatgtggttttgtttacctgtatctgcatcagcaggggaaggaaggatttgtgccatctgactccagtgcctgcattctagactcccaagctcgaacacaggccagggaagggaagcggtggccatggaacctcacagcctgcggttcgtcaggtgcccgaaatgccaccagctcctcgtcgagtacccctccattcctgtctacaagtgtggcggctgtggcacggttctcagaggta

SEQ ID NO: 195105 - DNA, 438 bp, Zea Mays
gatctctcattcagagtttgatgtggttgattttcttatatgtgagatcgaggacacggtattggatggtctttgtgcctggcgacagctgtcatatgctcattatctctgctacatcttcgcgcagctgatccagccaccgcagttccagggcacccttgaggcctctcgcctccactttggctcctatcgtccagcccctaaggacccagtgccagtacctgatccagtgacagacattcaggcagaggatgtgacattccatcagttcgagactcagggcacaacagttcctgatgatgatgatgattttgggatcctgcctccgcctcgtgtgcctccacgctcacatgatcatgaggctgggagttcccgtgctgcccctccaccgttgatcctgctctggctacgatccttcagtctcttacacagcagcag

SEQ ID NO: 195106 - DNA, 412 bp, Zea Mays
atttattttcaggatgatgttgagacagttaggtccaaggactcaaggagtggcgatgttttacagactgcaaaaaagaggaagaagggaggtgcagggaaggtttctgtcacaaaaaggtcgaaaagagagggtgaagaacaaaagaaggcatcaccctccaaggataaagattgtgctgaaactaatggggtaagcaactcatgatctgcttgtggaatagttttctgtaactatttgatgaatgtaagtgttgtttcaattgtctagaaaaggaagatgttgactggggataatgccctgatgtgccaccagtgccagaggaatgataaagggagggtggtctggtgtaattcatgcagaaataagcgcttctgtgtgccatgcattgaaagatggtgtgtcaatcgct

SEQ ID NO: 195107 - DNA, 306 bp, Zea Mays
attggacataccttgggtaaaccttgtatggaataatcactatagagcaggaaagattccctctgaaaacaagattggatccttttgctggaaagacatcctgaataacctaagctcttttagatgattttcaaaggtcaacatgcaagatggtcgtactgtccggctgtggtgtgatgaatggaataatacaaccctcttcacgaaatacccaaagcttttctcttatgctgcaaacaaaaacatcacagttttgcaggcgagggagattggacaacctcagaacatgttccacctccccatgtc

SEQ ID NO: 195108 - DNA, 365 bp, Zea Mays
ctcctagagtggatgagggtttctttcttggttatgcatcaaatgcgcatgggtatcgtgttttcaacaataccaccggtcttgttgaaatagcgatagacgtgacatttgatgaatctaatggctcgcaagggcatgtttctcaagatattgcaggaaatgaaatcccaccaaatgtagccatcaagaagcttgcaataggtgaggtgaagccacaagaaaaggacgatgatgaagggagaatttggatgacaaatagggttgttgatgggagtgctagaatggttggtgaaaatccttccatccaagcaaacccatcaacctcaagtcatccaattcttgaagaagagcttctaccacaagat

SEQ ID NO: 195109 - DNA, 343 bp, Zea Mays
agatcccgtcacaagaaaagttacaactattgctggaacggggagtgcaggatacagggatggtccaggcttgacagctcaagtgagctaaaacttagatcacatttttccatcttatgttgacaatttgtgatagatctatcatgcaaataattttaaaatgccatgtcccgcagtacttgctatctagctagcttaattgtagtctttggataggtagacggtgttgctttcttgagcactctactgtcttattgtgacaaacaaataattttgactagggacagctcgatgacaattgttttttgaattttctggatgcagctttctgaaccagcaggac

SEQ ID NO: 195110 - DNA, 359 bp, Zea Mays
gctgtacatcgccgccgtcttgtgtcctgatgaccgccgtgcagaacgcggcgcacacacgcgcgcgacagacagccgacgacagcagagagatgagtgtatatatgcatgcacacgtccccatgaacaaaccacgcttcgccatcacagacgacaccaaaagacggctgccgaactctatctccaaggcgtactttatttggacttgcaggccggccggccgtgtcgtattattaacggcttccaagtctcgcgtgcatgccaaccatgcgagctggctgcaccgcgcatgcttcagagggctgctgcagcctagctaggtagaaagctagggttttcagcgtgccgctcccaccgtg

SEQ ID NO: 195111 - DNA, 310 bp, Zea Mays
agactggcgctggctccatatgtagaccctcgtgccggcgtgaactccagctccaacgtccagccatgacgcaaatcacccaccatagcgaatcgtgagttgctgccaccttcgtaccttggcttcaccatcgatctgcgcctggaggatggcctatggtgttcgtcgggtgtctgggtgggtgctcgggcgatccagggcgcacgggagaccaccttgtgcctgcaattgcttgccgaacttcatgctccgtcgtgaacccatcgcgagccatggacctgctatcctctgtcctcaccaccggtatgca

SEQ ID NO: 195112 - DNA, 387 bp, Zea Mays
attcgactatctcaagtcagagatagcgacagcactaacattggacacacaacactgctattttagccccttgccgcacgggctgctactgctagctagctagcaacttctcaattcgtcctctccccttccttcaaacaaaacttcgttctcttctctctccggcggatcgacctctccccgctagctccggcatttatctccgccatgcatcgtctccgtcattttgctctccatgtgctccttctcgtcatagcgcatgcacccttgccctccgccgcggtagacacgctacggcccggccaagcacttgccggctggaagaagctcgtctctgccaacggcaagttcgcgctcggcttcttccagctccaaccagggagctcc

SEQ ID NO: 195113 - DNA, 590 bp, Zea Mays
cggcacggccctccttgcgcaccacccacaggtagggtcgcccgctggcttggagcccatgtaagacctcctctgcctgtcgcttcgtgtaccccagcaagcttccgaacgagaggtacacgacggacttctccggctgcgcgtcgagccactccatgtacgccttcttcgtctcgtcgtcgtgcgggacgagatggatctgtgctagctcgctcgcactgttcatctcgccctgatgacgactaccaccaagaacaccaggaacaggaaccgccggcccgacggcgaagacgtccatgtatgggtggactgctctgagcgcgacgtcttccagctccccgaacgtgttcaccagaaccaccggcttattctcctcctgctcctggtccatcttctgaaacagctcgcgcagtgattggaggaccatcttggacaggccgtcctgcgacttctcctcgctgagaaaggtcggcatgtcacgggccctaagagggcggtgcaggcccgggagagtgacctcatgctggccgtggccgcggccgccgccgtcgtcgaggccgaggaggcggaggagcgcgtcgtgcccgtgg

SEQ ID NO: 195114 - DNA, 293 bp, Zea Mays
tcaccgcattgttgatactcctatggagcttggtgttcacttatgccctaccaacattgcgccacttaatgattccacttatactatcatcagctaattaggagccttgtctatttgggatcacatgtcctgacatttcacattcggttcatatcttgaatcagcttgtctcggctcctacacagcttcgttgtactcacctccttcgcgttctgcaatacctttgtgaaactatctcacgtcgtcttttctttccccacttgagctcccttcatcttcaggcatactctgat

SEQ ID NO: 195115 - DNA, 878 bp, Zea Mays
agccatgggcagtaggtgatgtcatcggttgctgcatcaacttggatgcaggagaaatttccttttacaggaacgggacttctcttggtgttgcatttgatggaattcgcagcgtggaacctaagaagggatattatgctgcagtatccctctcggaaggagagcgttgtcatcttaatttcggctcacatccattcaggtatcctgttgatgggtttgatccattagaggcgccaccacgctcttggtcgtttgtcacataccttcttagatgcctgttccggttgctagaagttcacaacctggagaaatctgaatcagcatacttcgagaaactgaggagggtgaaaaaatttgcaccactacaagaactctttggacccatttcagaagggatctgtgcagaaattttcagtgctattgaagcaagccaggggtgccttgagtatattgcctggggctcgttgatcactctactcttagatgttttcagaactcgtgagccgcatgatttctcatgccttgatcaggttcttgaccttttcctccggttcccaggttgcacttcattatttcaggagctcattgtggccctttcttgcatgtgcaaagttgcaccacttgtgttgacagaatgcccatattctgggtcatatccatttttagcgctggtttgccaccttcttaggcataaggatgtaatgtgtttatggtggaaagcagaagatttcgttttctcgtttgaaggcttccttacaaggaagattccaaataagcaggatctacagtgccttgtgccatctgtttggtggcctggttcttctgaggatgaagttagcatgacactgacgatgacaacactctcagatgcaataaaa

SEQ ID NO: 195116 - DNA, 500 bp, Zea Mays
acttaatgctggtacaaaagataaggccataaccccccatgcacttgaaacttctagtgtcttagaccaactcagccacatgcatgagatctaacacaaccaatagagtcttggattgcataatctatcaacccccacctgacatcaaaccaaattttgacctacatcatgtagtctatctcatccataactatcttaaccatattcccccaactctgatgatatacaccgaccccgactcaatgagaccaagaccggaaaagaacaagatcaacctcgtcaaggaaggagagaagtcaaactcgaccttcggatgcactaccatctagcacaaagttctttctcaccctaaactttcttaccatatgctcttcttgccctagcctacccatcttttataataaaatgactatacatatagatacccatgctttcctagtcactttctaattaacatgaaacttcttattcttaaactaattagaagttaaaggctaaac

SEQ ID NO: 195117 - DNA, 349 bp, Zea Mays
gtccttgaaggttacaattgcactattttcgcttatgggcaaactggtaccgggaagacttacacaatggagggaggtgggactagaaagaccaaggtaaatattttgttatgcatataatctgaaggtgtagcttggatctgcattttaaatgttataacgggttcttccaatgtccactagaatggtgaactcccaactgatgctggtgttatcccaagggctgtaaggcaaatctttgacattctcgagtctcagtgcgcagagtatagcatgaaagtcacctttcttgagctttacaatgaagaaatcactgatctgttggcacctgaagaaccaaaattccctg

SEQ ID NO: 195118 - DNA, 414 bp, Zea Mays
tgtttttgcacaggagtgtctggaccggctgtcaattgctgttggtggtaatacgattctgtccgtggcagctgagttgctcccatcgtttttctcctctgaagattggaagagacgccacgcggcactagtgaccatagctcagattgcagagggctctgctaagatgatgattaagaatctggagcaggttgttgggatggtgctgaattctttccaggaccctcacccacgggtgaggtgggcagcaattaatgcaatagggcagctttcaacggacctggggccagagttgcaaaatcagttgcaccatgttgtgctaccttcattagcttcagcaatggatgatgtccagaacccacgtgtacaggcaagtgattgttgtatcttttttatttaattttctcaattggc

SEQ ID NO: 195119 - DNA, 356 bp, Zea Mays
tgatgactggttgcacatagtaaagaggaagttagaggccatcggatgccccgaaaaccagcgtgttcacctagcggctcatcaactctccgggatggccctatcctggtgggatactttcagcgctgctgtaagagatgctacctgggcagaatttgaagccgcttttcgagagcatcatgcgcccttgggaatcgtttagctcaaagaagaagaatttcgggagttaactcaaggagggcgtttcgttagtgaacacatccacaaattcacagagctggctcgctatgcgcctgatgatatcagcacggaagccaaaaagatggtccgtttcttgaaaggattgagacgtaaac

SEQ ID NO: 195120 - DNA, 404 bp, Zea Mays
ctgaaggacagagtggcaagtagtgacggctgaggttgcgatggtcataacgtcagacaacatggagacgggctgtagagagacggctaggatgtgccacctttttccaggaccaccactacctcctccagcgctgccgccaccaccatgttgatgccaacaatagttgaccccaccaaagctggtagaagaacgaggcgacggggtcctagagataggagtggagggcttggtgcgctgagatggcccaccaggaccgaagctatagagccatcacgatgatagaaggaagctatagagagctcttcaaggatgaggtcgttccgggccgtctaggaggggtatataatggaccacatgatccaagtctttaggttgtcgtagcactcattaaggccgcaaag

SEQ ID NO: 195121 - DNA, 597 bp, Zea Mays
cgagatccgtggacaccaagcccgtcgtcgagcgccgggtgcccaagatcggcaccactcctgaagtaagtgtactgcaccgaactgcgctgccctggttttcttcctctctcactgaaggaggaacaggtgctgcattgctaacgccctgtctgatcttgatgcacgcctatgcctgatcactgtgatttttgtcgctgggatggcagaagcagctccggagggaggccgaactgcaggcacagcttgagtccacccatgaggacctgaagaaggccaaggatcaactggcattcatcctcggagagagggaccgtcttgtcggggagctcaacgaggccaagagagtcgctgatgagactcacgagaagctccaggatgccctcatggccaagaggtgggccgaggaggccactgagatcgagaagttccgcgcggatgagctggagcaggcaggcatcgatgaggcacagaggcgggaggaggagtggcagagggagattgagtgcgtgcatggccagcacgccgcggacttggagacgttggtcaacacaacggaggagctggagaggctcagacgtgatctttccatggtga

SEQ ID NO: 195122 - DNA, 331 bp, Zea Mays
cttggatggtgagatgtaatgggaacaccacttcattatattgggaacaggagcaaaccaaccacttagtgtaaatcgtgcaagcagtcatgataatttttcaaaacagtcatctcaccgtgcatcagctttcaaaatgacccttccacctcccatggtacatttttaaatacaccctctcacctccaccaacgcacggtttgcaccaagcgtttgatttgcaccagatatgttcccaattctatttgggttgtcgtggaataccactgtagcatatttggacttttgtggaaacgaaagtaagtagtgaaacactatttcacaagattta

SEQ ID NO: 195123 - DNA, 585 bp, Zea Mays
gtcgaattccagaaagcgcaagggtctctgtaaaagaattctaagactcagtaaatagctacataggactgcgggttggtttctataaaacacagggtctttttaacaaatgcgacacggcgaaggggtatcttgtgttttcagccgcacgattagaatctgagggctcagattagatcactcaaccacgaaccggtatgcgctaccaaccgccggatccgcgatctacagtgctgatttaaaatgccctaaactcatcctggaccgtcagattgacatccagtggacacagaaccctattgcgaaccggtacgcccttgtctaatcagaaccgttcaacggagaatcgacgattcctggctcctcttccccgatagcccacgggcgacggcggcgctgccctggcggacggccatacgccggcgaactcactgcccgacgattcccggtaccaaaccccgatccaacaggtgcaaaacgtaatagacgtgaaggcagagctaggtatagtcgtcttaccgagggttgggcggtggagtgaagctgtccacggcgataggcggcttccgcgaccgtgcccgacga

SEQ ID NO: 195124 - DNA, 420 bp, Zea Mays
tggaatttggccgaagtccatcaccggaatgcgcccttgccttgtaaaacgccgccgtgaccccccctcaccgtcgacccgctcctcggttcttgttctgcccaaaccaaagtgtgtacgtaggccctggtgaacccgtgaacctttacccagcctcaatttggccgtccccgtcgctgtttgatcggaacatgttcatcctcttgtccatccgctcggtcaccgtgaactgattgattcagtgtcccctaggtgaaattgatggaggggaaatggtcggggtggatctaattgtgtccctgtcgcttgggagctccagccatggcgtcatctggccggaataggctcgccggagtgcggcgaggactgttcctcgtcgtggactttgctctgcgaaagtatagaacgtggaggttcttt

SEQ ID NO: 195125 - DNA, 494 bp, Zea Mays
cgggttataaatattatctagtgattattgatgattcactcattatttgtgaacttttcccttgcgtttgaagtccaacacatttgcaactctcatgtacttcgcttgggtttccactcaatttggtcgcatcattaaggtccaatgtgacaatagctgtgagtgataactcctctaggtcattcttctctcatggtgtacaacttcgaatgtctagcacctacacttctcagaatgtcaaggttgcgtgcctgattcacactactaacaatatcatgtgctccttgctatttaggcatccgttcttgcttcctactgggttgatttgcatctgcacaccccacttttctctttttagcgccactccatcctatgaccatttggcgtctttgagtgtgcatgctaccccaacctttctgtcactgctccccataagcttaaccctcgctccaaccattgtgtcttcctcggttactcccggatcacaaagggta

SEQ ID NO: 195126 - DNA, 770 bp, Zea Mays
ttgtgaatgcctaactgatcccagagagtcgcctccacatggagcggagaggtgccatggctattgccattaagctgacacaccctgcccgccccaccagggagtcgcgactatgcttgatgtcgccggatgctgaaactgcacaggtctccagatctggacgtgccctcgggtccccagggtaagccatgggcggcgaccaccccgtgagcgcacgaaggtaggaggtggggttgagcttgcttgacggccgtgggtggggaggtactggccttggctaaaaggagcatgaagaattgagaggagaggatgtccttttaagcttggggcagagaggagctctatgctcatctccaaagcagcgccagcatcttgttcggttggtgcacaccgccactctatggtcttgggcaaaacaattaagacacctcccatctgcatgcctgatgaatttccttcttctctcctctctgtcggccgattggagctggcttgaatactgatttgatgtcctttgcctacgccaccagtagggaaggcagactacctcccagccatgagttaaatcctccccagcctaggtagcagtagcaaaacgcgcatcggagagatctggttgcttctggttttgattcgctggagaagatctcgctgacagcatggttggtgagcttgaatgcccttcacttgcctttcctctccccttctcatgcttgctgaatctcgatgtgcgggcttccgccgcggcattgaagatgggctccgaaaat

SEQ ID NO: 195127 - DNA, 308 bp, Zea Mays
accattcgaagtgaatactcatgaacaataatcatcttagcaatcaaatttctagtgtgatcatgatcatattcagtgggattaacaacaagagaaccatcatcaagagcgaagctgatagtaccttgagcaacctttgattttgcattggccaacttgttctggtaggcggtgcacttatcaagatgtcgattcagctgtgatgttggacccccaggttgatacacatacagtttgtaacaaaacttgcacttggccttcgtcaccatttccccaaacttcttctttgattgaacttcgaccacctt

SEQ ID NO: 195128 - DNA, 359 bp, Zea Mays
ccgagattccagcgtggaagatgggggagagggagttcaaggaggaggtgtggaggctgatgacggggatcgccaagctggtggagccgctgaccgacaagaacggcttcttcccctaccacctgttccgagcacagtgagcatgtccatgcatgcacaggcacagcagaggtgggtggggtcgatggtcatggagctgccgcgttgtatccgtcgggcaccagggccagtagcaagcaacgagttcgccggagagagacagacagggagagtgtctatgctatggactccgtcttctagactctggacgggctgcttcttttgttttaaatcctctccattttttgtaactacaggtt

SEQ ID NO: 195129 - DNA, 859 bp, Zea Mays
tgaagatgagcacgagaggccagccagcagagggtcacctgtggctggtcttcaccatgctgttcgtcacttctgcggtgcgcagcgtgggggcgagcagctttgctcctccaccgtctgtctccgtatcatccccagcgtacgatcctgttatcaaggtggtagggaaggtgtactgctacagatgcttcgatgaggcgcacccagatgaatcgcatgggaagaagcacctgcaaggtgaaacttcgtgcctgcccctgctctttacgatcccaccgtgctaatgcagtcagctggaagatgtcgtctggccttctgattttcagcatattatccctgaatgtccttctgagtttcatgtttgtctgtgttcacaacacaacgatctggatgcaggagccatggtgaaggttacttgccaggcagatgaccaagcgctagtggcattcggctacaccagaagcaacggcaaatacagcgtggtcctcaagggactgccgattagtagcagcagcagcagcaactacggggctgctgactcgtgtaaggtcgagctacacggagcgccaggaggatcggactgcaacgtgccgatcgagctaaacctgtcagggctcagcgtctactcccgatcaagcgaggaggtggtcttcaaagcgaaccagataatggcgttcgcgtccaagaacgcgtttggctgttcatcgaaaccacagacgcagtcgtcatcaccggttcatccctactacagctccccaccactcatccctcaccagtacccctcgcctccggtgccggcggctacccacaggtctccaccaccgttgccgttgccgttgccgttgccttatcagtattc

SEQ ID NO: 195130 - DNA, 429 bp, Zea Mays
aataaacagggacctacctgacttggcctcgacgaagcctagtgggaccaagtaggaggcgaagcgactgtaccagactcgtggcacttgctcgaggccatataaagagcggttaagcttgcacactatacttgggtgagtggactcgacgaaaccggtgggctagctgcagtacaccgtctcggtgagggtgtcgtgaaggaaggcgtacttgacgtccatctaatgcatcaccccgtccaggagaacgctcgggagaggacgaggcttcatgacgggctgaaggtctcctctccagggcgctgagtgaagccccgaaggacccaacaagccttgtatcgatccagggtaccgtcgaccttgagattgtgctgaaagatccacttgtcggtgaccacgttgttgccagggggtgtcgtactaggtccc

SEQ ID NO: 195131 - DNA, 385 bp, Zea Mays
acaggctggttcccatcctatcacatctgtatcctggcttcctacactgcggctgcttgttactatttcaaaggatggagcactccaagtgtggaagacacgagttataataaaccctaacagacaaccaatggaaactcatttctttgagcgtgcaggttatttttattcttacaattctttgagaaaattgagaatttctttaggccttagctatttcctcctgtcctctcaagctgcccttcttacttttaagttacatttcagggtttatttactcctttattttgtttgaaaatgatttctgcattaattttgcttgttaacattgcagctgttgaaacaatggatatcacaaaaatactaactcttcaaggtggagaag

SEQ ID NO: 195132 - DNA, 393 bp, Zea Mays
ctcaaagaagacaataccgacatatgaaatgatagaagctgtttccttcattggaccaggaagtgagtttttggcttgtttgggcatagaactggcaaacaaaaaggagaaagatactgcttatttccttacagttggtgaacgtggggtcgtgcgcatctggtgcttggagaggtacattagtttgcatttacatcctcttttgttctttgcatgtttctgtagtacatgcaatcaatggcttttctggtcttctacagttgtctttgcgtatttgagcagcaaacatctgatgtaactgttaactcagagaacaaggaaacaaggaggggctttacatctgctgttatgttgccaaatgaacaaggattgctatgtgttactgctgatcag

SEQ ID NO: 195133 - DNA, 273 bp, Zea Mays
taggtcggtccacgcgcgcaggcgggggagctcatcggcgatgaaggctccggcctaaccaggggggtatagttcaattgagtggtcagtgagcttcactagaggtcagggaagatataggtgcgaggaattgaaaaatggctcactagatagctcggttcacgcgcggtggcgggtggccgaagtccggcgagggtgattccgcttctccggtgaggcaatgcctcgactcaagcttggagaagcttcacagcctcacggggaagctgtcca

SEQ ID NO: 195134 - DNA, 644 bp, Zea Mays
ggctttcacttgttgtgcaatggagaccactttatgagacgttgataaggactcatttcaagaggtaaaatgtgacattgtacccatttatgacgatgaagaaaatgacagaaatagctaagtgaatgtcatgtcgctttcagaaacatgggccctgagggctggaaagtaaggaagcaacactttgagactgtgacctctttagtgtgtgcatctaggaatttctttactgaaggtgtggctgctgaaatttggtcagagttcaggtttggcatattcagcacggatctttacttacattccatctcactcatgcttttctaactgctttgctggtttactatttcttttaataacctgtgttgtccaccctccataagcccgcatagtgtttgcctgttggccagatagaatcacaaaggatatgcttcacatctgttcatttgagttctatttgagttagtagccaatacaagcaaggtttgtgataacagaggtatctaattacctgtagtgcaatatataaatgcctgttcaatcattttaagtactctcattggtaattagcattggtgtcaagcctgtaattccaagttttaacacacgtctaaaaaataatgctattctaggtatggtctaagcag

SEQ ID NO: 195135 - DNA, 504 bp, Zea Mays
ggtaggagaactacttttgatccgggagatgagtataacaaggatgaaacatcgaatggccatggtgttgagcaaggcaactggagtgcattccaaaatttcttgttgagagcagaagaaaaaacaagatctagtgatgcagacctgtttgctggtgagaaagaacccccatcacggagaaaacagaatgtaaacacagcagatcctattattttagttgagagagatggtggcaacgtctgtgagcagaacaaaataggttttgattcagccaatgggaggactagagttatccgggtcatgtccaatgatgaacttgttatgtctggagaagggagaatctatatggattgtgaaatgaaggagattgaagctggtggaggaaggtacaggagagggacaggtgacgactacatggtttatggtcagggatgtcagatagacagacattgtttgttggatcctcttgcagaggcccagtacaagaatcctgttcagcaggac

SEQ ID NO: 195136 - DNA, 355 bp, Zea Mays
ttccctcccttcatacgcagattgtgtcagctttccatgacacggctgttgggggccatagtggtataccagtaactcttcgccgtatccgacagttattcttctggcctggtatgaaatccagtgttgcttcttttgtcaaaacttgtaccacttgtcaacaagtcaaaccagaccgctctcgctacccaggcctgttgcagccccttgaaattccaccagcagcttggcacaccatcactatggatttcgtcacaggcctgcctaaatctggccacgccgactgtgttcttgtggtcgtcgacaagttctcaaaatacggccatttcttaccattgcatcacccatacactgc

SEQ ID NO: 195137 - DNA, 317 bp, Zea Mays
agcaaacattgttgcaccaacaatagggaaggctattctaaaatataaaggctactttggtggtcaatggggctactggctttccatcggtgccatgataggatatactattcttttcaacattctctttctttgtgctcttacattcttgagccgtaagtttttttccctgaaattgttattagcttgatgcctaggtgaagcacttaatgaattatatttcctacagctggtggcagttcaaatactgtagtttctgtttctgatgatggcgacaaagagaagtctacagatcaagaaatgtttgatgttgccaa

SEQ ID NO: 195138 - DNA, 1045 bp, Zea Mays
gttttactacccaaaagagaaactgaagaagctgaagaaaaagaaatcttctccatctaatgaagataagaagcagtcaaggataagatttgatgtcttattgacgtcttatgagatgatcaacatggactcgtctattctaaaaaatatagaatgggagtgcttggtacttctattttgtttcagcatcatatctctgtccagttgtccatacatagcatgttttaagatttaattaacctgtttccaaaatgtatattgtgtcaggttgtggatgaggggcatcggttgaaaaacaaagattccaagttgtttggtcaacttaaagattataataccaaacatcgtgttctattaacggggaccccagtccaggttacttcttcatatacattgtcatgcggtcatgcctgagtttttttttggaaaaactatacatttaactttaccaatacctacctgccaaattggaagtattcctactactgtactacaatatttgcttagaaattcaacagtgtcttgtaccttctagctctcattgttggcatttttttgcttgttaagtttttgttttacttgctaatttcggaatccgggtattcaagtaatgttcatactatcttcctcgtcaaacagatcaggacacaacaatctaattagtatatttgttgaatccacaatatgcttatgtgaaataagaaacgacacttttacacaactggtgtattttggatgctatttatgaatcatgtctgcaaattaagctcagcaacttcacatgagtgttgatcctatactaggtgacgtcatcattttatttgagaccacatttgttagttattcttattcaattcatttgttattaataatatggtcattgtctagtttcgtttcactattcttactatgctgttcgttgtactagtgtttgttgcatcccgaagatttttttgcaagtgttttaacttgatgttctattttcctttttttcagaataatcttgatgagcttttcatgcttatgcacttccttgagggtgaaa

SEQ ID NO: 195139 - DNA, 328 bp, Zea Mays
cttccataacctcttccattgttcgaaggtaatcgaacccatgaagaaggccctataacacgacttcgaagagaactgaccagaggaagaatgaatccaaacatgtcgatcagcctcctgagtgagcaccactccccttaatgcatcccaaaggttaagatattgttgcagcccaggcaaattaagaggggtctcaatgtcactgatccactgccagttttgaagagcatgggccaccgttctagaagaaatagctcgtttcccaacattagccacaacagcaggggcaaaatcttggatacaagacccatccaaccaccaatctgtc

SEQ ID NO: 195140 - DNA, 513 bp, Zea Mays
gaaaacctctaaactaccctactagcaggggcttacaaccccggaataaggactgcaagaagggggagagccctagctcctgccaaactccatagttccttctcaagatcagccttccggattgcagcttccaggttgggggaatgcctgtcaaacatgcattcatttctatgcttccagagtccatgctccaagaatgatgagttcagccccttccttgcaatgacattaacctgactatttgcccacctccactaaaccataaagctcgagtcatgaggttggggtgccaaattatgaagatcaatatgtcctagcagccggaaccaaaactctagcaaaaacacagctagttaatagatggtcaatagtttcctcctgttgatcacacaaggtcaccgttgacaccgttctgggtgctctgaacccccttgtgcagccgatctgctgtccaacaccatccatgagcagttaaccacatgaagaatttacatctagccggtgcccaagtgt

SEQ ID NO: 195141 - DNA, 619 bp, Zea Mays
cccgagaatttttcctgcgcctcctacggttaggagctgtggctggacagtgcctgcctacgctctggagttttagtgcagttttacaagttttcagtcaattttgatcaagctcaggggaagtaccaatttgggagtgctagctgctgctgcagcagcagctgcgggttccttggtggcagatgggttgctccaactctaaagtggacaatgaggagcctgtgaggcgctccaaggacaggaggcagctcatgaagcagctggtgcgccgccgccctgagcttgcagctgtgcacattgcgtacctgcacgccctccgtaacacaggagccactctccggcaatttgtggagctggagtctgcattgtcacagcagcctcccgtagaccttgtggtgccgccctcgcctactccacagcctcctcctcctcctcctcctgaactctcggtgacatcctcattgccaccctcgccatgccccccgccgcctgtcccttttagtccagtaacaaccataagaaagatggagaagagggatggtgagctcccaccaccaccaccacctctggttttgagtccgataagattaaggaagatggaggatgagttccatggggg

SEQ ID NO: 195142 - DNA, 364 bp, Zea Mays
ggaccaaagaatttgggccccaatttggatggtgcagctgaggtgacgcccacaacagtcctttgttgcaatcgtagccatacccaatcaccaatgttgaattccacctcccgacgccgtttatcctgataactcttcatagttacttgggcttgcactagtcggtccttgatttcagcaagaaattcatccctgtactttaactgggagtcaatcacagccacctttgagtcccctgcttgataggagaccattggaggaggctcccgtccgtagacaactttgaatggagaacatttcagtgccgattgatatgatgaattatagcaaaattctgcccatggtaaccattttagccatgatt

SEQ ID NO: 195143 - DNA, 355 bp, Zea Mays
gtttagacacgcttcacacttaacttaaatctcgtcgccccctcccccatcgggccccgtctcgtcacacttagtcgcctcgcccgttatctctcaccctcgttctctccgtctccttctggcgatttggggacgattcgactccgccgccttctcacctccgggctccagccttcggtcaggtcctccaccgctccacctcacgcccccctggcttcccctcacgacctcacctggtggctgcctggctggtggttcggtcacggatttggttaaggtaagctttcggtgtttgtctttttcttcctctagtcgacgtctccgacgaggttgagacttcttaatcgggtgcttg

SEQ ID NO: 195144 - DNA, 476 bp, Zea Mays
gcagaggggcataacctcgccggagaagacgacggaccgcggctacgatctccgtagccgagggccacccaccctagagacactaaggcccttgacaacctggtatcacggtcaccccgatcctactcatccacctccgccgacgccgagtctaccgccaccgctccactcagccctaccgtgccaccacaaagcccaccaccctccccaccttcatccgcatcctcctgttcacccatggccgaaccatccaatgccgacctcgccaagatgattgagcaactcaccggcttcgtcgccacgctgcagtccgaagtcaccgcgctgaaacgcgacaaggagaagtcgtcgtcggcgagcgggggcggcgttcctgacggccagcaccaccacgatcggccacccaagttccagaagatcgactttccctgcttcgacggcaagaccaatcccttgctcttcgttaatcgctgcga

SEQ ID NO: 195145 - DNA, 323 bp, Zea Mays
cagaaataattatttatgatgcctctcttaacatgtaacatggtagggtggtggctggtggtatactatctgtatgtgtttttaggtgaaaatgggtgtcctttgtgttgaatagaccaaggaggtggcacaagaaggccatggatatgctaaacttttttggatatttcccctttggctattcactgaaccgataaattgcttactatttcagtcgcatttgaataaactgccttaatcacattaaaattatcaattattaatcttttggatatttgcccaccaacgtaactgcatgtatagaacagctggacttattgttg

SEQ ID NO: 195146 - DNA, 598 bp, Zea Mays
atcaatgctgcccccttcaatgggccacaggaggttgatggaccggcacctcaggtggatcaggcccaggatttggaggttgtgccccctcaggtccatgttgatgtgcctaacaacattcaccatcagaatttggagatgaatttcatgctacatcaggattggcagcctgaccccgtctttcagatgattgaggagagaaatagagctgtccagttctctaggctctgggccaaattctttgctccggctggaccgactaatcactcggtgggtgtctctgagaagtgggcacctttttttctttcgaatcttcttcagccggaatctttcaactggtccaagacttttcttctgtcaggtatccctttaaagttgcaggagcaaggagtgaattccatcccttttgtggttcctaaggattgcccagttgacccctccctgggggatgtcacctctggggcctccaaggattccattggttctggtgggctgactccaatcactgtggagtcagggctcagaagaagcaaacgattgaaggaatcacgtgatgggttcaggcatggggcatgtccaaaaaggaactgcctcatgt

SEQ ID NO: 195147 - DNA, 296 bp, Zea Mays
tctatatcttgagtcgggtcaatacgcgtcatgtgttcatgaattgggaaggacgcgcatgatggtttcgagttagagattagtggtttacggttcgtatgatttggtcgatgtgtgaatatacatgtgaatatgtatgtttataaaaatgtcgtggtgtatgtcgtgccttagatagtgataataataggcaagcctatgtgtatgttattcagcgggctatgtcgttgctctagttagccgactgttagatggctttggttaagctcgtaatcacggtgatttgcttgttttgg

SEQ ID NO: 195148 - DNA, 582 bp, Zea Mays
ccggattgcctcagtccaatcggtctaattgcatcttagtggtggtggacaagttttctaagtatgctcactttcttcccttggctcatccctttacagctcttttagtggctaaactatatttgtcagaagtctatcggctacatgggttgccagctgctatgatttcagacagggacccggtctttacgagtcacttgtggcaagaactgttcaaaatggctggtactcagttatgcttaagcagtgcatatcaccctcagtcggatggacaaacagagcgagtgaatcagtgtctggagacgtatcttcactgttttgtccactcttctcccaagaaatgggcgcactggctgccgttggctgagttttggtataatacttgtcctcactcggctcttggaacttctccgtttgaagtgttgtatggccactcgcctatacattttgggcttgttgacaatggtcagtgtacaattcctgatcttcaagagatgttggcagagcgacagctgatgctccagcaagttaagttgcatctcaatcgtgcccagcaacgtatgaaaaaacaatcggataaag

SEQ ID NO: 195149 - DNA, 496 bp, Zea Mays
tttgaatccattcggtgttgatccaagaatcctgtagcaagattgtagattgatgtatagtgaacatattctgttaaggaagacagccttgttatcaacaaaaatccggagataatgtgggaggaagatggtcggttctggcgactgaagaacaatcgccatggaacagtaactgagcagatcagaacgccagctcagctcgccgacgttgatcgccgcccgggtccgtgcacagtcgggaatggataacgtcggggcaggacaacccatacgtggcgccaccgccctagcccagccggagttactcaccggcggccgccgtgactcagcgaagttcgccgtgctgtcgccatacttcgatctctattactgtgcttcgttcttacgtggtagacatgcgtcaataatccacctcgtggccgcggaccgatcccgtacctccgcggctataaatagccgttaggtccacggcgaggtgttttcgtctacaccagta

SEQ ID NO: 195150 - DNA, 327 bp, Zea Mays
aaattaatttacggttacatacacacagcgagggcatcatatattacattggctcaaccttcgggatgatacccatctccctatagttgaacaacattatcctcaattcctcaccctcaaaaagatttcgcagctccccctcacctacattcaccccaatcggcgaggacaacaattctcgcttaccagtcccgtccacgcgaagacgaccactctccatctcactacgatgacgcctaccacttcgcgacaatccactcactctccgtttcgccaccgcccttcaccgcctatacccagtactcgcgcccgggagctcctcggaac

SEQ ID NO: 195151 - DNA, 294 bp, Zea Mays
cctccctcatctcctgaagctcatttctcccagtcgaggatggaattccatgccgcatctcccccaaccattgaagcttcacgtgttcttacgttcactgatgagatggcaagggaagagatcaatttacgaaaagccctgttcgtcaccatcgcaggtactagacctgtggtacagggatcggaggtgttggatgaggtggctcgcagctttggggtatgtattgataacatgtccatccaacattcctcaccagaggattttctgcttttcctgccggatgaggacactgcc

SEQ ID NO: 195152 - DNA, 290 bp, Zea Mays
agacgacgaaccgcggctacgaccttcgtagccgagggccccctgctctagacgtccatcgttgccgagggccccctgctctagacgcccaggcccttgacaacctggtatcacgagtcaggcgatcttcgtcttctcaatcccacacctccgatcagttcctcgacgttatccaaccaccacccagccctccaccctcaccgccgtcgacctcctccattatgagcaccaaaaccatcgacgatctggctgcggtgatcgagaagctcacgggcacgatctctgtcctc

SEQ ID NO: 195153 - DNA, 299 bp, Zea Mays
gctagcacttcgtatcgtatgttgcttgatgcgctgatcggaaggttgtttcccgtggcgcttttcgttctcattggattggttattcgtcgtcgctggcgctggtttaatccggtggcgcgactaggttcatcagtccttagtttccaccaagttcggtcctttgctttaatccggcggcgcgacttgtttcatcagttagtttccaccgagttcgggcggtatggtgctcttttcctggggttctgcaagtgcaaggagtatgatctggtttgatgattcgttactttttttataac

SEQ ID NO: 195154 - DNA, 314 bp, Zea Mays
tgcaaaaccaagacattgaacaagagcaagttcatgagactggaaagagatacaagaggttgacatctgatgtatggaattactttaccaagaaaaaagagataatagaggagaatgggaagaagcgtgagcaaatttggggttattgcaacttcccaaattgtaagcggcgatatagagcagagggccgccaaggtacaactgcatttaagaatcatttgaggtccgcacacagcatagttcgaggccaacaacaacttaaatttgagaaggaccttggtaataacattacccatatccagcctttcatgtat

SEQ ID NO: 195155 - DNA, 312 bp, Zea Mays
atacgacgaccgggcatcacgaaaagcagtagatgatatggttattcaggctcttggtgaacccaccttcatgaagccctttgctgcctttcttgtacaatctatggaaaagaatctaaaggttataaacccccttacaagcttcaagcttctcagatggtcacactatcttctgaaatggagtcaatttgccacactttcaaaagttgcttttaccagactggccagcgcacaagcagtcttatgtcaggtccttatggacgggtccttccgtcggcgccgaacttgcaaacagttattcattcatctttt

SEQ ID NO: 195156 - DNA, 364 bp, Zea Mays
tgccgttactgcgataaggttcttgactacagttgctgagagtgtgcaccatgctttatttgggagtcctgaggcgatgaagcagatatgtgatagtgtcgttgtgcctaacttgcgcctgcgggatgaggatgaggagttgtttgagggcaattgggtggaatatgtcaggcgcgactctgagggtagcgatgcagatacactcagacgggcagcgtgccggttgctgcggggccttgcagcgaactaccaagagcaggtggctgcactcgtctcagcacaggtccagcagatgttggttgcatatgctgctaatcggtcaaacaactggaaggagaaggatgctgcaatataccttgttatt

SEQ ID NO: 195157 - DNA, 321 bp, Zea Mays
attacaaaattttagagattgggatggctcaatttggagctagtatgagtttaatatgaattatataagtttctagaattatttttatattaaaactcaatttctaaactcatttatttgatttctctgagctctggacagcgcgctaaatagtataaagctcggggtctacttgcaaacatttcctagactcagattcctgttgccaaggatggcgggttctattctgtaaaatcataaggtctcttgtgtaaaacgtcaccgcgaaggggtacggtgctctatgggccattggatcaaaactatacggtgccgattaga

SEQ ID NO: 195158 - DNA, 620 bp, Zea Mays
gtgagcgaaggtaccatggccgctggggcataggatccttgtggtccgaccggtgtaattcgctctttctacccacttgttttggtatgggtcgggtgcatccatgcttgctgcgggggagggggtcattctcttatcaaccccctagtgagggccgacctcttgctggcaatggggtcagtcgttactcagagtgggtccgttgtcacgggagaacaaattcttcaaggtcgtaactcagagaggcatgaaactagatgtagagaactttgtcaagcaatgtcaggtctgtcaacaagccaaaggtgaaaggaaacatcttgtagggttgttgcaaccttcacctctgcccttgggtgtttggcaagatatcacgatggccttcatcgaaaaacttcaaaaatccgaaggatatgacaccattcttgtggtggtcgaccgtttctctaaatatgctcactttttggcctagaaacatccctttatagcttcacaggtggctcaagtgttgttggatcaggtggtaaagttgcatggcctacctaaatggctaaatctatgaccactgatcaggacaaggtttttactagttccttatggactcagcttttcaagttatt

SEQ ID NO: 195159 - DNA, 412 bp, Zea Mays
tctacatgcttccatgccttagagtcagcagggtgcctcattttgttatcttggactaagccctccttgtgccaacgcatatattcagatgtggttggattcatatacaacctttgcaatcgaggaataactgggaaatatcttaggattttccatggggcacgcttgttggttgcctccttgtgatgcccagaaaccattggttgccatctagactcaccacatgttggacatgtatccatggctgcatattctttatgaaacaacaaacaatcattgacacatgcatgtatcttttggtagtaaaggccaaggtcatgaataaccttttgtactttatccaatgtgtccgaaacatagtggccttctgggagaacaagccggaacaactgaagtatggctgctaatgcac

SEQ ID NO: 195160 - DNA, 419 bp, Zea Mays
gcatgctcatgccaccattaaacacaagaagaactcaattgccactttgactgacgagaatgggattattcattatgagcacgaacataaatctggcctcctctgggatgctttcaaatgcaggttgggatcgtccgatttctcaggaattgattttgaccttccagagcttttaatccgtaatgaggagcttcacgagttagacaccccgttcactaagttggagattgacaacattataaaatcattaccttcggataaatctcctggtcctgatggtttcaataccaacttcattaagaaatgttggcatatcattgctcaagacttctatgatctctgtgaaaaattctatcatgatgaagtttgcctaagaagtattaatgggtccttcattgttttgatcccgaagaaggaga

SEQ ID NO: 195161 - DNA, 1169 bp, Zea Mays
ggaaatatacctgtacattcaaccctccaattttgctaacttggtgatatacacccctcaaatacgttcaatcttttccaacttacacttattcagctatgtgtgcacagagtattttcaatcattaactagttaaaccatttccattgaaaggtctatatttgttttcgtgatttttttggatatccttttgctattctagatgagagattatccacggatgacttcctattcattgtcttcctttcctttttacccattcaggagcaaagctaatcaggagttgcaacataatatgctgtcaattatgatcaatttggtctgacgaagattttctgcaaacaaatagtaaagctaaagcttgtggatacaagaacttcagcatgacgaagaaacacaaaattagaaagtccaagcatcttttagagagcaaaaagggtaatctcttaattcaagcctaatatttactcaaatgaatttttatgtacatacatttatctcaaagtgtttttttataaatgaaattgtttcgcgtcaagagaatattcctacttatctatttttttcttgccattctgtttcccaatgtgattacaatatcagattaacatgtctgagtcatatgtgtctagtactctagttttcatcattaaaatgcttttggtatagctaaaattgcattcttttataagaactctgccttgcttcagctaatggctctcctgtttctagtgagccgttgtctgaaaataatagtgctattttattttttcagatgttgatgaaaatgtggagaacattttaagaatgatagaggaggagaacgaacagactgagaatgaacaagatgattctggaaatcccgtcaggaaatcaaagctatcttcccttgtgaagggcttccatgaggactatcaataccttcacaagcactacaaacagctaattagcaaactagaaactgctggccacagttcctcaggttcagattcatctgattcagatgtggaaggagacagattagagaataatgtaactacaccaaaagcagtgttgaatgaagaaaacggcctgaaccataagcttgatgaggttcatagcatggaagcagaaatcgagatgctaaaacaaagtacagaagaacacaccaaggaaatatctgatctgaa

SEQ ID NO: 195162 - DNA, 405 bp, Zea Mays
ccactccagtagtgctcttcctgctgtcaacatccccagcataatcactatcactatacccaatcagcccagcctccttccttccttttcttccaaaccacaaaccccaattcttggttcccttcacatacctcagaatgtgtttcacagccatcatgtgatctttgtggggttcttccagaaaccggctgacatatcccacagcaaacgcaaggtcaggtcgagtgttgaccaaatacctcaagcttcctactatgcttcggtacaccgtgacatccactaggggttcagtgctcagtttgctcagcttcaaccgtgtctccatgggagtctgacacgggttgcattctctcattccattcttctccagaattttttctgcataggctccttggctgagagata

SEQ ID NO: 195163 - DNA, 416 bp, Zea Mays
cagattttgagtaaccgtaatatcctccacagagcattggataggatagacattagacttgctttcatcattctgaaggcccgaggaggcaccaaacaaatgcaaaatctccaaagctgctaggatatcatccgccaccgggtgcaggaataatgccacatcgtcagcatacatagagacccgatgcagtctttgtgatggtgacaaaggttgtaaaagtcctgcatcttctgctctagcaaataacaaacccagaatgtccatggaaagaataacaagcagtcaagcatgggagaaagtggatctccttgcctaaaaccccttcgatggataatgcactttctgggaaaaccgttaagaagtactcgagtggaagaagaggagagcagcccacagataatatccctccaaatttg

SEQ ID NO: 195164 - DNA, 467 bp, Zea Mays
caaaatttcctgggttttcaaattgacctaccttgctaagttatacacacacatccattgtgtctcaggaatatgtagtgcatctagttcaagatttgcgaggccatgctcatcagatgtgtgtatatgatcgtgcaaaacaaacactgttttacaatataaactgcaatgtttacaaaatagagtttgaaatagaatgtgtaatatggagccgctaaagatagcctcaggaaccagttagatctctttggccaggtgtcgttcttcctatgtaatgattcatgaaatatatattggcattgttagggcccatgaagaaataaaacatgaatgtgtgtgtatttctaagtagattcacgtgtgccagtctatcgtttaatctataccccttaattatatatcatctcaagtacaaatacatgatggttgttagagtcatcgatggaagtctttatgacggattcttt

SEQ ID NO: 195165 - DNA, 388 bp, Zea Mays
gagcaggcgacacgacataggtgggtggggaggaagcaaggagagaggagggcctatgtaggattcttatttctcatgccgccttggagtcgatggtgtggcaacgcctgtgctaggcgagattgaacgataacccttgtcatgtcaccatcctacgcgtgactagcctcccatggtgatagtctatccacaatagacaaagcagtgcaacggtgtggttagaatcaaatagtgagaataacagggcaaacgatttagttttgaaaaaaactattgtcatctttagaaatagttttaaaatatctctactccttcaaatcaccacttttgactgtcgtattgcgtcgtgcgtagcgcataaatgaaaccagtgtacgcctacctccgc

SEQ ID NO: 195166 - DNA, 590 bp, Zea Mays
cacaaaatagatattagagaaacttagctctgtatgttgccgagtaatttggaccagatctgagtgacggctggtttgatccaagtccgatgtggaagacatgctgcttcttctttatctctggtatttttctttgagtaaagaaacgactcggactatggcagcacttccttgaaccgtacgtaaaacggcctctgcaattgcctacttgctcctcgtgaggacaggatgcctccgttgattggacttcagtttgcatgcgaatcatgaatgcgacttgaattatgacagcaggaaccaagaaggacttcagatcggcattaacaggaggacaggagcagatgggtcttttctgcaggataggcgtcaaacccaaacgccaggaagaacagatgtatcccgctgcctcgggagcagcagcaaatatgtagaacacgcgcggatggcggcgatgcggtgaacatcgtcggcgatggtgatatcaacagggactgaaaccctaatttttaatctcctgatgttgatgatgttggcagagttgatggccatggagctagctaatgtcggtgtcgcctaccccacggtgggcg

SEQ ID NO: 195167 - DNA, 521 bp, Zea Mays
gtgaccaagggaatttctaggtgggtagagggaatgccatgcttttccacaaaactagtggctataaatgaatgggatgctcatgaatcaaaaagtatagtagcgggagtaaattcaacaaggaactcaccgagcactactcctagagcttgctgagcctcttgagcatcgacgtggtttactcgtgccctgccatgatatgggtcttgctctgctggctgatggaggagggtgccttggaggcgggtgctggggcattcttggggccattcaccgagttggagtaagtaggtcctgataccttcaactaggggcagatattcttgaagtgactggggtctccgcagtgccaacatgcattagctggtggttggttgcttgcgactaagggggcctaaaaggagctctgactctgttgactgaaacgtgatgaagtgggtccagctggcttattgaagcttggtcccttgggtggaaacccaaaggatcgagttctctggtgtcggtcttgctgctgagct

SEQ ID NO: 195168 - DNA, 304 bp, Zea Mays
atcaacttcaagcttaaattcaagcatgatccaatgagtttttgtggcatcatcatattacaaagttgtagagggcatattgctctacacttttgctgcagagcttgacatgtgttgacattagaaattaagagaaaatgatgctccaagttcggctgacaggctgtctgaatgggatttgccatggtacagtactgaagatgatcagaacgccagcgcgacagtctctcaccgccgacggctctctccgccgtgattcgtgtcgtcggcgtcgagattagtgcctgggtgttggacagcgctg

SEQ ID NO: 195169 - DNA, 1057 bp, Zea Mays
gaaccttattgagatcactgacttgaaaaatgccatggtaggcatcccaggagcaactggcctgtcagccgagcagcggaaaagactaacaatagctgtggagctagtggccagtccctccattatattcatggatgagccaaccaccggcttggatgctcgtgctgcagctattgtcatgagaacagtacgaaagacggttgacactggacgaactgttgtctgcacaattcatcaaccaagcattgagatttttgaatcttttgatgaggtatgaacaagtttagatggtatagccatataagtggacaaaacatagacacaacaagcaattgagaaacatgatagtccaatgctggagtggtgtcaaggtaattacacaattaaaacaaacatgattctcgacaaacttaaacagcagtcaaattggacaaatgtacagaagtatgaatgaagttgtaaaatgcagttgtaagttaaagtagaagacaatcaaagaactacatgataaactggtctttcttttatacaagtacgtataggcactatggaattaccatcctaagttttaaattaaatttgttccatttcagcttctgcttatgaaaagaggtggccagctcatatacagtggttcggtaggtccactctctagcaacatgataaaatattttgaggtaagattgcctaagatagacgtttatatttgaaagatgcagagagaagaaaatactgaaaattactttgtaacaggccataccaggcgttcctaaaataaacaagggacaaaacccagcaacatggatgttagacatcagttcacacataacagaatatgaaattggagtggactatgcagaaatttattgcaattcctccctgtacaggtgcacccaatagtacagccgtaaaactgcgaataactttattttagttggtacaaacaataaggccttactcgttttgtacttaaaccatgtggattgaggagtattggggtggattgaggtagattttgactagctgtggatttattcccccctcaatccacatggat

SEQ ID NO: 195170 - DNA, 391 bp, Zea Mays
cccaccacggccactttgagttccgagtcatggcatttggccttaccggtgcacctgctacatttcaaggagctatgaataagacacttgcgccacttcttcgcaaatgtgccttggtctttttcgacgacctcttggtttatagtccgacatgggaaactcacttgcaacacattgagctcgtcttgcagctgctttccacagattcttggcaagtcaaactgtccaaatgctccttcgccaagcaggaaattgtttatcttggccacattattagtcaagcaggagtgtccattgaaccttccaaggtgtctgctgttttatcttggccagtgcctcagacttgcaaagaactccgacgattcttgggtcttgctgggtactaccggaa

SEQ ID NO: 195171 - DNA, 308 bp, Zea Mays
caaggtgatgacagagggtgcgacggtaaggaagaaacataggcggcagaaggtgaagcaggagcaatctggccaaacaccatttctcaatgatgtctattcaaaggcaggggaagaagctgctgctggtggcgtcatgggcagtcagtgtgtcaagaggatcgaccgcagcaagaattccaaggttttgaagaagcagcagacactgccccaaggctttttccctcccatagccaatcccgatttcattgatcaggaccccaattattgttctccttttggtgcattttttgcccaattcgcctaca

SEQ ID NO: 195172 - DNA, 791 bp, Zea Mays
ttctcccgtagtccaacctcatgttggatcacgggctgtccatgagtaccagttccttcctgagcaaccaagtgatacatatgagagggcaagtcctcactactatgacactccagtggaagcttcaaattccaggataccttctctcacatcaggatcacaacttctccatggatctgaggaggctgcgcctagttatgcttttcaaggtcacacatctggttctagcctgttgcctccttccagcaggccccaggtgtttccagtagcaccaacagattatgagatgacccagtttaatagcaaccttagttctgttcctgttgaaggccagtttgatacgtctcaggttgctgcatttgaagacccacctgtatcgtctgaaagaagagcttatcatgatgaagatacttctcgagtggaaagaaaacgaaaagtatgattcttaattagtttgagtttatatactcatattgcccttcaactttatagtcgtatacttgtatacatattaaatttgtctgggattttcttcagcataatgaagaagcaaagattgcaaaagaagttgaagctcacgaaagacgaattaggaaggagcttgagaaacaagattttttgaatagaaaggtattactggttctatataattgtagatgccttccccttcctcttcaaattcgtttacaatgtgatgtctgtgcagagagaggagcaaaggcacaaggaaatggagagacttgagcgtgagagaagaaaagaagaggagagattactgcgtgagaggcaga

SEQ ID NO: 195173 - DNA, 419 bp, Zea Mays
gccgtgaccacctctaaggttgacgggccctcggctacttccatgggatcaggacggtccaagtcagcatcccgaccctcgagatcatgctctaaggttgacgaggcacgggatgacctcagcccagcatctggcacggtagcacaagtttctgttgcatcaacatccacaggctctgatagcaactcttctgggaccataccctctagagcttgatcaaaattggccatagacagctcttgcagaccaataagggcagacaaagcaggagaagggactccactacttccaccgccagcaacgaactgccgactgtttttccgagttaatggagtgtcattttcttcctcctcatcttccacagtaacagcacgaacagcatcctcagcggggtcagcagcaggcggagcacacccatt

SEQ ID NO: 195174 - DNA, 595 bp, Zea Mays
ctttgtccttcttcaacctcgtgagaggaccaagctcactacgcaatctattcattgtgttttccttggatatgactctgagcgtaagggatatcattgttgggaccctatcgctcaccgcatttgtgtgtctttggatgtgacctttgatcagtcatgtcctttctttactactgatttgtcctcttcttcctcttcctctgagtctgttgatttcctccgcttggttccacctcttccgaccaccttgtcttcaccaccctcccctgttactatttcatcacctccaccactatcaccttctccacctccaccatcgtctccaccacctccaccatcccctgtgtcacgtcctccaattcttttccactgcactcgacatccacgtccatgtcctctaccatcccctccgacatcatctagctcgtctccttttgtgcttggtgtgcttccttcgtggtatgaccttcgtgatcgacgtacgctttattgtctgactcgtcttggttttatcgcttctggttctattctctctaagcctgcttcctaccatgatgtgttttcacatcttgagtggcaattagttatggctgag

SEQ ID NO: 195175 - DNA, 468 bp, Zea Mays
attgcatggtatcaaaagggagactgaagtcagaattcattggctcagagaaagtaaccatgaaaatagatggtttcccagtattaagctgttctgatgctacagatgcatccttagttgatgaggttcaccagggagatgaaatgcaggtcaagaggtggacatctctaagagaatacatccaagatgaagttcatggagctatgcctgatcctcaagtctttctcaagttactctcttctaccagccaaaaacatcaaagttattctcagagcatacaaaagaataatgctcaactttctgagcctcctcaaaagaaacgaagatgcagtccttcctgtgaagttgatgatattattattggtggcattgatgttgagcaggataaggacgcatctgaagaacaaggcctggaattaaaaaatgaccgcacaaccaccttgtgtgagatatggagcttagataaac

SEQ ID NO: 195176 - DNA, 385 bp, Zea Mays
aactgtgatcctctatccaaaatgatcttcttcggtacaccgtgtagagacacaatccgagccatatataactctgctagcttggctcccgtgtagttagttctcacaggtatgaagtgagccactttggtcggtctatccacaataacccatatagaaccatatcctttcaaggtgcgaggcaatccagtaatgaagtccataccaatctcttcccacttccattcgggtatctttaatgggtataatagtccagctagtctttggtgttcggccttaactctttgacacacatcgcacatagccacatgtgcagccacatctctcttcagtccataccaccagtatttttgcttcaaatcgtgatacatcttggtactaccag

SEQ ID NO: 195177 - DNA, 275 bp, Zea Mays
gccacataattatgtaggatacaagatggtaggttggggcaagaatagtttggggataagaaggttcatggtaaggaaatcttttcatcgcaaatgatgggtcttgtttcatttggagatctggtctgcctcccttcttgccttgtcgacgttgatcttttcctttctttcggtcttggtgtctccaactaggttttagggtcatgtagatatatgtgggtaggataagccacatgaggtaggtcaagatctggtttgatgtttaggttggaatg

SEQ ID NO: 195178 - DNA, 558 bp, Zea Mays
taaacattttctgagtgaagaaattcaattcttatgaaatgttcgtcgtgaaaaatttaaagctcaatgatattttagaggaaggggaaagtaaaaatgaccacttaatttatcaactagaaagtgctgatggttcaagtcattcagcttctgatcttactgtagaaacacaaaaggcagtgggtgctgttgggcctaccatgaacacaatggagtgtctggacctctcaatgggaaaagatggctgctctttttcacagaattgtgttgaaggcttcacccaaggaacaaagtctgactttttttcttcaatcaatgatgttgagacatcatatccatttgttaagggtagttcttgtcctacactaccgaatatggagcaaaaagatggtgtattggaaaatgcggaacaacctcatcttttggagatggttaatcttgatggtacaagccattcacttgtggaccctccattagaaatcaaagaacaaggagcggaagctggcttatttgcttcagttgaagatgtcgagcaaacccatcccattttaactgatg

SEQ ID NO: 195179 - DNA, 278 bp, Zea Mays
aaagaaggcaggtgaggtgaggtgatgcagatgacccggctggaagacctgacccctgctccatccatggagcattcctcgaggccgaccctggggtttcccctgggaactgctctcctgctcctcgtcatctttgccctgagcggcatgttctcgtgttgctaccactgggacaagctccgcgccctcctccggtctcggcatcccgacatgttcctggaggccgaggagcatacggccgtctccgtggcgtcgtcatcgccgccgagaaaggcggt

SEQ ID NO: 195180 - DNA, 427 bp, Zea Mays
tgcctaggcaccagatctgcgcatagggggagataattgccctgtggtaaccaccaatagctgcagactgagtagtgagtagcaaatgattgcaaatgaagagggaaattaaaggagggcccatccttgctttcctttcagcagcgatgaggaggcgatggccacatacatacctcttgtgcagaaggaacttcctcagttcccagattagttgttcttcactccatgttccttgattgatgtccctgtatttgtctccatcaagctggtagagcatgtttttgaaaaccttgacgacatcaggattatgagacacataaacaaatgccccacagccaaattgccctttaatcttctcatacacaagattagcaagagtagtcttgcctaaccctccaaagccagcaatagacagtacaactggctg

SEQ ID NO: 195181 - DNA, 510 bp, Zea Mays
gtagccaagaaaaacacacttagcggaacggggatcaagtttgtggctagtggtggcagataggttgggatagcaggtgcaaccgaacacgcgaagatgttcataggagggtacagttttgaagagggcgaaatgaggagtggaaaaatgaagggttttggtgggtaaaatattgagaagaagtgttgttgtgtggagtgcttcaacccagaaggttggtgggatgctggcctgaaagagaagagagcgaatggtgttattggtagtacggatgatacgctcagctttaccattctgagatgaggtgtaggggcatgacatgcgaaggacaccgtgggtgaggaagaacgttcgggagctggagttgtcaaactcacgcccgttgtcacattgcacagctttaatcgtgacaccaaactgtgttttcacataggcgaaaaactgagtgagagttggaaaagcatcagattttagtcgtaaagggaaagtccataagtaatgtgagcaatc

SEQ ID NO: 195182 - DNA, 337 bp, Zea Mays
gcaagtgaagctctttgaggtcgtaattttccaaggaaagctcgtgggaacagtagcaatcgttccaggaactgcacaccagatgttgatgatgatattttagatttcattgaggaacaagatgaagaacagctggatgatgaggaagaagatccacatgatgatgcagatgtgatagatcgtggggatgcaactgatgagcccactgacgagggagaaaatgcagcagctgctgatatctttgatagcttagatgattatgagtgactcggtgatgggcatggccattgagagagaggaactgggtgatgtactgctgtttaggggttgttatttg

SEQ ID NO: 195183 - DNA, 564 bp, Zea Mays
caaagttccagaaatcacctgaatttaacaatgtatcctctactgctaaacatagcaaacataaaaatctgtgtgatgaaggatcaagaattgagaaaagttcagcatccagctatgtgcctaccagtacaggatgtgaagaacccctaaatagttctgccaaatctgagctgggtccatcaagagtgaagcgcaaatgtaatcagatttctgagggaaggagactggaagaaacagataatgaggaacattgttctgaactgctaaaaaagactagaacactgaggtgctctgttaaaggttctgaatcagatgattgtactagggctagttcccagtcgtcccagaagggggtttatcaaccacaaaatgaggttaactcattttcttgcagggtgttgagaaccaagcgaaaacatcctattatgcatctaaataagcatgtgaaacagcttcacagacagaccaagttttttgaaggtgatgagcaaccagatgccaagggcaattttcttggtggattagattcctatgatagaaagaggcaagtagaggatatgagca

SEQ ID NO: 195184 - DNA, 440 bp, Zea Mays
ctctagtcgcagcattcgcatcggcgttctgactgggggggatatctccattattctctagtttgtccgttcgtgttgcttattaggatatgtatataccaggatcaatcagagcctgattgcgattgattgtaatcccctagattggctagcttccttgtatagtctaggattactttctatatatagcctaggtctgtttccttgtacagggaatagccttccatacatgtaccttccatgcatgcctattggctatatatgacaggctccccaccctcaatgggtgtgtggtgattcagtccattcttcctttctacatggtatcagctctctagatcatgcgcttccctccctgctgctgcaccatccccaccctgttgtgccgcagcgccaccacctccctgctgcgccgcctcttctccctcccaggtcgccat

SEQ ID NO: 195185 - DNA, 348 bp, Zea Mays
agagaattcactgcggcaagacaagagacggcggtagtttcgagagaactgacagcagcgagagacgatgatggacgacaacgagaggaagagaaggaaccacactttcctttggaaccattcgctccgttgcagacggcggcagacatgcaagaacaccggcacgacgaagcagaggaaacagagttcctggcggaggagccggcagaagagcggagcggagaggttgcgcaggaggaggcagcgccacccaagaccgtcgcggccacgcacaactatcagttcctgactgagcgcgacttccgggggttcgtcagggagccggaggccgtgacggtgcgcgtccag

SEQ ID NO: 195186 - DNA, 420 bp, Zea Mays
gctgaattcagcttatttagctcttctccctaagaaagttgatgccttgtctgcaagagattttagaccaattagcttaattcatagttttgctaagttggtcaccaaaatgcttgctaatagattgggaccttacctacaggagttggtggcaactaatcagagtgcctttgtgagaggcagatcgattcatgacaacttcatgttggtgcagcattcaattaaatctctccacaagaagagagtctctagtttgctcttgaagttggatatctccaaagcatttgattcggtctcttgggccttcttgattgaagtgctttcacatcttgggtttggtcttgtgtggcgaaatatgatctccaatattctggcctcttcctctatgcaagtgcttttaaatgggtctcctggtattcc

SEQ ID NO: 195187 - DNA, 825 bp, Zea Mays
ggcctactccccctagtccagcaggtacatcggtcaaactgaccactgactcattctgcgaatgtgaatcatgagctgcagttatggactttgacattaaatcttcaggttgctccattacattatcctcctgtacaacaacagatacttcccctgcctccatcttattgctttcttcctcactttttttggtatcaatattgccatcatgtaatttgacttcaagacgagtaactttgtctactgtatcgcaattctcctgtgggctactaagttcttttgggacattgtattcttgagcaatcttgtcctcaacttcagttatattatcggaactagctagcatggattctgctggttgtgactgagaggcattcccatcagatgtgtcttcctttcctgtatcaatagattcacctgtttcggtgtcacctgatttatctattttgataggcgaagaaaatgcactaccatcaggtaagtctccagcagactctctaagctgatttggctctgcttcatcactaggacaagaatgtttactatattgatggtcctggttttcttcaactgttgaaggatgtcctggagattgtgatgtttctgatgcttcatcatcacccaccttagatgcaagtgcctcagtgcagccatcaagcttttcttctgctactgaaggatgtgctggagtttgtggtgttatggactgctcagaaacatctgccttagaaacaggtgactcattggagatactatgagcttcttctgattttgaaggctgttctggaaatgttgttactgatacttctgaatgatctacctcgg

SEQ ID NO: 195188 - DNA, 345 bp, Zea Mays
gaaaaacctaggtggtggggtggatacatcagcagggccaggttctgcagaaatccctactccacggagatcttctaggagaaaggcttgtgctgatgccaacaacatcctgaattctccaaagaaaaagagtcggacactcaaagattggttctcaaatgctacctccagttctaataaagtagttgatgataatgttgcccatgctgatggacatgttagtgaacctcatgtgtctagcaaaacagataatcaagatagttgtgttgtcaatgaaggcaataaaagaaacactaaaacaacttgtgatccacctgctgagaagccttggaatactgggagttt

SEQ ID NO: 195189 - DNA, 395 bp, Zea Mays
cctcctccacaaagtgggtagcacagtgagagccgatgatcagagctgccaccttctcattccaagcatgcactgggataccctccaacctgagcctaagatgaaaaccccaacgggtgacagaaccatacctctgttcattccatgcctcaaaggtgaagacccggccacggtggttgatgcgacttcggtgaagaaccagctgttggtcatgagagctactgaagatgatgagatattgttctgggaagtgtttcaatacctgaaacctacggtctctgattcccagcctctctgacagagcttcctccacatgctttggttcagagtcatggctgttcccctccagcgaacagaccacagtcttgcccaccaattcatctcttgcagcctca

SEQ ID NO: 195190 - DNA, 287 bp, Zea Mays
ccggggttcaggaaccagatgtaccgtcccaagtagcagcagaggagttgccgcagggaagtggtctagaccagagggactagatgcgctgtccccgatgcgtcgtctagtcgaggcacgatgagcaacggggaagaagacaatgttgttaggcccacgaggccactacatgctggatgaagatgacgcacgcagagacggaggagacacactgggtgcggagtccagcgaggagcggaggcagaagaggtacgtgcgcacgcacaacgagtggaggtgtgctcgcg

SEQ ID NO: 195191 - DNA, 427 bp, Zea Mays
gatatgccgaaggagaccaccaccaattctaatgagggtggtctggtccgactgaagtataccttcagatttagggagaagtttgatgagccagacgacgactgactgaagtgtattgaagctaccagtgatgagctacttggggcatactccaaggccgaagataatgctttgtcctcagctttcgaggtcggggcatgaaaagattgaacaaggtatttgatgctattggcttcgtataccctgattaccattacccgctacgagggcaagagaaaaagagaaagactgccgcttcggccattgcagctgaaccgaagggcaaaaagatgaaggttctgacccaccggccacgttacattgaaccggccatgatgcttaaatttggcatggggacctcttcagctgccgaagcaaagcaatctgc

SEQ ID NO: 195192 - DNA, 383 bp, Zea Mays
tgacgatagagctaccaccctttgcttctgagatccccaagtcaccaaacttgttcctaacagaaacactgaaccacttgtgctctttcggtcatcaacatccccagctaaatcactgtcactatagccagtcagacttgtttcagatgtgttcagcttcctgtagatgcagccatagttcacagtacctgacagatacctgagaatctgtttcacagctgcccagtgacttgccttcggatcctccatgtacctgctaactatcccaactgagtaggcaatgtttggtctagtgttgaccagatatctcagactttcaattacacttctatactttgtcttgtcgactgaaggtgtcttgtcatttttgctcagcttcaacc

SEQ ID NO: 195193 - DNA, 401 bp, Zea Mays
gtccctggtcatggacgccacaacagccatggtcacagcaaccatggtatgcaccaccgccgccgtcgggatttctgcctcctaccaattccctaccatcttgggattagcaagcactcctctccaacttcagcaccatgatgcttcagccacctcgccagaacgagtggttctttgactccggcgccaccacccatatgtcttctgatgccgatactctatcccattcctttcctttaagacatcattttccctcttcaattattgtcggtaacgggaactctattcccgttacctgcactggttccaccgctctttttgattcccttcgtcttaataatgttcttgtttcaccaagtctcatcaagaacctaatttctgtgcgctagtttatttctgac

SEQ ID NO: 195194 - DNA, 277 bp, Zea Mays
attccggccgtcgtaccaagctcaccgcggtggaatccgataagcacgccggtgaccgccgccttccgtccttgcgccacgtgtataggcacttccactgcatcgccgtgacctgctctcgctccccgttgatcgccggagtgactgccacggcgtaggacacgaattcgttgcgccagtaccttttctcttctccggccgccagcacaccctggtgaaattggacgccaccgccgttagaggctataaattgccgccaccgttcgctccgttaggt

SEQ ID NO: 195195 - DNA, 446 bp, Zea Mays
gacgccgtgacgacgatgggcgcagcagatcacaggggtcggctgcacatcctaactacaagagtgcagactccagcagggatcgatctccccaggggtggcaatagtggaactggaagcctaggtcgtaacctaaacttgtgataccataaaggagaatagaattggtgtaattggatggatttattgcattgagcccttagacggtttatatacatgacctaggaagtaaggcaacccacagatacctatggcagtttacgaggcacaatatctaaactaccaaatatactcttaacacatatggcagtctacgagacgcaatatctaaactaccaattgtattctaacacgctgggacggggctgctgctaaccctgtatagtgcctcctccttcgctttatgctgagtgctgacttccaaatatatgtccccaatcaagatt

SEQ ID NO: 195196 - DNA, 506 bp, Zea Mays
gaacttgaggagctaagagaaactatatcgagttcttatctggatcaaactaaatctcttcggtcagcacttgaggagaaacagaagcaaatagattcactcagtacatcaaatacagagttacagaactctataaaagatctggatgaaaggcttaatgcatctaaacaatcacgtgcagatgctgacgagataatttcaaggtattctgcattgccatgaggtcaacttgttaccatttgacaacaacacaaagaatatgcatctatttcactgcatcatttactattacacgaggatctcatatctttgaattttgaaatgtttccagccagaaaggaatgatatgtgagcttgagggacagctaaatgaggagagaaatttaagaagagaagagcgtgataaggctgcacatgacatgaaatctgcattgcataaagtgcaagccgaggctcaagaagaaattaagaaacaggcggagtcttaccttaggcaacaaagggag

SEQ ID NO: 195197 - DNA, 400 bp, Zea Mays
aatctaacaggttgccttacaatctatatttgtttgtgcccctgctgtatatagttaggaaacatcctagttctatttcctagttgtcctttttgaaacgggttgaccgtcgtagtggttgaacaggctaactcttcaactagtgagatatgtttctgtaatgtgtatgacaggaccagttgaagcatctgttgcatgtatggttgctgcattgtattagtacttgatcagttaggagaagtgtctattcagtagatggtattggactgaattgctgtcactgttatgagaaggaaaaagggagaggggttgcttaccaaaggtctccaattgtttggtcagatgtccatgtcacctattaaaactgttgaatgtcaacatcaatggaatcagatgctca

SEQ ID NO: 195198 - DNA, 282 bp, Zea Mays
ctccgattcaaagcgcatttataaaggggaggttcatccaagataatttcatgttagtacaacaaactgcaaggctgttacaccaacaaaaactgcctcgcctgctcctcaaacttgatatcactaaggcttttgattcagtttcctggcccttcctaattgaagtcatgcaacagattgattttggtcatatctggagggatattgtttgtgggttattggcttcctccactacacaagtgttgctcaatggttccccgggggaacatatagcccatagga

SEQ ID NO: 195199 - DNA, 289 bp, Zea Mays
cgatggcggaccacacggcctggggaacgggcaggggcagcagcaggcccgccgggtgtaggtgctcagacttgttgcgctggcacgtagcacaggcgcggacgaagtcttggaccacacgacgcatggcggggaagaagaaatcgtggcggaggcgatgtagagtgcgctgcaccccttcatgaccgacgtcgtgcgtagcggccaccacctctagcagcagcggggagtccggcgggatgtacagccggtctgcgtatgccaccatgccgtcgaacagcgaccatgg

SEQ ID NO: 195200 - DNA, 322 bp, Zea Mays
ctgaatcatggtaaaagaagaagaaattttaaccgaattcgatcggctcaagggacatgttgtctttgtctggtcggagtacattgcacgacttggtactcctttctgaatctctctgatccaggcctgcaggacatgtgagaggctgtgcagtgggctagtgagagactcaaacagataaatatgccgagaactctctcgccggtggccctggacctgaagcgaagcggaccccatgtccccatgcaccccaccaatccatgctcgcgtgccattaagcgcgaccgtggagtgaagctgcgggctgtggctttgcttgccc

SEQ ID NO: 195201 - DNA, 413 bp, Zea Mays
taaaataaaagatcaaacagctgcctttgagaagaaagagttcgaactccagacaactgaaggtttactgtcggaagccgaagctaaaataacagaactgaatacgaagcttctcggctccgaacaagaaaagttgaagcttaatggaaaacttgaggctgaaatccagaatggtttagctttgaaaaaatcattgatggaccttcaaaacaaatgcttgaatttcagcaatcaatgtgttcaacgactgaaaaaggtgttttattcagtcggggccagtagtgaagattttattccttcggttgaagatctgccaggagccttcgaacacatcgaaggtgagattgatgacctcgatgatgttattgccgaatacggcgacttttgtgccctggtagcttctcggggcaccg

SEQ ID NO: 195202 - DNA, 365 bp, Zea Mays
cggtaccgatcaatcgactctcgtctgggtgtgttgggagcgcagctccgctctcaacagaatggcgaacatggcgggcatgccgttgggcgattctcgcacggcacccacgaccaccctggaatcccgcttctcgcgacccactcgccgctagcttcaaaagtagaatctacgtctcctcttgccctcccttttcgcatccgttctttccacagccaataccgccgcatgggagcagagagagagaaagaaagcagcgccgccaggtagatcctattgccgctgcaagcaatcgtcgtcgatggagctcccgtaccagcagtgaccggcgtaagtgatctgactacgttcctggaatccgttgg

SEQ ID NO: 195203 - DNA, 279 bp, Zea Mays
gttcattctgctttcaacgcaaccagttccctcaacactactcttcgatctcagaaaataatctccctgcggaactctttcctcagtacaccaccgtcgagtacatatcttcaactgaaactggtcctatagttccaccggttttcatttttgttgtagatacttgcatgattgaagaagaaattggttatttgaagtctgcactggcacaagctgttgagctattgccagataattctcttgttggattcattacgttcgggacgtatgtgcaggtaa

SEQ ID NO: 195204 - DNA, 309 bp, Zea Mays
ttgagttggtgcttatcctttcttgatgtcgttgatcctttcttctccggtcttgagctcattgattcgaggttagtgtatatttggggaaatatggttagaatagttatgagtgagatggactacatgatgtaggtcaaaggtttgtttgatgttaggtggggatagacaaactatgcaattcttcatgactctattggttggatcagatctcatgcatgtggctgagttggtttaaggcactagtttagttttaagtgcatgaagggtatggccttatcttttgtaccatcattaagtaacttactc

SEQ ID NO: 195205 - DNA, 418 bp, Zea Mays
aggtcgatgagaatgaatggtggaacaagattgggcaattaagagaagggtcccagcaggagctagtagtcaagcggaattttggacgggatggacaaaatatacttgcaaacatggctcagagacaaggaatttacttgtatggatcaatcatgactgttcttcacttcacatgtctatgatcattcttcactggcaagaatagatgcaatatcgctttgatctattaaagtttggttgttctatctatttttttcaccatttgatacctactgttttgcctatgaaccatactcttcaaagctgacaaattctactttacctggtttgcatttttaacgtggggaagatagtaatgcatacaacaaagggaagacacttgttttcagcaaggtacccttacctgattatcgagcag

SEQ ID NO: 195206 - DNA, 304 bp, Zea Mays
tgtattctactagagtggagtttggcctcctgcttctgggcggcgtagcccctacggtgtcgtctgctaggtcgtgtgtcactgtacccctggtatggcgtcgcgtcttatccattcgccatatgggttcctgtagctattctgatgcaaacgtagtggtgcttggtgggtcctgctgagtcggctcgtggtgaggtttagggacatcttcagtacaacttcatctttcatcatcccctctgtgtgaccttccatcacgcataaagcgtacgcttagtatggcgtattgccccgtcccttctgg

SEQ ID NO: 195207 - DNA, 1778 bp, Zea Mays
gtctgatgacaaaacgacatccaaatggaggctaggtgatgaagaactactgtcagttctctatttactggatacatgctgtgatttagtctcttgtgcaaggttccttgtatggttactagcgaaaattcgtggtggaatgggctcttcgggccaacctgggaggagttctatgcatacgaggaacagagatcaccaagtttgtcaggtcagcgaggcacttgtgttctcatctctgcttaggtatgttcattctgatgttctactgttctcaaaaggttttatgcaatgatttattgacacaaatgagaaacaggtcacagaagagggagtaaaataagaatatatgatgttttggacaaaaccatttccaataagcattttggatcctttattttcatagtataatagtataatatattcagcagaaagtactaaatgttctgataatactgtttttatatgactaatctgaacacttcaaacatattagctgtcaaggatgtttgaccactcttaaagtaatacatatctctttaagcattgggaattctatttatctggggtttttttctctccgctattttgttttggaatatatgtttgtgtaaaatgtatgtgcagattctgaattgagttcattggggagagcagtgtatgcaaactttgcatcctttttatttttgtgatatccacaatttgagatctgctttttcattctgtttttactttttgatgcatgctttagttgttaatgatcccatatatatacttatcacgagagtccttgttgagttttcaattcaacctttctttctaagataaagttatccaaaaaaatagcagagaagttacttgtatccatcatactttttttgcgtcacctaaacttgctttgctattttggttggtatcagaaaatgcagtccatgtgtggggagtggggaccaactttgagcatcacctagtaaatttttatgatgtgaccatgtgaaaagatttaatgagtgacatgcctagcagtttgcatcataggtagacgtaagttaagccatacacataattagttaggaaataaaatgagaattggtcactgttgtatcagtgaggagtttcagcaagcagctagacaaggttctttgttcatcagttgtaatggactaatggttgcattcctacgttgaacttcgttatgcttttatatatttttgatatctctattatgcaatgcttgcaggtacgagaacatacttcttgcggctgacatcctgcctgatgttctaagtgctttagtgaacagaaattctgtgtcagcaattgtcaggcatcctggttcaacagcttttgcttacgtacgatactttttgaagaaatatagagatgtggctggtgtggccaagtgggaaaaaagctttcggaccacttgtgatcagcgcctgttagctgagcttgataacgggcggtccattgatggcgaattgatttcttcttcgggggtttcagcaggcgaggagattgatgagcaggtccgccaaaagttgaatggaaggagttcaagacttgtgcagaatatgaaagaaatagtgcaacggcaagctgatgaaattcagcgcagtttgaaggaaaagaaagttctagcaactcccaggaatccacccacttttgagaaagaagatagctatcaaattgcacatgacattgtttcgggcttagtagaatgcatcaggcaaaatgggggtgcaaatccagatggagacctttcaacagttgcttctgct

SEQ ID NO: 195208 - DNA, 325 bp, Zea Mays
agctgatgcagccatcagagacatagcgcgcgcacatgcacctctctgaatttgtatactttgttgcatcatgcacgcacgcaccctctctgaattttgctgctctgtattggtaaggatgactgggagtaaatgcacagcgctgaacttagtatatatacatgcggctgagaggcaaaataaactagcaattggtgaaatcagtaaaaacggtttcgtccaacttctcggtgcagcagctacggtgtaactacgtacaacgcaggtgcgaatcggcaccaaacagcctaagctacatgcatgctcatgctctcccattcccaag

SEQ ID NO: 195209 - DNA, 405 bp, Zea Mays
atttgaattgtgcacatgagtgttggtttgtggatgtacagtatccacttggtgtccatcaactggtggttgactttcgtttactgatttggaggatcgaatgttcctctctttcctttgatgcttagtagaagcattatcctgcttagtagccctcacctcttcggttgagaagatggttgaatggtttttcgtggtacctccactcggctgggcgcattaacaacaggattcaaggattttgtgacaccattatagccagtaaacgcatcaggcagattattagcaaagtgttgcaattctataattttctgaacttgaagttcagattcctgggttcgaggatctgaggacaggatggatttgtcatcccaattgatttcctggcattcattaggatacttg

SEQ ID NO: 195210 - DNA, 378 bp, Zea Mays
gtgtggagcgctgctgtgattcgaggcgccgatttgtttatcgcgtttgctcacctgcgccgtttcccccttctccagggaagtctggtttcgatggttacttgcttttgtggggcgtggcacgtgagtttcccttctcggggttcggacggggacgtgtggggacttccgctctgggagggaacatgggcatgtgacgcgcacgtgcgccccatccggctcggctgcgctgcgcagattgctggaaacccgtgctcctccatgaagaatggacaacagcgcacacatctattacatttcactgaagcctttataggccaatgtttacagtaggacgatgactgagctactaaccgcgatgccttgcatgcagcctta

SEQ ID NO: 195211 - DNA, 408 bp, Zea Mays
tgccgatggaaggacactatggagtactcactttgttcctgattgccagtggctatgtgggggacatactttcgtccatgacttcaaaatattaccattgagtgggtatgatctgattcttggtatggactggctggaaaaatttagcccaatgtctatacactgggggcaaaagtggttccagtttatatataaagggaagtcagtacggctgcaaggtgttttacccaatactcggtcttgtttttccctaaattgtcttcagtttgattcccttgtcaaacaagatgcaattgagcagttattagagttgcaagtcgtaccacttagtgaacccactgacatgcctatggtggtggctgatctggttagccagtttaaccatctgttcgatgagccaaaagagtt

SEQ ID NO: 195212 - DNA, 508 bp, Zea Mays
aaacttgcaaggagatttggaattgagttcttgctatttgacacacagggaagaactcatctctcctatcacctcctatacattctttcgatttaagttttttaccccagatccagttactaagtatggaaagacggccatgcgtttcttctttcaattaaagcaggtgtgatactttaataatatgcttgtttcaactacacagaattgtttagctgccagttagttaatctcaattctcaccttcattcttttcttttgacagaaggttcatcttcgttcttgcaggtggatgtatttattaatgagctttcatttgacatccttctatatttggttggaaagttaaacttgatgggtccatatgctgtcaaaagctcggctatctttcctaactcctgcaaggtataaactaaaacttatgtttatatcattcaagacaaccagagttgaatttcattttgtatgcatgaatgtgaaccacaatgatatgaccgacaactctaca

SEQ ID NO: 195213 - DNA, 456 bp, Zea Mays
ctacttcgttgaactctagatggatggtctggatcttagcttcaatgtgacgactagagatctgatctctaccgtccatcatgtgaccatcggcacacgggcacatagccatccgcgtggggatcaatggtccagacccacctcgcccaatctcaaccgttcatcatcaatcgagcggtctccagcccatcttcaacctcgcgctcctaccgcactccctctcactcgcctatgccgggacggtcacgcaaccactggcagcggcggtaccacaggcacacatccacgcccattaccctctcccctcgcaagctagaaccagggcgaccgatacacctgggcggtcggcgcccagaccggccacaatcaccatgcgctccatcgtcaaccgcgaccgtacgaaaaggaacagagaaagcgacaaccccgagagactcaccagccgatgatgaggtc

SEQ ID NO: 195214 - DNA, 370 bp, Zea Mays
ggatgcatgggctgctgtccctgctagtcattgtccgttgctcactctctccatgaagctcaaggccacagctaaagctcttcaaggttggggcgagaaaaaggttggtcatattagatcacagcttggtctcgccaaggagctgctccaccaactcgacattgctcaggaaagcagaagtctttctcacgaagaattttggttgcgtaataatctaaaacagcacagtcttgctcttgcgtctctatggcgctctttggttcggatgcgatctcgtatttgttggctgaaggatggggatgcaaatagtgctttatttcattctcatgcaaggtatcgcaaagctaagagcttcatctctaaaattgtc

SEQ ID NO: 195215 - DNA, 600 bp, Zea Mays
ccaatgtgaatactccagcttctgctagcttgggggcatgtgtgtgtccttatcgtgtgcgtgtgattcatttgagagaagaccaatcaccgagaagctacgggggcatagggctgagaaaaagagatccgcgaacctcggcggtgaatctcctttgcagagccgggggtggcgctttccatctccttctctcgccccaatgcagtgctgcctgtgctgtgctactccctaatccctatccattctgcctaattgccctactagagagctagctgcatgactacacacaccgtcctcctctctcctgtcctgtgtcccttcttccacgggtgactgggttataatagtctctctctcttcaacaccagtcatacacgccagcattgcgttgcgctagcggtagccatgtctggtgaacaagaatcaaacgggatgtatggagcttttgctttcagctttctcttttcctttttgtttctgagcgacctctgatcacgggcgggccgcgggctacaggtacaggacggtaaagttttttggattctcttcgttttcttctctgacttcgcgtcgcatgcgaatgcaggcgggacagcttca

SEQ ID NO: 195216 - DNA, 348 bp, Zea Mays
atcggagtattcctaggatcacggtgagcaacctttttcctgcatcgcatggttatcctctacgcattaccgcgattagttcggagttcgagcaggggggtggcgtttgggcgatgccggccatgccgccgccgtggacgctctgagccgccgtgtgtgtgctcgggtgagagaagacatcgtgggaaccgttggatcattgttggacggtcctgattagatccatagtgtatcctttcgtacgtttattctgggccatcgatctgtgattgtgcggtccagatcaaccttgtagttagtgaatcgcaggattggatctcggacgatgatcccggatccaagggtcta

SEQ ID NO: 195217 - DNA, 319 bp, Zea Mays
gtgactccgttggcgaccaaaccctagccgccaccctccggtttccagtcccgccgtcggccaccgcatcgcgctcgtcgcctcgtctgtgtggataaatcaccggtggctcataggatccccctcttctctccctcctgtcatccacggaccacatcaggtacgatatggactagctctccttccacccttcctccttaccgtacatcgtcgttcgccggtggtctgctccgtgcctctgtcgttgttgtgctcccggcgcgtcttgtggttgtggatcttctcccaggcagctaagtagctaaccctaatcgtaatc

SEQ ID NO: 195218 - DNA, 771 bp, Zea Mays
aagcactcctgaggagcgtgctcgtaggctcaatgaagaacctgaaatacatgctgaccctgcaatggatccatattatgaatctccggaagaacaggagcaggagattgaaagaagtattttacctcccattgtatcatcttctgatattattattacaactctgacatgagcttccataattttattgtataggtagcttcaataagtccagaagttctttcttgaggaaagatggtagtcttgtgtctccaggtaaaggagatggtagaaatgctgcacagcgagatccaaaaactaactgggaatctaatcgaaacacaagggctgaatcgagttctcatatggaatcacccctttcacggaggtccacatattcttctcaaggagaaagtgttggttatacaaataagccagagggcttgaacattgatgcacaaaccgttagactggaaggcaccacgcgcagtgctccacaagggtcacctggtgcctcatctggaagtctagctactaacataggttcaggggcaaaaactgcatctcaatcagccattaacgagtctgagaagatctggctgtacatggatccttctaataaaatccaaggtcctttctcaatcatacagctgcggaaatggaacagcaatgggtacttccctcctagtttgaaaatatggaaagctagtgagaagcaggatgattccattctattgactgatgctttggcagggaagtttgagaaagaccttcctccatgggaaccaccac

SEQ ID NO: 195219 - DNA, 391 bp, Zea Mays
ctatctatcctattgggtggaactctcgacgctggcaacccacaggtcaagcaaggcgtctcttttctttatggcgcgaaagattgggtcatggcctcattttgaccacagttactccactatatagcagagcagagccaatcggcgagaagtctggctttgattctgcatagtgcagacccaggctgatctgcttcaagcaagagtctgcatgctggtggtgcttgcagaaaataaatttcagaacaccactgtggatcagaagggcataataattactttacttagtcgatttgtcggttagcttccatttgtctcaaagttatctgtaagaggagatgttggatattagtctccaactctccattagcattgacatgaattggtcacc

SEQ ID NO: 195220 - DNA, 340 bp, Zea Mays
ccatcatcgacacgattgggaagaaaacaacgagaaggctactacggtttggatagtaggggacttaccagagttggtgaggtgatggcctgtagccacggcgatgggaggcgttgtggctgtgaaggccgacaagggattatcggccggtcaagctttaggagtcttcaatttagcgcgatgaagaacttgggcacaattttgagcgcagtatagaggcatggaaggggatcactaacggtggccgcaacctttctcttcgccccgctgatggctcactctgatccccaattgctcacgacggcggtggctattaacttctatgatagccctcggcggt

SEQ ID NO: 195221 - DNA, 320 bp, Zea Mays
atcgattggtatttgtttagtgaggtgaggccatggcgaggaggagcaagcataccgaccatgccgtattcgcggaccgtatttatacacacgacaccgtacattacactcgcgtgatagcaatggttatactgcaaggggaaggtaaggatggcatttaagtgcagagcggagagggtgggtgcctgggtggtctccggccatcagtgcggcggcaggaccggcagctagctagctgcgccggcgcggcacacacttcgaggccaattcaattcaactgtttcaattcatgtaactggcactctggcagcgggtgtttg

SEQ ID NO: 195222 - DNA, 354 bp, Zea Mays
gcctaccaagcagtgccaccgcgttggcacatgacattctgtagctcgacggtaacatgtctgaggagcaagtagaggaccacaatatccatccaacgtcgggaggggatatcagggaacacagtgtgggtgagggtatggtcgtcgagcgtgtagcgttacagggtgaggaggacgaggttgcgccagtgggtgcaggaggaggaagctaggtcaaggagaacagaaaccatggactagatgttctagacaccagccgcatatgcatggaggttggcgatgatggcagtctcgtatgccgggggagtctcaaccatcggtgaagttggaggtgaatcaatatatgaaggacca

SEQ ID NO: 195223 - DNA, 358 bp, Zea Mays
gtgaagtctgccaagatccttcataggaaattcttgctggagggcactgatgattcgtcgtagtgttggcagggaggaggcagtaagcacaatatcatccacatacagaagaagataggccatgtctgcacccttgtgatagacaaacaaagacgtgtctgttttggcctcaatgaaactgagctgtaggaggtgagaagcaaatctgttgtaccatgcacgaggggcttgcttgagtccataaagagagcggttgagacagcatacataatctggaatgagtggagtctttgaaatcagtgggctgagcacaaatgacagtttcagacagtgtgccgtgaagaaaggcattattgac

SEQ ID NO: 195224 - DNA, 508 bp, Zea Mays
agtagtagtagtagtagtgaaataatgttgtagtggttagtagtatagtgtgatgtagtaatgtaatgtagtaaaaaggggaaaatgctgattcataatgggtcagcctttgagtttgcgaagaccccttccactatgtaatgaagaagtttcaattattccgagcaaactttcatttttttcgccgctcctcctttataatagtttgatagttcgtctttgcgcctatcactgccggcatttttagaaataatcaccgagcgataactgatggtactagcattttagagttaattgttgagtcgtgcttgaccctattggtgttttagaggtaacggccgagtggcacttgatactgtcggcgttttagaggtaacagccgagtggtgcttgacactgtcggcgttttagaggtaacgaccgagttacgcttgacactatcggtgttttagaggtaacggctgagttatgcttgatactgtcggcgtttttagaggtaacgaccgag

SEQ ID NO: 195225 - DNA, 283 bp, Zea Mays
ttccagaaaactagcagagctgcctgaatctactagcaccagcaattgttgacaataaactgaagcccaaagtcggatagtcctgctgccctcaccaccctcagtagcagcagcagacaatgctagcacactgtcttcattagtttccttactgtccccgatacagtcctccagcttctcctcttcattgacagccaattcccacatttcttccaccaagtacagaggaacattagttgagcagcggtgttcatagccccatttgttcccacacttgaaacac

SEQ ID NO: 195226 - DNA, 524 bp, Zea Mays
ccaaaacgcgaatccgcgggcaacgcgcaacaaactcaaccaggaatcacggggttcgttcactggaagatcttcccatgggctataaaacctttcctccgtgctcccctctgctcatcacaacagaaccaagaagctagaagctctcgtcgccatagctgtgtgtgggagaggggcgaaaagaaagaaaaggtgggcgccgtatgccaaaatccaatcgctccatcgctcctgctggggcgcatagcctgggacatcgccgtgaagcatggatgctggggaccttcgggttggtggggaattggcgaccgagggacaacattggtgggctgccaaccatgaacgccattgggggaccgccgtgcaccagggcgaaggctctgcatttcacgaatcatggtaaggaatctccgaatcaactcgccatgacctgtgcattgtgtagcgcgtttcgtccatgacggtggggcatcggaaccgcgcgtcgcagttctctggcgtggaccgccgccgcaagggaggct

SEQ ID NO: 195227 - DNA, 322 bp, Zea Mays
cggacgtgctgagcctggccctgtcgtgcgccgcgtccgatccggcggaccggcctgacatggacagcgtgctttcagccttgctgaagatgagcaaggtctgtggaagagactagatgcctgctgcaaaaacgcgaactgaaattcgtgctgcaagatctgttcaagcaaagggagaaccctgcttctgatgagtaccacccggacgccggacgggacgccaaagtgtcatagattcgggctgctcctgtttgcacgtgtaatgagttcaatctgttcagagccagcatggagctagattccaggctatagtgacttttat

SEQ ID NO: 195228 - DNA, 389 bp, Zea Mays
ggagaatgcagtgaagctgttggatgaaatggtggcaggaggggtggagccaaatgcaactgtttatactagcgtcgttgcattattgtgtgacaaagggtggatttcagatgctttgagagttgtggaggatatggtccagcgaaaggtgatattggatgaggctctgtatacgactgtcttgagtggtttttgtaataaaggggatttggtatctgcaagaaggtggtttgatgagatgcaaagaaaaggtttggcaactgatggggtgacctacacaacgatgatcaatgggctttgtcgggctgttgagctggaagaggcagagaaattgcttcaggaaatgtgggccaggcggttggatgttgatgaagtaacatacacagtgc

SEQ ID NO: 195229 - DNA, 500 bp, Zea Mays
atgggcgcggggcagcacagaagattgcacatatggttggagtttcatgtagacccagtcatcaatagcaaaggagcgttcagacctgtgtttgttcgcttggcgttgcatgcgagcctgagcacgcaagaggtgctgatggatgaggtcctgcatgttggagcgctcctggagccagtccgaaacagacgctgggatggcactgtctgaagaaatgcccaaggatcttggttgaccaccgtacagaacctcaaaaggtgaacaacctaaggaagagtgtaggcttgtgttgtaccaatattcagccactggtagccaatcaatccatttctttgggcaagcattgacaaaacagcaaagaaatgtctctaagcattggtttacccgttcggtttgcccatcagtttgcgggtgatatgaagaactcaatttcagctcagcaccagcagacttgaataggtgttgccaaaatgtgcttgtaaacaccgggctccgatctg

SEQ ID NO: 195230 - DNA, 491 bp, Zea Mays
ccggagaggtcgttatgtcattggcagacacaatatccaagttcccaaagatcgtgatgacaaccgccgtagcaagatcctcctcaacccgtgacatattctgattacagtcgatgatacatggggaagaaggtggggaaggatccgctggcgcctgtgaggtagaaccttggatgggagatgaccccggcgccaactgatcatcctcctgattaagaggcataagggtcgtttgcgtggtcaacgacgacgcctcttagccagatgaaccgcaccaataatattcagagctccatctgaagatgccaggaacaccagaacactagggtcgatatgttgcgaagcataacagacaggagttgttctccaaactgggatccttggctcaggccttctcttaggcaccatcactgcagtagacgaagacctcggcaaggtgatccttgcatccatggagtctgaccaagcatgatgcgacatcctcttgccca

SEQ ID NO: 195231 - DNA, 554 bp, Zea Mays
ggggatttcttccccaaccgaagccgactgcaacagactcacggtgagatcgctttggccaccgacttgtgggtcccatgtgtctaatccatctcccaccctgatccgatgcaacagactgcaaatcctctgccaggaatctcgccgctatctcacccaacctcatctcctttccctagctcggacttcaccttcggagtataaatcgcgtgaccccattgatgtgcgcggtcaatcggggccatgagaaagcgggggccccttcgccgacgacgcagagaaccgcgggcggattcagggggagagctgcaccgcgggagctacttcgccatggtgcagggagaggaaccgagtgccgccgccatgaactcgtgccttcatcaactctcagagtcccagggtgtggtcaacaaggttaaccgatgcatgccgcacacgcttgtggcttcatcgcgggtgctcggagatcggtgtgctgttgatgcctcaccggagtcctaggcccctggccaatccgcgccgcaccgtgggcaaggcagtcagttacgcaactc

SEQ ID NO: 195232 - DNA, 343 bp, Zea Mays
cataatttgggaaatcgatcgcttggagcccagacaacttcatgaagaggggagagaggaaaagaggaggcagtgggcctaattggatctcttggtggcaacagagacagtggccctgtatctcccgcttgagcgctcctctattgatgtcagtctcctctctctcacttctggctatccgcacctgccgccctctaccgtcagccaccctcaacatgtctgttcgcccgctttgagtcccgcaggtccatccgccccacacatgtatgtcgcttcaagtctgtccacacctgaatgtgctgtcctccccataggtcacaaggaacaaacaaccgcctcctaa

SEQ ID NO: 195233 - DNA, 492 bp, Zea Mays
gcagagttgaacttatgttgtcataggagtttaagagaaaatgaagctccaaaacgctctgtcaggttgtctgatggagtggccatggtacagtgcttcagggaaaacagatatgggtccgatcgccgcggtggaaaaatctcaccgccgacgacctatccgcgccacgattggtgccggagttgagatgttcgggcggcgagcatcttcccccgaagatctttttcttccggataggaccgccgcggtggaaggcactaactccggctgccacgcggtcattcctccttccggccgtgtccgatcaccggcgccgctctcctctgttcggccacgccatcacggttttaacggtcttccggccatggttgaacgtggcaagctctgggggaatgccgtgttcgatgccatcgttgatcgccagctcgggctggcaatagttatcaccgtgaccacgattgtgactctccgcggctataaattcaccccgac

SEQ ID NO: 195234 - DNA, 381 bp, Zea Mays
gtgaaagtccacctaagggttggtcgtgccacatggagatgtagttggttcacaagttgtagaaagaggactagggagcgtccccccgaccatctcgactcccacggccactccttcgccgacgatggccaccactaccagactccgcactcgtaggctagacgaggaaggagggcgtggggagttggacaccggagtgatattcgggtgcgttgatgagcccccaaaagtacgagtggaggaatcgcgcgtgaggcctggcccttgaagttgtagagtgcggtggcggtgtcagagcgaggaggcacccccttggtgagcttcttgaggatggggccattgctgaccttgtggaatgaagagaatgggaccgggcaagtc

SEQ ID NO: 195235 - DNA, 380 bp, Zea Mays
ttgttgttcgtgtactgcatgtagcccgtcaacttgatgtcagtgttgtagtgcttggggtagacaaggttgtagtcgactgtgccaacgatgtagcacaaaatgtgcttaatggcacctagatgctcttgcctcttgccgcggtctctccatgaaccagctcacaaaactgattgcaaacgtccctaccaaacttctacatcgtcgcatcaacctctagtgttaagctcttcgtcgagagctttagttggacctccattggcgtgtggcatgggttataattccccatggtggccttctccaacagcttgcgagcgtacgtcgcttgcctcaacatgatggagtcgtgccctggcttgatctccagcctgagatagaag

SEQ ID NO: 195236 - DNA, 1183 bp, Zea Mays
caagattcctggaacaagaagccatcaaactggagggtgggcactgacccatgtggagataaatggaacgggataagctgcaccacaagccgggtcacggctatgttagtatcagcagctagaagatattatcacatacggtcgtttccttctagtcatccattttatagatgagcaattcatcactcattctgctgctgttgttgttgttgtttcgtggtggctgttcctgcagaagactctcgagtttaggattgtcaggatccctttcaggcgacatccagtccctgtccgaattgcagaccttgtatgaaacattccgacttttacagtctgatttgatttgatttgatttgagtctccatacaagcacatgaattggaatttttagcatttgtttcaagcatgtgaggtgattgcttcctgtttttgttttttggcagggatttctcctacaacaaggacttgggcggtcctcttcctgcgtccatcggaagcctgagtaacctcgaaaacctgtgcgcaaccaaactttttaaggagttccaatcgtccactgatttcaatattttcactgcctggattgttccttgacttatttgctctccgactcctccgcaggattcttgtcggttgcagcttttctggagaaataccgaaagaactcggacagctcaccaagcttagatttttgtaaggagaccaaaccaacctgaaacctttgtgtctatgcctttgatctattagcaaccataaacaaacaaggatataatcattttttgggattgtatcttctgttgaacaaaaagcttttacctatctatatctatccaactgtcacttgggaaatcaactttagtttgtcctctttggtcagaacagaaaggaagtaaaattgaggtcttacgttctgtatatgcttgaaaatcaaacaagtttatgcgcttaggtccaggcagcacaatgtgatctttagctttttgactgccactacaatagggtaaaaaaaagaaaagaaaagaaagatttggtcattgtattccatcgctgcagatctttgaactcaaacaagttcagcggttccattccggcatcactcggaaggctctcgaatctatactggtttgatctggctgacaataagctctccggaggactcccggtgttcgacggcacgaatccc

SEQ ID NO: 195237 - DNA, 537 bp, Zea Mays
ggtttgtgtccaggaaactaaaatgcagaacatttcaacaagaactatcctctccatgcttggagctgagttcactgattatgtctacctgccatcaacaggggcaagtggtggcatcttgatctcttggaaaagacatataggccatactgggcagcaaagaatcgacaatcacagtgtttcagtccagttgtgcatggagcaagggcaggcttggtggcttacctgtgtgtacggccctcagggagatgatgaaaaaattctttttcttcaggaactcagagatgtcagatcagcctgtgctggcccttggttggtggctggggattttaatctcatctataaaacatcagataagaataattccaactttaatagagccatgatgggtcgtttcagggatttgatcaatgacctgggcctcaaggagattccgctggttggacgcaaattcacttggtctaaccaacaagataacccggtccttgttaagcttgatagagtgttttgtactgtggattgggagctaaccttccc

SEQ ID NO: 195238 - DNA, 349 bp, Zea Mays
tgctaagcttttcaaacatcccgtcacaagcccaggtggaggctttatcgacacttttggctggtccattccagcagatttggtgtcgtaatagaactctagttctctcttttggttgttttctgttgtctgttttttgatggatgcttcaaaacctttgatctggaatgtgaggggtttgaactcctgtaagacaagattcagtaaaagagcttgtggaatcctcccagtggatgtggtctgctttcaggaaactaaaatgcaaattgttaagacgaactatcctttctatgctaggtgcagagttcactgaatttgtttttctcccatcaattggggcatgtggggg

SEQ ID NO: 195239 - DNA, 357 bp, Zea Mays
ggggcgtggaaccatatcaagattaagtttcctcaaaatcccatcccaaacttctctgggcagcacacaggagaaaaggatgtgatgtatggtttcctctgactgatcacaaaaagggatgctgcttgatggggtaaccctcgcttagccagtcgatccgaggtccagcactatgcttggccggttattaagaacaattttatggctgccttagggatgatcttccatggggatgtttctaaactgcagctccttgactctgcttatgtgattttgctgcctaaaaacaggaggccatagaggttatagattttcggccgattagcctaattcatagctttgctaagagtgaacata

SEQ ID NO: 195240 - DNA, 461 bp, Zea Mays
atggtatttataaaaccatggtattcaaaacaaagtttttttacgaggtagccaaacacctcttggcaaagaatactatgggcctatttgtgttgtggactcattcttctacaggaacacctatgggcgcaggcacaagaagggaacctccaccaataaggcaaccgagctagaggagctggaagaataggaaaggaagcaagcaatcaggcagccgaattggaagcaatcaggcgagtcctatctccagtatatcaatcagtagtttcctatttctgctatagcagacagtagagtttcctatttccattatagaaagtaataagttgattgggtgtgttccctgccgcctatactataaaggctggctgctagtttgtaagaaggcatcgaagaataatacagttacctcctagaggtgggctgttcttcgacggtggcgccttcagccgccggcgacg

SEQ ID NO: 195241 - DNA, 329 bp, Zea Mays
ggatttttgtttgtgcataataatgatatgaacaaagataaaataataatgggaagaagaagggaggagaaatcaccgccgtccaccgtagcacaagcacccttaagtcgaccaccatcagatcctcctcgctctcctctccgttctccatggtgccgtatgcgggtttggggcattgggggctgaccgaccgtgtcaccggtgggcgcgccgccggggtgttttctctatcaccgtggctggggttgggggatgaagaagggcgcgtgaccattgatccgggatcggacggatctcgattgctgaactgatgaccgttgatttcagaa

SEQ ID NO: 195242 - DNA, 282 bp, Zea Mays
gaacatcttctcgcgcacccgcttggtcaggttctcgcccaccgtgtcccagaacacgtgctgcaccgtgttgaacagcagcgccgcggaggacatgccgatgagcaggtagcagtattttgcgatctcgcgcttcatgtaccgcgggtccggcgcgtagtagacgctgagcacggcgctgaggatgtaggcgaagatggcgctgaaggagccgcagaccatggagccgatggagccggcgagcgcgtaggcccactcgggcgagttcatcctggcgaggcg

SEQ ID NO: 195243 - DNA, 445 bp, Zea Mays
atggtaaggatcgtgattgatcctgaccagtactcctctccccctgtaagtgaacggaattgaggaggaatgattggtgtgtacatatataggagaggaggaagagaggcaaaaggaaatcctctccctaattccctctatccatgtatactatagccggccagcacaagattgccaggctcaggccctcccatatataacagattctctaacaccccccgcagtggcagcggacgttgacactggaccgaaattcacagaacaccgatgacggaagtcctttggtgaagatgtcagcaaactggtatgtcgttggaacatggagaactcggacatcaccaagagcaacatgctcgcggacaaagtgaaggtcaatctcaatgtgcttggtacgctggtgctggattggattagaagacatgtagactgcgctaatgttgtcgca

SEQ ID NO: 195244 - DNA, 725 bp, Zea Mays
ggacaaaagttggctagtggctgatgatagccatgaacgttgagggtgaggcttcctccaccttttgcttgatggcgatggtgagccggttatggtgctacttgagggtggcggcacgcctcttgaggtgctgcttctcttccttgctcctggcgatggtggagcgcacaggtcctcatgcgctcgccatggtgggcacatcgaaattgatgagacgaagcttaccaatggaggtggcaagaaagtcaagggagccgaagctaatgcgactccctggcacgaaggtctcgccaacagagagtgtggatagctgagccatcagagtgaacaaagttgattggcatgctaatggactcctacctagcgcgccaactgtcgtggttgcggaaaccatggacatagtagaatttgtgttcgatgggggaggctagcatgtactcactccgaatgatgaatcgagggattctaacatggggtttatattggtttaggcttgcgccctagtccaatgtagtgctggacgtaacattcactgaggaatgtgttacaacaggtgcttgtgtgggaatgagggagtggagaactctggctaaatgctcctcagccttttggctgtttgaccctccccttttatagttcaaggggggttcttacataaggacttgtctgaaggagggtgcgacctattatctatggtggtgttgctagcgtagttctcctgatgt

SEQ ID NO: 195245 - DNA, 486 bp, Zea Mays
gttggaccaggagtataaccaacaggtgttgcagcaccaagaccaccaggggttgcactccccatactcgctggcgtctcatcccaccttgacctctgcttcttaccaggtgttggcgtgacaccaccaggaagctttggagtcgcatcccaagccccagaaggagttgccccaggggtggcaccgccagctgcaggcgtcgcatcagcatcagccatcctacctggagtcggtgtctcatcccatctgttccttctcacggagggtgtggcgtctccaacacgtccaggggtggcatcccaacgcccaatcccaggagtcgcatcgggggcatcccagtccgaggatgtctttgccttcttgccaccggcagcagcatcgccatcctgcgactgatcccacctgttacgccgcttcgtcgcagcagccggctgctcaggcgcggcagccttcctctccttctccttctcctcctcttccttcttc

SEQ ID NO: 195246 - DNA, 345 bp, Zea Mays
caaacaactaatctaaaatacgtcaaacaactaaagttggtcacacacacatatctaggtcttttattgttatcttttctgctacatagtagcagatttacaaagtgaaattagaacaacattgacatatatgaaggttagtgccagaaaactaaacaaatgattagtacaggagcgaaagaagaaaaggcaggcaggaacagatgccaatgccccatccatgtcccaaattgactaaagtggtatatcctgaacccccaagtgaagcagtctattcaaacacagagcaactcctaactcctcttactttgaccaacataatcttcaacccttaggcatgaatga

SEQ ID NO: 195247 - DNA, 286 bp, Zea Mays
gtgaactagcccgtgtgaagcaaaccgcccccgccgcagacggtacattatgtcgtcttcttcttcgtcaccgtctgtcgcgactacgacgtcgaacgtgtcgtcgtcggagaagacgattagcaatctggcagcagtagtggagttgttgcttggtcatactgttgagtttgggatatcgaggattttctcgggccacgtgtaagaaatgcagcgtttgggttactttgggaacagagttgggtgttcttcgagagccgaagaggtcccggagccagaggaggag

SEQ ID NO: 195248 - DNA, 768 bp, Zea Mays
gattgcttttgcagtccaggatgtagaaaggtaccgagttttgcttcagtattttagagtttcttgggtagcagactataccatatattattatattataatgttcatcctggatgatcatgcttctgagcagcatggctaacttgaatcatatcattcaggggttctattaaaaggcattaccgataaatctccagcaaaattgcagctgaagcaacatgcaaaaagtatttaccatgttaatacaatttgccttagcattctattagcccacgaattttcacatttccttacacatctgagttaatcattgtcaattgtctttagaaatgtattgtatctgctgttttttccttgtatatctatgttctttttataaacagggacactaaggttcttctattctttgaaataacacagatttataaacgattaaacaagcttcttgggataaagaatcatatggaggctggattttcatggagtctggttcactgttttgctaatgatcaggccatgcccaataaaaataaagaaaagttggcacagtgcaactccaagacagcccttgctttcacagttctggatgagtgctttcagccacacattgacgatagaagtggaattaatatgattcacaatgttgcatataattgtgggtaagtatgccttccatctcttgattcattgtggttataattccatagaagatcaagataaatggttttcctgaattagctgcaattgcaacagaccaataaatcttgg

SEQ ID NO: 195249 - DNA, 404 bp, Zea Mays
gttgtcataaggtttccgatatgattgccccccagggaccatgcttactccgagcttatctcagaacgccccggctattttctcccttactatatcaatggcagccggtgcaagacaaccggctctctggtcaaacataggtggggttggctggaaattagcgtgttgtcttcccccccactggttatgtggtgcattgccacttgccctatatggttcataggtttaatcgttcctttccggccttctaggtggggccggaaagctttcctgggctctggatcttgaattaatgggatgatgcattgcatagtgtgatgggaagtgttgctgggacgggtgaggatttaggtaacaatcctcctcaaaaaggtcatgtgcggactattcggacattggcctgg

SEQ ID NO: 195250 - DNA, 404 bp, Zea Mays
gggctactaccgcaaattcgtgcacaactacggaacggtggtggccccgctgaccgcgctcctcaagaaggatggcttcgcctgggacgacggggcggctgcggcattcgcggacctcaaggctgcggtcacctctgctccggtgctggccatgccggacttcgtgaagatattcatcgtcgagtgtgacgcatcgtcacatgggttttacgccgtgctggtacaggagggccatccggtggcattcttcagcagacccatcgctcctcgacatcgcgctctcgtggcctacgagcgcgagctcatcggcctcgtccaggcagtgcgacactagcggccgtatctctggtgtcggtagttcatcgtcaagaccgatcactatagcttgaaatacttgctcgacc

SEQ ID NO: 195251 - DNA, 1498 bp, Zea Mays
ccacttaagcaggttgaggtatccatttggttcgacacagtgaagaactgaagatacgcattgtgcttgcttgtcttgcggggctcacaaacatcctgctggtgtgctgtgctgggaaggtcacataatccacttggctatatgccggggtgggaatgtgaatcggggcttcattagtgcaggcagcaggcttgttaacttggtaattagtcaatgaaacccatactctttaatgacttcttttggccactgttagcctgtgtttgatataatgtagctgttcatttgtgcttccttccaaaagttccatattttgttctttattggagcatcaattttagatggcaatgtatacctgaacatcttcaaactgtctacacaatatgtctgcattgtttttgtgcttatgccagtagaattaacaattaacaagtagtatctgttcattactttagttcatgttttgtgccccatgaaattggtaatggaattgcaaattggagttagacatcatgctttgaaatgcacaaactgccacaataaagccgtgacatccagctgagtgaaactgtcttttcatgcatatactctcagtaatcatcactaaatttatctggaggagtttattgttctattgtaagctgccaatttctttgtttcttctgtcaatcaatgaatattgcacgcttgtcttttttccacatttaggttgatatttcagaacctttttctgtgatttattttattatacagttgagggtttgattcactagtctcttgcacagttttgcaacaagcatgggggcaaaagttgaaggggaaagctatatgcctggatattatgccacaggggatctcaacgtggaagcaagtggtaggtggtctccatactatgaggagatgacatcaaatggccagttatgcaatggcttcgcaacaaaaccaacaagtggttattcagaatttgacaaagaaatactcaagcatcaaattcttgaacatgaagctgtgttcagacaacaggtgagtttaccctaattctaagaaacaaagtacatcatatcataattatttttttcttatcatatgttttttttcctgtcaagcctcacaacccactcgctatccaggtgtatgaactgcaccgagtttacaaaatacagaaggatatgatgaaacaacatcaaagaaaagaggtatattcatacccaactttggcaggtgcatcacatactaattcaccatcacaagtgccaccaaacggtgcaaagatgatgtggcagatgccagttcctcctgtgtctacaacatacaggaaagctattggagagcataatgatacaaaccagtcctgcatgaagttccttagagaaggcagtgtgcagtcttctccaaatggatttctatcaagtgatgctgctccaagaaccagacaaggcacttttgaccttcaacttccagccgatcattatatagatgacgatgacacatcagataa

SEQ ID NO: 195252 - DNA, 346 bp, Zea Mays
gaagaggtaatatgtactaagaacaacccttaccaacttcaacaattcattttaattcaattgtcaaacatccacaccagatgaatgtataagaagatcaaacacctcacatcaaagcaccacgaaacaagtagttccattgaaacaaaactcctaatcttactaaaccttgttcttgacgtcatgaaaaagataatcatgtaatctaacgttctttacaccccacaaaagggagaaagtctatagaactaatggagcaataaagccaacaagaagccaataacattctgtgcggcacagttcatcgaacaaatgccaaaaactccacaaagagcactgacagcac

SEQ ID NO: 195253 - DNA, 316 bp, Zea Mays
aggcagcgggatacatctgttcttcctggtgcttgggtttgacgcctctcctacagaaaagatccatctgctcctgtcctcctgttaatgccgatctgaagtccttcttggttcctgctatcataattcgagtcacattcatgattcgcatgcaaactgaagtccaatcaacggaggcatcctgtcctcacgaggagcaagtaggcaattgcagaggccgtgttacgtacggttcaaggaagtgctaccatagtccgagtcgtttctttactcaaagaaaaataccagagataaagaagaagcagcatgtcttccg

SEQ ID NO: 195254 - DNA, 577 bp, Zea Mays
tgatgctgagcccttcttttataggttatgttatcatgctttatgttttatccttttgttttatactaactcttgagtgactatgatggttcaaatttccattagagagctgtgcactaaaggagatgtcctccatcttgatttgagatcttctgagctggtactgcagatacagtccaaacaaaaagctattctgtctccatttgttgtgtaactaggatggcttgtacctcactagtcactacctccatctcgaaaggaatgcaattttgtctatgcaccctgacaagcattcgttttgggggcagtggtaagtacaagtaaccagttatgcggccatgggagagacagaaagagagagagagagagaggttacattgtgcttccactataaattgcacttgctatgatgataatggttgaatctgagccactcaagtgacctttttcctcctagtaccactgtctgaatactcctgcccccttacccccaattcccatggtgttttaatgattggttttgctgatgttgcagctaatgagacagctaatctgctctttgaattggttaaagctt

SEQ ID NO: 195255 - DNA, 633 bp, Zea Mays
gagaagggagaggaagagagattgccgtcgtggtggccgccagatttgccccaattggttatcacgctcgaccatgcccgtgcctcggtgtcagctttggatgctttaccttgtcacctggatgtgccgtggccgagacagggaagatcggttgtcgttggcaacaccaattactcgtcggggctcggcgggcattgttggccgccattttctgtggtcggggtttgtcgcagcgcaatcactggtaagatgtcccctataaggctcgccattttcccctcgatgtgatgcacccgtccgtttgcatattgggacgctagggcgtcgatggcggattctttgggtatgcactgccgcggctgcctgggcgccgccgtgctccagtgttgggtggagaagatgccccttggccatcggttcaccagtgagcggtggagatttggtgccagcgacaaatcggtcagaactaatggcagccgttgattccagatcgggcgtatgggattagaatatgaccgcgtaaaatcttgaccgtggatccaaacgccaacggtctagattggcttcattacatgccacttctctgatctaatctggacggttggtgatcgatcagatggttgtgatcctccg

SEQ ID NO: 195256 - DNA, 632 bp, Zea Mays
taaagagggcaatgccatggcttggtgaggagatatgcataaaggatccacagacgcagaacaccataatgcctggtctgagcttggttcagtggatgaacatgaatatgcagcagaactcatttgcaaactcggctatgcagtccgagtacctacgatcgctaagcaaccccaacatgcaaaatcttggcgtggctgatctctcaaggcagttaaaccttcagaaccagattctgcaacagaacagcattcagtttagttctcctaaactgcctcaacaaatgcagctggccaatgagttgtcaaaggcatctcttccactgaatcagattggtgtgggcaccaaacctcaagaacagactcaagacccaaacaatctgcagaggcaacaacagtccatgaaccaactacttccattgagccaatctcaaaccaatcttgtccaggctcaggtccttatccagaatcaaatgcagcagcaaaagcaaccaacatccatggctcaaaatcagcagccagctgccagccagtcactgatcctgccccagcagcagcaacaacagcaacaacatcaacaacaaaagttggtacatcaacagcagcagattttactgcagcagcaacaattgcag

SEQ ID NO: 195257 - DNA, 413 bp, Zea Mays
ctccatctccatcgcgtggcgtaggctctggttgcacaccgcaacagacggcgctagaaccggtcgtttctgtttcccccaccaaaatcggactcgttaatccatgcctacatatatgtgtgaatcgagctcctcctttcccccatgaaccgtgtgggcgagcctcgagggagcgtggagggaaaccttggctcctgtacgggagagggccacctgtgcgctatgaatttctcgccgatggagatcctctgccgctgggccactacgctccgtggttgtgctccaccacttacgtccagctctcgttgatcgacctgggaggatgcgcagcgcacacggatgttcgtcgcagcttcgcctgggtggattcattctcggcgcggctggaatttctcaccgatgtgagctctccg

SEQ ID NO: 195258 - DNA, 350 bp, Zea Mays
tcaaggtgactcgattaccctagtccggttggtagttggagattcgactatgaatgcgatcagtgcttatgcccctcaggtaggtcttagtagagcaccaagttgcagttttgggaagatctggatagcatggttagtaccatgcctaccagtgagagactcttcgtaggagagacctcaacagccatatgtgtgtgactaatgtaggttgcaaacgagtgcataggggttcaggtatgatagtaggacatagcagggggaggatggtttggccttcgcgttagcctacgacctattgatagtgaataccgtttttaggaagagggggtctcatctaatgacctttcaca

SEQ ID NO: 195259 - DNA, 575 bp, Zea Mays
ttcagcgcctagactggagttctacctcctcggcatcttcgcagaaggatttcattcttcttgctgcctgtgaagcacatcagacgcttccccagagtgcagaatttcctgctgatgtgtttacggcttgcctcacaacgcccatcaaaatggctttgcactggttctttctccccccttcttttttgtgtgtgtactgttccttctctccttttcttagcatgttgtgcttacactagtacatgcctataaaccatgcaggttttgtaagcgaacatcactccatggtcctctggatcgttctcttattgaccaaattcctggaaggcaaaatgaccgtaaaacacttcttggagagctcaattggatttttactgctataacagatactatcgcatggaatgttcttccacgtggtacattgtttatgagagaaataatgtttttggggaacaagaaaactagagaagattattaaatttcaaaataaatgttagcctatatttggtttatgatacatgtttcactgtgcagatctgttccaaaggcttttcaggcaggaccttcttgttgcc

SEQ ID NO: 195260 - DNA, 330 bp, Zea Mays
cacaaccctcccattgtcttcccctcctctcctcacgccgaccactccattcctcatcgccgcctccgcttactaatccccacaaccgcaccgatccatcgctcgccttaggttttctgctcgactacctcctggtgctccaccgttctggctcgattcgcgccgagggcggttgctccgagctcttagccacctgtcgccgctgtagcctgctgctgcgggggtgctctgccgtcggctgccgctggtgtcgaggaatagggttttgggactgccaggcagaggagggtgcattggttggcttgcgcatggggatggtgcccaacgggc

SEQ ID NO: 195261 - DNA, 483 bp, Zea Mays
gttttctctacttcgtcaattcacgagtcttgccttaactctatcctttgttatgcttttcattattatcatctttacccttgacacctctatatcttacattgatgtttatcatatacctaccctttagaatctcctctctcctatctcaatctgagagttgtattttaccttttttcccttggtagtatccttttcctcattgctcttgagttttcaacaccaccctttgctgtgcttctgtttagttttgcctttacctttcccatctctcgaccataccttggtgattacattatgtctgtgatataaaatctccaatctcctatcccaatttgataatgatgctttacatatcttatccttggccacatcctcttctttaccgtgtgtgagcctggacgcaacttcattctttgttgtactcataccactggctctccaatgccttcatcttttctctcatacccttgtctgttgtcg

SEQ ID NO: 195262 - DNA, 882 bp, Zea Mays
ctcgcatcacccgccaccgcgtcttctctcatgatgccgctcgctctaccgctccttcggcttgccactacatcgtcgtctcgctcgctcctcgccaacgctcactgccttgccgctgctcgcaggcttctccgctcgctccaccgcctccgccacatcctcggctgagaaataaagaaccctaactccccccgccgtggtggccgcgcaggcccgaccggcaccaatatcaaagatcttgcggtcgtggatggcgtagggtgtgacctgtactgggggagacggacgttcgacgcggccgccgagcagacgctgtcgtactggaccgtactcctctcttcctgtgctcctccatttcaattccatggctccgcctccgtctaactaattgatgatgaaaattggttcatcagtctcacggtatcattaaatttgattcctatactatgcttgcgattctgtgtcatctgcttgttttttgttggattggaccaaacttttggacagttggacgcatggagtatcgaagaggagtctgagatttgttctctgttcgtcagctatggaggagctgaagaacacgagcccacgaggcagcgcagggacaagaaggtcagttcgtcgagcttaatcataaagaaagtcatcatcagcgatatagtaccaaaacaacaaactttatatgtctgcagtgccatattggagagatagctgcaaagtcatccgagcctagaataggtactcacaacagtactctctatctgagttaaattactacatcatgaatttgtcaacaaataaatcaacttatatcggtttctaagaggttaaatggtctaccaagccattttatttctctcaaaacctcctcgcatttacgac

SEQ ID NO: 195263 - DNA, 578 bp, Zea Mays
cagaagcttgcaagtctttctagaaagcagagcaattttatgttggctactcgtttaaatcaatacctcatagatcatcctttgaagtcatctgatgagatggacaaggaaatacttgaattgaacattaagtatgaaggtgccttgctgaagcatgcaaatggaaataatgaagaggctctatctgatctgtggtcactggtccgagctagtgttctgtctagagttagttgttcatctggcattggcacttcacattcactggttgctagggcttgtttgaaactctcaacctggatggagcaagcgaactcaagtcctttaaattcgatcattccaatggtagtaaaagatttcagcgattctgatggatttcaagatggggcagagaaacttctatctggtgatagtgtatctgtttcgactttggattatcatgcacttgctcaagaaatcataggcactgctcgaaagatatcctggcaactttgccccactatgggtaaggcttggcttgcttatgcatcctggtgctttgctcatggcagttattctctgtctggaactgattcaaattt

SEQ ID NO: 195264 - DNA, 453 bp, Zea Mays
gaaggggaaaaagagagggcaaatgaagttccctttggggaaaaggagaaacaacaggaggaagacgttatacaggccacatcccacgtcaatagtgttatgcaagttgaagtgaacatagggctgaacaaggagaaagaaaggaagtttaagcgttttcgcagaatgaacaaacaagctgctggggcgaatgatgagttgggagacttgggtaaaagatcaagggaggcgatgttgttggaccaggaagatgagggagttatcctcaagaaagtaagaattgaatccgatggagtagatgcaagtgcaactatttctacaccatatgtgaaagtgggactgtcggaacagctccgcgagacgcaatgagaattgtagcctggaactgtcggggattggggaatggcccggcagtaaaaggccttctggctcttcagaaggaggaggaccccg

SEQ ID NO: 195265 - DNA, 459 bp, Zea Mays
gcggtatgcatccacttcgtccatggatactccaacctttgggatatttgcatgccatccaagttcgcctctagggaagaacaatggatatgatagtgcatcgtagcatccatggtatgagcggatgcagtgtcttgaactgtccttcccatggagcataacactcttgctgaattggcctcgcccttcgctcccttcgatctagacagcggtcacctccgaagtgagaggtgcgttatatgtcttctggttcaacgtctggtcaaggttcaacgcgatacgatagtcatcaaggttgtcaacgtggcccatggtcctaaggtgctcggagtatgggtttccacgtagtatgtcgactatctgtttgataacctccttgtctttctgttgatgctcttcacggcacttatggtaccgatgctcgaggctgggatcgtcatcataaaagtaaagctcaag

SEQ ID NO: 195266 - DNA, 984 bp, Zea Mays
agaagaagaagaagaagaagaagaagaatgtactagtgaagtaggagcgggtaaacacagctcagtaggaacgagccgtgaggaagcaggattattccaagaacagacctcaggtaaacaactagaagcatgccaaagacctatatgtacattttttgtggttccatatatttgtagtctgactaattcctatctttgtttaatcggaagatacaggtcacaaagaagaagaagaagaatatatgagtgaagactgggcattaagtcaaccatgcgacatgctcattggcaacaggatgaccgtacgatgtctaggatggccagattcttggcgactacgaagtggcatgatatcttcccccatgctgatctgcaggccattgggtccgtgacctcagatcattgtcccttacttatgcaaggtttatctacctttagtttctatagggggtttagatttgaagttttttggacaaaaattgatgggttcaatgaggtggttcagcaagcttggacatctagtgttcgttcttccgatgccattcttaggctgcatgtgaagatgatccgcacggctaaagctctattgatctggagacgaaagacagtaggcaattttaaagatcaattagcaatcattcagaccgtccttactcttcttgagaaagcacaggaatccaggcaactttccggggacgagctagagttcagaagaagtctaaaaatgaaaatccttgggctagtgacagtccaaaaggcaagagctagacaacattccagacttgtctggatgcgtctgagagatgcaaacacaaaaaaaattcatctgatggcaaataatagaagaaggaaaattttcatcagatcgctggttcgtgatgacaggttgctcaccagtcaggaagacaaactgcatgaggcccaccatcatttcactgaagctattggtagaaggggtgagagacagagggccgttcggtgggg

SEQ ID NO: 195267 - DNA, 371 bp, Zea Mays
actccgagttggaccgagtcccccacagaccaggaagtggctgaagcaggggctttgctagctgaagttggattgctgaaggggaggggtctgactgacgaggctgtagtagttgactttgtcttcaagaatattcagccgttgaaggacagggcatacccggcctatctgtatcgaggtctagccgattcaactcgggtcaccaacagaaaaattcctgctgtgggcttggtgaaccggcttgaaatgatacttagaggcaaggtatcaaacattggcgcccctgttgcgtactcggcctggaacctgcctccttccaaagcctttacttatttcgtgtcaaatcctccttctgctgataacggtttggg

SEQ ID NO: 195268 - DNA, 590 bp, Zea Mays
ctgcaactgcaatcaaggttcgaacagtagtcatatgcacaacaggtgcaaaagtctcatcataatcaagtccttgagtctgttggaaaccacgagccacaagacgagctttatacctctcaatggaaccatctgattttgtcttaactttgaagacccatttacatgtgatagaaacaacatgcgagggtaaaggaacgatatcccatgtatcagtgcgttcaagagcagccaattcatcaatcatagctagctgtcactcaagaatctcagaagcttcttgataagtagtgggttcaacaattgccacactagctcgtggaaaaccataacgatctgggaggttcaatggtaccacggtcacgaagacgatatccctgattaaaaacatcattagactcattattattagtacaagaatcgggtacaggatcacgatcagggccagccgtagaaatggagcgggaacgacgaatgtagatttggatgacaggtggtctgaaagactaagaagaagatgacgtggaggtggaaggtgtgttataagaatgagaacatcagatgtggatgtagaagatgacggttcagat

SEQ ID NO: 195269 - DNA, 376 bp, Zea Mays
ggcttttatagccgaggaggagggagcgaaggggcgtcggattgaagagcatgaagaccattaatggtgctctaactgtgtgggggaagaaacggtcgcgagtaacggcgtggcgtgatggagaggcgaatggtcgtgggggcgcagctgtagttctctactgcagcagctgggcaggcgcggacaggggaggcgaggagagcgagtggtgcacaagcgacggcagcgccacgttattggcgagcagacacggacgaacacgaacaggaaaagcatcacgtgaggaagaagaaagaaatgacccttacatgtgggccctacttgtaagagagagaagagagggggcgttaggaacacgggatgggcaatgggctcg

SEQ ID NO: 195270 - DNA, 332 bp, Zea Mays
gagaacgcccacgtggaacacgtcgtggatgtgggcacgggcgggcagctctaggcggacatcgacggtgttgacgatctccgtcacccggtatggcccgtagtactggggctttagtttgtcggcgacatcggtggccagcgacgatggggaacggtggcggagttggagcaacacccattcacccacctgatagatgatgtcgcggtgcgtcttatcatagtgcttcttctgtaccgcctgagtctgctccaggcgatgtcgaacgttagccaggaactcctctcgttcttccatcgtgcgtgcaacagctgccacacgtgtttcctccg

SEQ ID NO: 195271 - DNA, 528 bp, Zea Mays
aggttaaatttactacaacatatatttggtgaacatagaacttattaaattatacttctatgagcatgaccataatcctcacatacatagaacatatattgtcgtatgaatataagtgcatctagccatgataattaaaactaataaaagtcagcggcacatgacagagtgcagcagtctttcatacaaacatgggagccaaactgccacatatacaaacacacgagatttcgttccagacacaagaagaacaagtcgcagtaaagctataacttgtagtaatggcaacaatcgattgattaattaaatatatatatatgcatggacaatgactactcaccactaatcttgagtatgcaaacagttggtacttggtagcaagtttcgcaatgatccttaccagcaagctccaaaacagttggtaggtgtctggtggtagcagtaggtgtaatcaatatatcaagagaaataatcaatacacaacattagagagattctagtgtgtcaaaactcaaaaacaagtaacga

SEQ ID NO: 195272 - DNA, 289 bp, Zea Mays
gagaatttggtgtggatggtttcgggtcgctgatcctagatcggatggccagggtaggtaccggttcattaagtgaattgatctaatggttaccgtgggatggtgatccttcggccgaaatccatggatacctctttggtcgctactctttctaaagaacccctcggcttatttggaataagctcgcggtccaccattatgcaaagaatattgcaggtaagtcccattatttacaccgagcaccctgtacatttaggatattgtggtcgcagtccacagggcattaaat

SEQ ID NO: 195273 - DNA, 516 bp, Zea Mays
gtgaaggatcagatcaagactctgtctccctaacagcctgcctcttcttagcggcagcctgagcgctggcagtctgcaacaactccatcaaacgtaacaagttggaactaatcacaactccatccaacgtctcctaggagctactaatcaggttagcaccttgtacctatctgctacatccaacaacgtaggaggcgaaccttgagccggcgcgtcggacttggtagggcggcacacctagcttggcggcaggatcgagtgccaaggagttcaaccgccgcgcggaggagaaggcttggtcgtctagcgcgtcagagctgccttggtggtggggtcgtggcggaggggtaggcttgatcccatcagacctagctagcggcagggtcgagggcagaggacatcaggggcggatgagaaggccggtcagcacgacctgtgggggagaggcggtccagcgacggagaagcttgtatcacgcgtgtcggacctggttgcctcgctgcctggaaaatgaga

SEQ ID NO: 195274 - DNA, 608 bp, Zea Mays
gtttcatatggtagaggaaaaatgagatattaccgaggaaacaaagttggtgatcatgtgggtgctgatggtatcgagcgagtcagtggcttgcctgactatttattagatatagctgtcaactcttacttgaaggcgcaatatgcaatgtatcttcgtgaatttctttacacagaattgcaactcaaatcaccagagtctaattcagcaactgatcttttccttgatccacaagagggtaaatggaaaattgaagaacagatgggcaatgtgcaaaatgacaattttgaatcctcacaagagtcatctaagatggacaatgctattgagccaccctactttataccaggaaaaaatccagacatcgcatacaagtccaataaatggaataatacagtagcaaccaggtcaaaacctggtaatgatttgaacgaggcacttacacactttgttagagatgaactatcaagtgcccttaaaattgaagttggtcgcaaaatagggataacagatactaagcaacttgaaaggagtcttgcaaatgatgtagaacagattgctgctgaagtttctaaaactgttgtccttgactgtgagttgtattcagc

SEQ ID NO: 195275 - DNA, 1277 bp, Zea Mays
cgtgcctaattcctgttgaaacatctgatgcaaaaaggaagaaaggtctgaggtcttacttacacaatcgtttcaaagaggtgtcattctgtactcttaatatatttctggcgtttttctagctttgaattgcttgattgctaattttatggatattttttgttattgatgctacttttcagatggaacatgctgacaaggagaatatagcagcaaggttcgcacaaatgtggaatgaaattgtcaccagctttcgagatgaagatcttatagacaataggtgattggattatatgggtaaacttaatttccagcttgatttgtttttgctgacctaagttgatgcccacaatttttgatatagggagaaggagctgctacttgttccttatgtgtctgatcggacccttggtgtcgtgcagtggcctccatttttgcttgccagcaaggttattttccgcttttaaattttatggctttgttgtttgtattacatcatgttagaggcaatgctcattcatacattgtttgcaagttaaaaagggttgacctgttgttaacatcatgaatgtcagatcccgatagcagttgacatggctaaagatagcaatggcaaagaccgagatctgagaaagaggcttgacaatgattattattttaagtgtgcaattgaggaatgttatgcatcatttaagaatatcatcaatggccttgtacagggtgaaccagagaaaaggtccctcctatatttcatctattaaactctgaagaaataatttaccgatccatggtctacttgatgctgtttatttgctttcagggtcataaataagatatttgtagaagttgaaaaatgcatctctgaggacaaagttattgcagatttgaacatgcgggccctgccagatctctacttcaagtttgttgagttggtaaactacttggtatgtatgacctatatacttatgttagacaaactacatagtaatagattgtgtataacatgtgagatatttgcattgacccttttagttgaccctcaccagatacatatagcagtatgagattacaatattctaactaccaaatatactctaacaacgaaactagctatcagtatagagagatctaaatgtccacctgttattatgtcatcaaaaggtgctagaaaaggtagcacgacctgttgtcttgaagcaatgaagcatatcatatgaaagctagctaaattttattttcttgaacgacgcaggagaagaatgaccacccaaacctac

SEQ ID NO: 195276 - DNA, 354 bp, Zea Mays
attgttcgtcgtcgctatagttcaccccagggtacaccagtttgcactggcggaggccagcgcccagttcagcaatcaccactgaggactccacctcctcgacaggctacccccactggcaccccgacgaagttttcaggacagagcccaggaactacgtgtttcaagtgtgggaagactggacactatgcaaatgtctacccacagaggatggctactactccagtttagaataggcagcaaactccaggatctggcaagggatattctattgctaaggttaatcaagtcagcgttgatgctactccggatggtgctaacatcgtacttggtatgttctacgttaatgctatt

SEQ ID NO: 195277 - DNA, 352 bp, Zea Mays
gcgtagtttggcgttgttcatccattgaaaccaaacaagcatcattttttacttccttccccatggcacctttcttagcatctgcttgccctggatgtgatgggcccatgtcactttctactttaacctttccaatgttgtcactctcacgggccaatttctttgcagaagaacttctgggtgaagaaactggggaaaccaattcagatttagatatttcccctgccacactagcaagaagattcatagctgcgtcatctccagcttgccgtgaatgactagcttcagagtacttgatttcaataagagcattcattgggctgaacagagttcccaccttagtttcactgac

SEQ ID NO: 195278 - DNA, 690 bp, Zea Mays
ccgaatcgttgagaggagtaagcgttgaatgtcctctttcataaacccccaacagtcacctatcaaggaagcgaacaggcattacagcaagtagctggcaggacatcacggacagtgaacaggataaacatggtgactaacaggattataggacctcacgaagctacatagtccagaatcaatttatgggaataacatagaaccggaccaatcacacaaactaaaaaatcacgagatataagcatgtcaactaactgaatcgtcgaaaggagcaaggaatgagtgtcctcttgtcgaatcctccaacagtcacctgtcaaggaaggagacgggcattaaaataggtcgccagcaggccagcacatagtgagcaggagaaacacagtgaataacagcacctcatggatgtacataggccataatcagattatgggcatagcgtagaactgaaccaatcacacaaactaaaaattcacgaggtacaagcgtgcaagcatgtcaactaacaaaattgtcgaaaggagcaagggatgagtgtcctcttgtagaatcctccaatagtcacctgccaaggaaggaggcaggcattagaataagtagctggcaggcgagcaaacacagagaacatgttgagcatgttaaataatatttagaccatgtctacgaccattcttccaccagtaccttagc

SEQ ID NO: 195279 - DNA, 1108 bp, Zea Mays
gtggttatgctgtttgttcaattcaaaaacgtgcatatgatctcgcaacagttgctaaccctaaccttcaagcacgtggtgcagccaaagtggtacaggctttggacatagctcttgtcacaggaaatttgtcagtggcatattcttcactctttaatgatttatctgatacgttaatggaagagagatggattaaagaagtcagccccagtctgcagtcttctctgatgtggattgggactgttgagctatcccttatctgttctatatttttcctttgtgaatgggcgacatgtgattatcgtgattgtcgagcatctccctctcggaatgtgaaatttacaggaagaagagatttgtctcagatacatatggcagtgtctatcttgaagaataaaatggatgagatgaataatttgtctcgttctaagagtagcactcgcgttaccctgaataatatcaccaaaggttcttcactgaccgatgcttgtttgacagcagctgctgtggatgacacttctggattgcaaagtaatgcaaagaatgtggatgagaagaaggatacgaatgatatctttgaaagccctggtccactgcatgatatcattgtgtgttggttggatcagcatgaagttagcagtgttgcaggttttacccgggtggatgttctcatcgtagaacttatccgcaatggtatattttttcctcaggcttatgtcaggcagctaattattagtggaattactgacaagaacgacacaatgttggatgttgaaagaaaaaggaggcatcacagaactttgaagcagcttcctgggtcttctttatttgatattcttgaggaaactaggaccgtggaagagcaacagttatatgagatgatgtcgacatactccagcgagcggcgccttgttctctctgaactttcatgtgatcactcattttatgcaagtggcagaggcgagtatactgcaagttcctgcattcggaagcagagtgatcttccacttgcatcaggaggtgataagcatggaagagtgccagaacaagtagaagatgttaaagccctattgtcaagtctgttgggttttacatatccttccccagt

SEQ ID NO: 195280 - DNA, 318 bp, Zea Mays
agggccactgcgctccaagacatacagcaaagattctgggagtagtccacccagtacactacgctttgccaaaggcaaagatgaagatagtgctgcctcttcaccaccatgaaaagcttgatgagtatgtgtggccgaaaacaactgtgcaattgataggagatttgaaccaggatacgccaatgcaaagtaaaaggcaccagtactatataatcgaatcatagctttaggatttcttgtaacaatagccttaagcaatgaggcagctgcttcaacgatgctgggttccccagtaagcatagcctatacaatgcaatt

SEQ ID NO: 195281 - DNA, 307 bp, Zea Mays
aattcggttctccgcgccgccgtgaaccatcgcgtcgtggaccatcgtctctaggttcgtttacatcctccttaccctcgtttcagcacctttgcatgctaaggatgcttatcggcccaaccaattgaactagaccacgctagatcgccgggaacacctcgaattcccctcggttttcgccgtcggcgtgaatagagggattttgagctagaattgtgcaattgatagagggattagggtcgctaggggtagaatttggtgtcgaccaagtaagaagcttagcctttgcgtatctcggccgttacag

SEQ ID NO: 195282 - DNA, 664 bp, Zea Mays
ggacgtagagagagagatggagagtcgtatagaacgtatagagagggagagagggagagtcgtatagaacgtagagagagatggagagtcgtatagaacgtatagagatggagagagggagagtcgtatagaacgtagggagagagggagagtcgtatagaacgtatagagagggagagaggaggagtcgtataggacgtagagagggagagatggagagtcgtatagaatgtataggaggaatcgtataggacgtagagagagagagatggagagtcgtaggcagccgcttgatgtgcggcccacatgctgtgtgaagggaaggggtgccaactaggctcgcccgctactctccatgtgtcctccttctcacccgtccgcatctctttacttagtcttttttccgcgtctcactaaaaaaccatatcagagatcatgtgctaattctaatcacaattgtcattcatgtctctcttgcgattatgaccacagtaacacggtaactatggcagaggaaatggcgttgtatgcatgcttctcatttgtgcgagtggcaactaagtaaacaaattgaggaaatgtcgttcggtgtaaagtaatactttccctctctccctcttctctcttctctctctccctccctccactctctttcctctctctt

SEQ ID NO: 195283 - DNA, 592 bp, Zea Mays
tgtatcccatattttgatacttgagtcatcagaagcagtcacaaaaaaggtattatcatttgatacggcaatgtcattgacagaagagcgatgctcctggagatgtgccactagaattccacgaggcttccatccagtctccaagttcactgctgatctggagaaaggcaaccctccagtatcagagttcggaatgatatccccttgcaaagaggaattgctcttcatagagtcattgatgctgaaatcttgtcgcgtgctactaaaatgatcatctctggtctgcatggcaggacggtttggttccaaccaaggtagccttattgaagctttatacactgatgaatcagggaccatgtgtgtttctcctaaaccccgcttattatcagtacaaaaagaatatgatggtattcctttagataagccatcataaaaggagctatttgcagcagatgcatgcagagcaaaaccagaatatagtgatttttcaaaagaaacagagtttttgacatacaaggacatgctgctggaaatattagggcctttcggtcgcaggatatcttcaaggttggccaaggatccactttgtgct

SEQ ID NO: 195284 - DNA, 345 bp, Zea Mays
ataaaggagctgaacagggaagaaccagctggaattggcagtccaagctctgagcgttatgtgcttgatttcagaggggctcttgtggaaagaagggcaattgtctcgagagagagattaagtttgagccactgccttgccctttctgcacttattaaactaacgagtaagttaaaccttgtgttaaattgcctctatcaaattggcctttttttcctagcgcttgccaggtaatgttaattgttcagtggcatgagccttcatactgtgcttgtttaaccttttggacattccaatttatgggaagcaagcactaatgctttattcaatttcatttaggcccca

SEQ ID NO: 195285 - DNA, 275 bp, Zea Mays
tccggagcttctcccgtgaactcccgtcattatgtgatgggctggagctttggcatgaataaaccagccccaccccttgacgtctccaagcttcccaagttgcctttccatggccccaaggcccagtccaagctcttggcaattgtcctgccgatagccactgcaacgttgatcctctccataggcactattgtcactctggttgtccgaaggcggctgaagtatgctgaggtgcgtgaggattgggagggtgagtttggtccacatcggttttc

SEQ ID NO: 195286 - DNA, 303 bp, Zea Mays
ggcgtgcagccttgctggagaagtcgtccagctctccttcgctggttcccttggccttgagcctggcagcgcgctcagcagaggtcgacatgagtagagaagagaggagtcggccttgagactctcaggtgtctaacctaagctctgataccaaatgttagaggtaaacagagtggttttgccggaggtgctaacctcagccatcattgcttgattatatagaaagatgagatgagtcacattgattacataacagctcattagagcttagctaatcagataggagccttggcagccgcacac

SEQ ID NO: 195287 - DNA, 277 bp, Zea Mays
cgtagcccagcactcatggcgcgatttcgcaacaaagtgtgcttattagacatggcctatatccttcgacttggatagaattttggggaaggcgcccctgggtgtccgtccacatctactatttttcttggctgctggtcgaaaaccaaaatcttaggccacatcgtgcacgctgttccttttgttccgttctgacttatgtacccactaaaatgtcattacctctttgattgatctccagtcactacttaagatactcaggtgtgttcgtccctgg

SEQ ID NO: 195288 - DNA, 343 bp, Zea Mays
gccttgactctgtccatggattatgcttttcatcattatcacattgacccttatcgcctctacatcttaccttgatgtttatattatacccggcctttaaaaccttctctcttccatctcaattttatagttgtattttacctattttcccttggtcgtatgctattccttgtcgcttgcaagttttaactccatccttggtcatgctccagttgagtattacctttacctttctcatcttttaatcttaccttggagatcaaactatgtccgttctctaagatcttcaatctcctatcccagtttgggagctgtgagttacctatctctcccttgatttctt

SEQ ID NO: 195289 - DNA, 287 bp, Zea Mays
aagtcatttgaaatgaaatattacttctgaaagagtatattattaaggagtttagaactaaactagaccatgtaacatacctcgaaaagaatcaagctgctgtaatgtgtcgctgtcaagatacagcattgagggcaaccctttgttttgtgcagctaattccattaattccaaacgctcatcttccaccagttccatatagtcccgtgcaattctacgtgcagcagccctttcattggcagccttttgccttgctgcctctttctcttttcggagttgctcctttt

SEQ ID NO: 195290 - DNA, 461 bp, Zea Mays
gagaactcgtcgtggtcagaggaagtcgggcactgggggccggttggctccttcgcctgccatcgacctggctaggccggagtgctttgtcgggcgttgtggaagaatcgatcgggctgaggaggagctccgtcgggctttgattgtcaatgttgtcggacagaagattctggctgtgccgcggaggtgcgtgatgcgatcgcctcgaggttttgccttgaagtagggtcgctccgcctacgtcgtgctgcgccaaattctttcctcgtcttcttcccctcaattgccttggctgatcgggtggtctccggggggcaatcccttcatgccccttcgctcaggttgcatatttgaaggtggtctcgtcaggctttcgctgttgtaagtggtcggccgctggtgcccattggcgttgagctacgtggaattcctgcgcatctctgggggattgagtctgcgga

SEQ ID NO: 195291 - DNA, 313 bp, Zea Mays
ctgctgagggtgacatgacaggtctcctctatctctatgtggtcactggtcagcgcagagccacacgagcaaccaagtacacgataaactgcgaattgacccggcgtcggtgctggtgcggttcatccgtgctttagtcgcgccccatgcccgtgcacgtcaagcgttcgtcttaatgcctgtgaggcacaccgtacgcgtacgtactcctaccctctctgtctctaggcggcgatcaatggtgctcaagtgcagcgtggtggaccgccaggtcgtccatggagaagtgctccccatgcagctcaatgtggac

SEQ ID NO: 195292 - DNA, 402 bp, Zea Mays
ggtcggtgcctttctccctccctgcgcacgcaacagggcagaggcgagcgattcgcacggcggcgctcccggcgagctcactgtggataccgcccataggaatatgcggcttggcggctaaggcatcaccgatgaccaatcgggcggcatcagcacattaatcagcgctcgattcatcgctaattgaagcagagaaggtctcaagaggaaggagggagttcttacaagcaattagtcggctccgaagccagcacatgcggaagtgcggattcaccacgaacttcaaccccgatgacgaaatccgtgctccactcgccgtcaccagtccggccaagtcaaggtcgtgcctttgcgagggtatgcggatgcccaggtgcttcttcccggtccggtcgcggccac

SEQ ID NO: 195293 - DNA, 316 bp, Zea Mays
ctgattggatgcctgcgcgctcgtgcgcaggctcccgggagggtggtcgacgagacacgcaagatttaggtgtgcctatggatgcatgtaaaataacttatcttgcatccgttcatgcaactcacgtctcctatacacaggtaaccaaacataatcctagataaaatcaatgcatgcgatggtctagaatgaaacgatgcggacaaccaatcagacaaataatgtagggttaggcctaactctgacctctttctgtctcttttatataaggggtacatgttctatatagagacatgtacccttaagggtatattcg

SEQ ID NO: 195294 - DNA, 285 bp, Zea Mays
agacgacagtggccgtcgagaccaggggtcctgactaagggaggtggaaagaaggctggaagacgaggtaggcacggagcggtgtgaagggtccaggagccgcacgcgggatcgacaccaagacgcagagatgaggcatgagttcgacgaggaaggggatgaggaggcgtgtccgagccattgttgaagctggtggcgtcgatcgaggagttggtcgtcgtcggagaagagacctaggggagccgccgtaggcaggggatgaggtggcgcgcaggcgaagtaggg

SEQ ID NO: 195295 - DNA, 510 bp, Zea Mays
atgaactgaagatattgcatcttaatgttccagttaagtgttaacttctttgcctttgatttatttgagaggttaaaatgctgcagcctctgttgtttgatgatgcatttttatgacaatatatattttttgaagtagatttcatacatttcccagaactggccagttctacatgtggtggcaagcaatgatgggatgtacttggcagttgctggctctcacggactagtgctatatgatttgcgaaataaaaggtggcgtttttttggtgatgttacacaagagcaaaagatccaatgcaaaggcctattgtggatgagaaaaattgttattgtgtgcaactatgttgaatcgtcaaacacgtgagttttcacttctataccatctttcttgctattcctatcctgtaactgacttggccctgtttggtggagctctggtcggctttagctctggctcctccgtgtgttgaagcaaggagctgttttcttatctcttctcaaaatgagc

SEQ ID NO: 195296 - DNA, 453 bp, Zea Mays
ggtggcggtagttagggtttggtgccgcttgagccacctcatgggagacggcgcggggattggaattgtggttttctcactcagcatatgaaatgtatttatgaaggttacatggtagacgcgttgagatcacgcacaacggccggttcaaatatagcacaaataattgtaaatattttgaacgtgtttgaacaactatctcatttaaacaaggtctacctatgtgatactactgtatagaaattgtagcaacagacgagcacctaactagtctataagtaatatgattgtagtttatctttctccatacctaacttgttacattttttgcataaatcaagtcaaatcaagacaaaacaactaggagcttggcaatggtgagacaacgcacaaatactaaacaaatagatgaactaggactaataaaaagttgcatcagaatcctattgtgat

SEQ ID NO: 195297 - DNA, 396 bp, Zea Mays
gtaaaagtagactatatgccccctcgttgaacagataagatgactgcatatcgttttattaagaagaaaggtctgaaacaggaagaaatcccaaaccacattcacacccacaacactctagaagactagaacatactttttctctctcgaaaacacaggagagctgcgcttcattatttaagaagcagcaaacaaggtcccaaaatgggccagcacaaagggtggcactttacagtagccagcacctgacatagacaaacttatccataaaaacacgtcacagcactcaaacacctaaatcaggcccatatcccggctaactcagtagccccagcaagggccaattcctggcatcctctccgatatctcgcagcacctgggacacatccgccacgc

SEQ ID NO: 195298 - DNA, 326 bp, Zea Mays
ctcgagtatcatgtagcctaagtcgtgataaaagtgcaccagtcaagcattttgtgtcgcacatcacacatttaatgtgttgtacctaagacattttataagccagtgctttggacttgccagtaggccctagaccctagacatggggtccctactttggggtcgtaatgccctcaataggaccaggcacatccttctatttcgtggataggattacacttagtcgtagtaagtcccttgttcccacgggaggccttggaccctaaagaggttggggaccgacaattcatattatgcaaggtcgagggccttggggaccccaaaga

SEQ ID NO: 195299 - DNA, 528 bp, Zea Mays
gtcagtctacaaaaagacaccatgttcagataagtgccgtggaaatgcgaaatgtgtatgtagcgttggatttgtggtcatacaagaaggggacatcatgttcagataagtgttgcagaaatatgtaatgcgaatgttggctgttgcgtttgatttgtggtcgtgcaagaaggggtagaatccagaacgatgatatgggtagcaccaatggaagaaaaacttctccaaccaacagagacctctaaagggatgagtgtgtaatgcagcacgtagtgggattttaaggcgctaacggagatctccaaaggcacgagtgtgtagtgcagcgtgtagcgggattctaaggcgcgataataatatgaagtgaggcaagcttctccaaacaacggagacctccaaaggcacgggtgtgtagtgcaatgtgtaatgggattcttaggcgctaaagtgtgatagtaataggaagagaggcagggacatgggaagaggtaggaaaaggagatttcaaaggatgatcttgaataggag

SEQ ID NO: 195300 - DNA, 375 bp, Zea Mays
aaaccatacaacgccttgattatcttctttgaaacatttggcttttccagcccatattttctcacgaatatgtctcatgccctcattatccttttgggcatcaattatcctttgcaagaggactgactcaagctttagctgattcaaagttccttgttggaccattcccaggtttagcttctccatctcttgacataaagtgttctcggaggtcttcatcgttaaacaatggcaggaagccttgcggcttaatgcatctgccacaacattggctttgcgtgggtgataatggatttctagttcatagtccttaataagctcaagccatcgtctctgcctcatattcaattctgactgggtgaagatgtacttcaa

SEQ ID NO: 195301 - DNA, 388 bp, Zea Mays
caaacattcaggagccgaaggtgccagccaccctttgctcggcgcgtgtcccggcgtagctcacgacgcatcctcacctgcctgcaccgagccaaggagagtcgttggctatgcgcgttagctccgctgctgggtggtcaccatcgtccgagcacaacacagtgggtaccatcctctcactgaattacttataggaagcctcatcatgtagtttgtgcgctactagggcgagatccacctgttgtgatgatgctctatggcgcacatgtttcttttttatgggaacctcttcttagtaagtgggatggagagctttggtggagtttagcaggtggtcatctgatgattaggcgacgataaggaagtttttgatgagttgctaactgct

SEQ ID NO: 195302 - DNA, 350 bp, Zea Mays
gggcagaggcctcagaagatatcccgttcagcaaggaagtcaaatttagtccctataatcactactgatagtgcactggtaccaggttcgctggacagtcctgtcaatgaagattgtgcaggtttaccgaggcgtgcatctgtaaatagccttcaacaaacaaaacgaggagatcatgggctctcaactggacctgaaggcaatgagcctgtagttgctgagaaaaagctaagggacaagggcaaaagggctggtgaactggatgatgggcatggctctggttttcagaagattgctatgcttgggcatccttccaaaaggaataagttgcctgctgatgaggatattgg

SEQ ID NO: 195303 - DNA, 318 bp, Zea Mays
cacatattacgggtgcaatcagagtgagcacaataaacgtgattgccaagatgtgaaaactaagagcatgatatttttaactcccattcgtatgtgataacaagcctatttattggcggtcttgagcaaaatcataatagagtacttcaacatctaacatttgatgcttctgatggatgcctctcaagtatcaatgtagcatctcatattatcatcccatattattttcttggaatcggagtcagacattgatagtgtttgaaaatcggtgtcgcttccatatttgccctattctgcttcagttgaccagaaaatatc

SEQ ID NO: 195304 - DNA, 357 bp, Zea Mays
aaatttggatgggagccattgaagacaacaccatttctatgtttccacaacatccacgcgcctaaagcaaccaaggagtcaaagccctttttactcattccacccaaccgagcactattgaagcaccaccaatgatcaaaatcatctatatcctgtcctggaaggaagtcctgcaaaccaaaagaccttagcagctcaaaccagaaatgtcgcgcaaaggagcagcccaccagcagatggttgatagtctcttcatgcttatcacagagcgggcaaagaagcgactgagtcaatcctcgtttagccaatctatctgctgtccaacatttgttgtgagccacaagccatagaaaaaac

SEQ ID NO: 195305 - DNA, 272 bp, Zea Mays
atgatacaaccaaggatatgaagtgagttagggagaaagcattatcaaggagacaaaatagagaggcattatcaagtaggagtagggagacaaagaattcagtatatcaaggtagatattgcgcaagggtggcaatacaatggcaagacaacaaaagtataagaagtcaagggttatatagcaatattagggattagaaaaccacttataatataatataatatcgccattaccgatctagtcgaaaatttgaatactaaagaacaatccta

SEQ ID NO: 195306 - DNA, 858 bp, Zea Mays
gacaacctcctcgtctccgtgttccacgaggaccgctacttcgccgccgacgtcctcggccaggtcaagttgcccctcaccgccgtgctcgacgccgacaaccgcacgctcggaacgcagtggtaccaactgcagcccaagagcaagaagtccaagctcaaggattgcggtaaggacacaccttgccacttttcttgttttatttatttgcacttcattcaatttgtgatttttgtttcccgtctagttagttagtcagttaattagtcgccccatatcacatgatgatactctgtgtagcggtagtgctactaggactaggagagataactcccaaaacatgcttgtttcctgatgatggcttttgtaggagaaattcgtctcaacgtttctctggctcaaaactactctgaagaagagacgacggcacctgcacattgggcctcagatgaccttgcatcaaattcagacaaatcaactgaattggtgaaaggatcttctttgctgaatgttcctattgaagtatccacagcagtaccagagatctatgagatagaagctgccgaggaggataaatcaaacgctgctccatcatttgtcaacaagctatatcaaatgtttaatagtaaaccaaaagatacagaagcttctgccccacttccctccaagctgaacgacccttcagatattgccgaagaaacactgtcaaccagctctgaagctcctgagaagcaggatcatgatgtcagtgcaactatgacctttgatgagctactaaaggccttcggttctcagcatgaagggaaagaaatgcctgaaaatttgtctggtggagttgttcttgatcaagtttatgct

SEQ ID NO: 195307 - DNA, 387 bp, Zea Mays
acgaggacggaggtgtttgtgcgaacgtagcggcggcacggcaggcgatggggagatgaggaaagatgagtggtcgagagtggaggcgcggatctacggggaaacgcgaagggtgggatggcgggtggggaaacgcgtagctcggcgcgagaggggcggggacaccgagctcatggcgaggagatcatggcgaggagatctgcggggaaacgcgtagctcggcgcgagaggttggcaaggctcatggcgaggagatcaagctagaggttggcgcggagctcggccggccgagctcgtcgcggcgaggagggtggaagttgcagagcgcatcgaggacgggaagggatggtgggcgagggggagagcgatgtggggatcgtgggaggg

SEQ ID NO: 195308 - DNA, 1013 bp, Zea Mays
aggagtgaggcatctaagatcttgggctttttccagctgaaagataatttcccgagcgaataacagctgctgtctgacattcccgaccttcttctgtccccacgactgcaactcccgagcgagcctagccaatttatctgctagcagatttagagggcaggacccctccaaatgttgagaccatgaacgttgtacttcgtcatcaaatccatccaactttgtccagaaactttcgaagtgaaatcttcttttaccttgagtaaactcatgtaggccgaggagaagagggcaatgatctgagaacatggtggccgaactctggaggatacagttagggaagtagatctcccaatcagtggtgtagaacaacctgtccagcctaaccagagtaggtgaagccctttcattggaccaagtgtatcttctaccaagcaactctagctctttaagttcaaggtcgtttaagaggcgacgaaatcgacccatcatggcacggtccagattactattatttttgtcttccgctctatatataagattgaagtcgccacccactgcccaagggcctggacaggaagctctgatggttctaagctcctgaatgaaagccaatttcagattatcggactgaggaccatagacacctgtaaaccaccagggtgtgtcaccaccgtgtgcgatcagcagcgaaacagagaaggagtcgattcttgaattgatgacattgcatactgtccctttccacgccaatagaatgcctccacgagtgccttgagccggcaagaaaataaagttatcaaactcggatcccaacatagacatgaccattcgcctggagatggcttcctttttagtctcctgcaaacacaccaagtctgggcgtgtagaaagcaccatatcccggacaccatcacgcctcgacttacggttgaggccccgcacattccaaatcaaaatgtttgagatatccatggttgacaaggaaaaggacgacctaacaacggacggagctc

SEQ ID NO: 195309 - DNA, 541 bp, Zea Mays
taaggtggaagaggtggctgatcctgccgccgtttcacctgtggctcagagttgcggcctgcctcaccaagaggatgataaggtggacgatctctcagctgttttgcctgcagcgcgcagcagcgccctcccacatgccctgcctcagtcagggccggagagggctaggcaggatggagacggtggggagaacggagaggtgcaattggtgggcggtgcagtcaagctgtcatcggatggtcagcaaggggacagggtggtgcaggtggcagggccaacgttagaagtactggggagctgtaccactgttggtgctagttctatgcagaacggtggcgagggggatggcttgttggtggcagcagagaagggctgtggtggcagcagcgatatggggcaggaggttgctgctaatgatttcacagagattgaaaacaaaacaggcactggtgagttacagggaaaggaaaatggaattgcaggaagcagaacaaaacggtggtcgtcggaatcgtctctgaatccgctgcctaagaggagg

SEQ ID NO: 195310 - DNA, 402 bp, Zea Mays
ggaccccgccgactatcgccctctgttctgccagggcgtgctgtacctcgcccttggaagggaggcggaatcagagtccatgctcgagcgatgccgcgaggtcggcggcgacgcgctaatcatagatccgtcagtgatgataacgccgaacgtggagacggaattcgatggggagaagccggagccggcgaaggtttgacctgtaactctgcagcggatgatctcataataaggtaacactggcattttggtaaccatagacgaataagaatgagggaaatttcagaacatgttccggtgatactaattagctagaggaaaatttgacacggaaagttccttattctgtagaatgtgcctttgtggtgagtaaagatgtccatttcatatggcctttgtgat

SEQ ID NO: 195311 - DNA, 2005 bp, Zea Mays
gtggttctgtaactcgcgggggaacacctctggctcccacattgtcaaccacctggtttgtttacttatcttttttcatggcatagctcatttagaatttaagactactcagatgttaatttgttgagaattgcttaaaaactgattaatcagagttctgtcatacaagtctgttgataattgttttttagaaactgaacgagtgagattttgtcgtacaaatttgttgataattgcttaggaacgaacttagtgggctctgtttcacaatagtctgctttgaatcaattctaggccttttagttgttaaaagaagacatcatgctttattggggtgcactttatggctctataagtaaactattgctcagatgttgtagcaagtagcagcatgtctttcgtattatatgcgggggtggctaaggaggtgatcggtaccatcttaaaattggtaaattgatgccatgagtcggttagttagtttttgtatttttcatggtatgccatagtgtcggtgtatctagttgctgtaatttgttagccatgctgcattgatgtggctttagacttggaaggttttctggtggaaataagtatagaactatagataaaataactctgaggagaatgtcatgttaattatctcttgaattaggttgagaataagcaaatttgtagtatactgttgtatctgtgggagacattgcaatgggaatgcgacgattgctagatgtgcgtatttggttttgttgtgcagtagcagtattaacttttgattttttgtgctaatggaatggttgatacattttgtgaaagtggttcctattgttcagacccatttgcaaagggtccttggacatattgtttaaatagttggttaggaagctagctgtatttgcagtgaagacatttcgttcctatttggtatctagggtcttaattgttaagtcccatttgcaaggtgtcacttatactgtctaaatagtttgctatcagtttaatttaattttcagtgaagaccatctcaaaccgtatgagtaggagtgtagaacacaacattatgacagcaacatggatataacttttgttaaaaaaaattgtcaacacatctgtttctacaacttattatattgcaaccctgattccttattgagaggctctgtggtgtttcataagcagctttgctatcctttaggcaactcgcagcatgcaagcacaccattgtccttggacagtggacacacttttgatgttttggcattgtgttgtggtggttgtccaagcaaaccaaggactggtacaagtacatcctgaaaaatgcttagtacaaaagctgaggcatgggtccatttagaagtgaaatgaaggatggagagagtctggtgggagaacagtgatgatatcctatcaagtttatctagttctagaaagactatgattcttctcaccgaaaagaacatatatatgtaaaccaagcttcagtggtttggcaatgcgtcaaaatttctagcttgatctacgatgtcaaatgtcaatgctctaacagtgaacgtttggcctagttgattataagcatatacttgctacctacagtcacccataagctttgtatacaaataaatgcattgagtgtaggctagatcactcattctgaatcatatgcttattgtgttattgtgtaagaatccacctacctttacccatttaaatgaaacaaattcagtatacatggtcataaccatatgtttatcatttgcaggttagggcaaagcataaggaagtgtgccttcacaaggatagccctttgggagaaacaatccttgaatgctacaactgtggctgtcggaatgtatttcttcttgggtttatctcagcaaaattggagaatgttgtcgttcttttatgcagagagccgtgtttaagtgttaatgcactgaaggatatgaattgggatctcagccagtggtgccctcttattgatgacaggtgtttcttgtcatggctt

SEQ ID NO: 195312 - DNA, 330 bp, Zea Mays
atatggaaaatgtgctcgacgcttctcataggatcttcatggtctcgaactagcacatcggactactaaatgcagcaagagatcgaagagcttgaagggttctcacctctagaacatagatggtgcatgagacattttggccctaatttttggcatggttagagaaacaaggtggttgtagataatataaaggctccatgttgtgcatggtaagagcatcaattttaggagagaaaacaggaattgacaagttactaaatactaatgggaaggcatggatgtagaaatagatgcatcaccagtctaaggctattcccaacacattgtttc

SEQ ID NO: 195313 - DNA, 452 bp, Zea Mays
gacaaatcgtcatataggtagcctacatgaagagcaaccaccaccatctaactagcatcgaaagctagcaacacccaaatgtcagcttgggacaatagatcgcaacaggaaatagggcgtcatctgaagcaagcggaaataccttgtagtactcctcacagcctcacagaccgggttctcggtagcgaagggcggccctgcttgaagtggccctgcttgaagtggcggcacgaccctgcttgaagtggcgacgctgcatgcgacagtgcttccgcccgcgccgggccggatgagggagaacaagctaggaatcagccgacgccatcgttaagcacaagcctcgcttggtggcacgtggtttctacagcaggaggggatcgacttcgacgatgctttcgcccccgtggcacggatggaatccgtgcgactcctccttgcgctgtcagcccagg

SEQ ID NO: 195314 - DNA, 521 bp, Zea Mays
cgctgcggatgcagccttcctacaacttaaacattcattgatgacatcaccactcctccaaatgccggacttctccaagcgcttcatggtggactgcgatgcctcaggagcagggttcggcgctgtgctccatcaaggtgatggtgcgattgccttcttcagccgggcagttgcgccccatcaccagaaattgcccgcttatgagcgggaattgatcgggttggtaaaggccgtccgcaactggcgcccatatctctggggacgtgcatttacagtcaggacggatcattacagtttgaagttcatcttggaccagcggctctccaccattccccaacacacatgggtcagtaaattatttggctatgatttgactgttgaatatcgtccgggcaaattgaatggtgctgcagatgctttatctcggcgggaagaaccaatgggcactgtgcacagcatatcactccccatattctcgctgtttgacaacttgcgagatgaggcggccactaattcccagg

SEQ ID NO: 195315 - DNA, 366 bp, Zea Mays
acctccgcatgtcatgcccctacacgtctccttaaaacggtagggttgaacgtatgattcgcacgacgaacgatgtcgtgcgctctctactctttcaggcttcccttcctgctcactactgggctgaggccctcgccactgccacctacctcctcaaccgtcttcccaccaaggcggttgcccaccccactccttacttcgctcttttcggcatccacccctcctataaccatcttctgttttcgggtgcgcttgctaccctaatctcgcctccactgctcctcataagctagccccccgctccactcgttgtgtcttcctcggatactcccccaagcataaggggtatcgatgtctcgacctcac

SEQ ID NO: 195316 - DNA, 626 bp, Zea Mays
agaagctcaacggcgtactgtcgctgagacaggaagatcccgtcggaggagcgcgtgacggagatgttgaggaagtgatggaggtccccaaggtctgtcatggcgaactccgagtgaagaagggtgatgaagcgctgaagaagatccgtcgaagaggcggtgaggatgatgtcgtcgacgtagaggagcaggtaggcgagactctcaccctctttgtagacaaagagggagacgtcggaggaggaggcggtgaacccgagctggcgtatgtacgtggcgaaccgctggtaccacgccctgggagcctgctttaggccataaagagagcgctgcaaaagacaaacatggtcaggagcagcggggtcgacgaagccgggcggctgctggcagtagaccgtctcctcgaggtggccgtgaagaaaagcgttcttcacgtccagctggcggatgggccacgaacgagaggcggcgatgctgaggacagtccggatggtcgggtgtttgaccaccgggctgaacgtctcgtcgtagtcgatgccgtgctgctgagagaaaccacgcaccacccagcgtgccttgtgacgagcaagagtgccatcggagtggtacttatgcttgaagatcca

SEQ ID NO: 195317 - DNA, 863 bp, Zea Mays
taataatcgtggtgtatgcatatgatgaaatgtcttatgaggtggggtctaggggattagagcttctaaccttgggattaaattttgggatgttacaaacctaccccactgaaaggaatctcgccctcgagattcagactgggtttgagaaaaggtaagggtattgcctcctcaaagagtcctcactctcccaggtagcttcttcttctccttctctgctccactgaactttacagagtcttacttctgagtttcgggtctttcggacggccgagtcaagaatctttactggcttttctcggtactgcagatccttttaaatctgaattgtctcttcttcgatgtgactttctggcactttcaggcatttgcggagctgggatacgtgaaacacattgtggatatctgacatggattctggcaattcaaggcggtaggctgcgggtcctattctgccaatgataggataggggacgacgaattgcggagctagctttcctttcacttgaaaccttttgactccgcgcattggggagaccttgaggtagacaaagtctccttcctcgaacctaagttctctccgcgtgttgtctgcataactcttctgccgtctctgagcttcaagtaatcttttgcggatcagggcaactttctcttctgcctctttaacgaaggcaggcccttctagtgtcttttcccctacgttggaccacatcagaggggtctggcactttcgtccatacaaggctttgaactgtgacatcttgatactggcctggtagctgttgttatatgagaactctgcatacggtaaactggactcccaattcctgtcaaacatcaacacataggctctcaacaaa

SEQ ID NO: 195318 - DNA, 426 bp, Zea Mays
gaagatttgccatggtaaggatggtggcgctgatgctaagccttgcccctctagtgggttggacctccagtgttgcccctcctcgcatcctggccacgaggctgatcaacacccgaagacttctgtgactccatggtatactgatgctgcatctccacaccaagttcctgctccactgtagtacggaagtccaccaacggaaaggctcccaaggcatgcctgatagaaggtttcaggccctgacagaactggctcaccttctccatctcattaaaagccacatgagggacaaagcggaccatcttgttgaagcccacttcatactctctgacagacttcttctcttgcttgaaagactgcaaatcaatcttcattttctccaggaaggtgaccgggtagaacctcctttcaaactgcctgatgaag

SEQ ID NO: 195319 - DNA, 487 bp, Zea Mays
cggacttgccatggatcacctagtttgccatccttaatccgagcctggaggagctgccactcctcactgtttgcacattcctgttgtaggtcacggtagagttgaaaggtgggcactgacacaatatagacatatccattggctgtgttacgtcgagataatgcatctgctactgtgtttagtcgacctgcctgatattccactgtgaagtcaaatccaagcaacttactaatccattgatgttggagtacaattgatagttgctggtcaagcatgaatttgagactaaagtgatcaggccgcaccacaaaccgtctgccccacaaatagggacaccaatgacgtactgtctacaccaatccaatgagctctcgctcatatgctgcgagcttgacatggcgtgctgtaaaaggccgattgaagaaggctattggcccatggtcttggtgcagtacaacgccgaagccagagcccgacgcgtcgcaat

SEQ ID NO: 195320 - DNA, 385 bp, Zea Mays
tacaacagtggtagtggcaagtgcccgaagttcggcttcagcactggaacgagatatggccgcttgcttcttggatttccatgcaatgggagataatccaaggagaatacagtaacctgtagtagaacaacggtcaacaggatcacttgcccaagtggcatctgaatacgcatgaagctgaagtgggctatcggaagcatagagtaaacatctggatcttgtcccacgtaaatatcgaagcacacgaagcaaatgcccataatgaactgaagtaggggttgatacaaattggctcaacatatgaacagcatgagcaatatcaggtctggtgatggtgagataaacaagactacccacaatatgacgataccgagttggatctgct

SEQ ID NO: 195321 - DNA, 475 bp, Zea Mays
ttctgttggtgctagtggtgggataattattgcttggagatctaaacttggtgtggttggtgctagtcgtgttgatgcgcactgtgcttcggtccagttttgcccttctgatggtgggccctggtggctgacttgtgtctatgggcctcaggggaatgacaataaggtggccttcttgcaggaacttcgtgatgtccgtgctcagtgtgctggtccctgggtggtggggggtgatttcaacctcatttacaaagaggatgacaagagtaattcaaacataaaccgtgctatgatgggcaggttcaggcgctttattgatgatttgactcttaaggaagttcctctccgcgacaggaagtacacttgggtcagttcatcaaccagttcttctccggttcttgtcaagctggatagggtgttttgctctgtggactgggagcagcaattccctggttgcttattgcaaagtgcagcc

SEQ ID NO: 195322 - DNA, 718 bp, Zea Mays
cctagtcgtgagaccctcgctgcgcgcgtagtgctagcacaccggcgcacggcgttccttccccgcatgtgtggactatgtggagacgtagctgcgactgctgcgttgacagactgcggaggaggagacgatcgtgattggctacttcctctccatcgacgcgcgcctacgttggatcgccgctccaactcgtcttccgctgcgctgcacgtctattggtaaccatccatgatctcttacttgcaaatttcctacgtgacgtggtagatgtgtctagcacgattcctaacagtggtatcggagccatcttacatagtttttggtctggatctaggttcatgagatagatctatttgatgcagggtttgattagatcaattggtcataaggggttgaagtagattgcattgtatattgctgatgggattagttcgtcgtgactctgttgtgtgcgcaacttgcccctaccgtctggaatcaccatcggggctaattacgtacacaatcagaagatcgagacatcagatcggtaatttttgcagtacattgcatcgtatatgactgaaggaatcaattcgtccttctctgttgtgtgcacaacttgcccctaccgtctggaatcaccatcggggctaatcgcatacacaatcagcagattgacgtaacagatcgacgtcatgagtgtaatcttcttcaaggtatcgaatttgggttgatt

SEQ ID NO: 195323 - DNA, 400 bp, Zea Mays
cagtgcaatgagggaagagcccctgatcgatggggcacattagtctgttggaagtggcagatacgttaactctgaaagagcccacccccagtcaaaccctgcggtaccgagcctgggatcgggcatggcagaacctgataggggaggtcgggcgtgttggaaggaaaccactcgagtggatgccgcgcttggccccagactgacttgccataaatagttgaccgcatttaacctcgcctgacaccgagccacagcgcagcgctggcccacttcccactcatgacctacgagccccccacccgactacaccatgttaatggctcacacacatcttggtctgcgacgcacttatggcctatcggactagacctgagtgcacataccttcgacatgcactaca

SEQ ID NO: 195324 - DNA, 361 bp, Zea Mays
caagaatcgccgcgttctagagacttgaattattctaacactttaccatttgttagagttaacataaccaagggagaactaacaagtagacttactattttttatacaagtcaattcacgcgcgagaactacatacacatttaattaacgcattcaccacatgaacacagtttcacgccgcacactagtttctaacatgcttttcacataactcgtaattcaactactcactaacaataaatcacgcacgacaactaccacatcaaccgatttatttatttggaacaccgcctgcctagcgtaccactagttcccacattttgattcaagctcaacaatacatccttcattcgattataca

SEQ ID NO: 195325 - DNA, 452 bp, Zea Mays
cgggcagagctggtgtagtccgcgggcgtcgagcgtacacacgcggacgttcgcatggtgcatccggaagtgtagtcgacggaggcggtggtgcagctgacgaaggaggtgtcctagaggcaagctcctggaggacagggccgcacatgaggatagcagggtcttcctcatgcacgacaggcgacggccgtggtcgctcaacgtcacgtggtgacggagctaccacgggaacagctgctgcagggttaggggcaatcaaaaaatccatatccgtcacagggaggagtgtggtggagaaggaaaaggatgtctcgtcaaacacgacgtgacgggagatgatgacgcgcctggtggtgaggttgagacagcggtagcctttatgggaagaaggatcccaagaagacacaggctgccgagcgaggagctagcttatgtggtgttgtggcagagag

SEQ ID NO: 195326 - DNA, 466 bp, Zea Mays
ccaccggatccaagatccacggttcccagacacgatcgcccccgatctcacccatgccgtgcgattgaaatctaacggtccgaatcctatctgatcgaaccggtatgcggcatctaatccgagccgcacacgcaggatccaacggtcctcggtcgtcttcccaaatcgccgctatcgacggcggcgccgcccaccattcacggcgaacttcgccggggaaatcccaatcaagcgttccagtgccctaaaactcaattaaagactgctacacgatgcctagggggtggcgaatacattgagacgaaccttactggtaggggcgaagcacagaagtccgaccacggcgcgagacggacggtcgcggaaagcaaaatccggtgagaaattccgaggcggccggtgccttccgtgcacgagaagacacacacttgcaatccccgcacgacgaccaacacgccgaggtcac

SEQ ID NO: 195327 - DNA, 514 bp, Zea Mays
ctacgaagggacgcaccatccttaggccacgcccgtgtaaacgtgcgacgcaccgaaggcgcgccgaatagtcgtcatcagggcacgtacggtgcgacccccgcgtacggactcagacacaccaccactgcgttttggggccagtcaagttcggtcgtcggatgacctcagtaccatactctcagcagtgacccaaatacctggaaggattggacagtatgccataccggatgtatgtctacaacacgttgaaggatgacgtagggcccatgacgacgggacgaaccatgtttcgtacgaccgcgccgtgagactgatccgcgagacccacacacactatcacgaagacatgtagcagactcgctacagggacctgtatggcggatgaacaggacggagcgccataccaaaggtacgacaacgcacgaccctacagacgacgtcaggaggaccatgccacccagaggcagcaagccaagctccctcccagtagaatacgagatcatactgtaaa

SEQ ID NO: 195328 - DNA, 324 bp, Zea Mays
cgaaggtggaaatcaagggagttggatccatcatttttcaagccaagactggtgagcagagagttcttcacggcgtttactacattccagcgctgaagaactccatactaagtctgggacagcttgatgaaggagggtccaaggttgtgattaaccatggcgtgctccgcatttgggacaatcatcaccgattgctggccaaggtacatcgagggaagaacaggttgtacattttgtacctcgaggctgcacaacctatctgtctcgcggcgcgcaaggatgttgaggcatggcagtggcacgaacgtttcgaccatctgaact

SEQ ID NO: 195329 - DNA, 280 bp, Zea Mays
ctccctccaaggctccaacacggcaacacctttctctctacatcggctgggagaaaagagaacagagggactggagatgagctcctcatctgaagccttcttggtcatggtctactggtcgtaagttgtaaacttgcagtttcatataaacttgttgctgttgtgctgttatgaactattcaagtattgaataaacttgttgtgctgctgtgctggtctagtaagctggatgtactgctgttttggactattcaagtattgaatattggactatatgtat

SEQ ID NO: 195330 - DNA, 277 bp, Zea Mays
gtctagggtctgggtccagaagaacactataggcactaaatttcagtatctcttcttttttccccttttgcgaggaaaacactttcatattgatctacaggaaactataaaaatcagttgtttcatgccgagttgtgagttggtgtcagataaggaaccacactaggcagggtgacaccttcgattggcacaacacgagttaatataggtgtgcttactgaccaatccacacaggggttgctgccatggtctggctgcggtatgtggttggctaatt

SEQ ID NO: 195331 - DNA, 314 bp, Zea Mays
cttgggaacaaccaatcgatctccaaaccataaaattcccttgctgtcctgacggaagcacttgtatttttctgccttttgcttgatcatttccttgatcatctgaacacctttatcttcaatctgtgccctgactatttgctcttgcaatgtgggctccaccgagatatagcttaggtcaccggaagaaacaacttccaggttcagcttgcacagctcatcgcacagggtggtaactcttgcatccatggtcatacaattacactgggcctttctgctcaaggcatctgccacaacattggctttgccgggat

SEQ ID NO: 195332 - DNA, 313 bp, Zea Mays
agaaatgctgcagtacctgtcgtcctcggtgctgaagaagcctcagagacagcgcgcacgtagatcaacggggtggctccacgccgtcaaggaggttcatttggtggtcccagaagtcagaggagggtagaagagacaagctttcgatcgctactacgccgatgctagaagcgaagggtgaagggaggtggcggcggcttgctcgcggggcagagtaggcgggccagaccgccagacccgaccgcgcacgaaacgatccatgctgtagcagagcagagcacccgatctcactgcgatccatggcgtcgtctcc

SEQ ID NO: 195333 - DNA, 412 bp, Zea Mays
ccggatttcacacggccttttgttgtcgagtgtgacgcctctacgcatggattcggggcggtgctgctccaagacaagcaccccatagctttcttcaaccgccccgtcgcgccacgccatcgctccctcgctgcatatgagcgagaactcatcgggctcgtgcacgccatacgccactggcgcccatacctgtggggacggcgcttcacggtccggacagaccactacagcttgaagttcctcctcgaccaacgcctcgcgacaattccgcaacatcattgggtcgggaaacttctcggtttcgacttcgaggtggaatacaagccgggcgcccagaacaccgtcgcggacgcgttgtcccgccgggacacacctgacggcgtagtgctcaccatctcggccccgcgtttcg

SEQ ID NO: 195334 - DNA, 318 bp, Zea Mays
tggaagcggtcggcggcggaaacacgatggtggtggtggttctgctcgtggaagcgttaccagagaggttggtgcagatgccccagtgacacggtctaggatgaaagtggcgtctttacattctcacagtggggttgaaagtcagaataaccctgctaaggctgaggaaagagggaaggtggtaggaacagctactaggaggaagcagaagcgcaaggcccatgagaatgctggggatattgctaattcatgggcaggaatttctcgtaggatcacaaggagtttaagctcgtcggctgcagcagtctcattgccatg

SEQ ID NO: 195335 - DNA, 556 bp, Zea Mays
ctcgttgcagcatattttcctcctaactaatcctatccattcggttttagttttggcatgtaccattaattgttccgtttcaaatacgcttatgatattaaatgtgtgattaagatcctgaatgacaagttgcttttccagacaccgattattgcagctgtatgtattgctgttgtagtgttctattttcaatttttgaaccaaatactactagcgattatttatatacaataaactgatattgtgcactttgggtgtgtttggttgctcccttttttgtgctcttccaaatggttggctggccaattttaggcggcccaggaatcagctgggcattagcctgaatgtactatgcattggttacacgacgttgggcaaaacaaaacacgactagaatccaagctcctattctacatacggttactgaccaatgttttgattgggcacttgtaggcacaatccaaacacaccctatacatgatgtttttcattatctcattctagatgccttattaggttatatgtatatgcaacctctcaatgaggcaagtttgtt

SEQ ID NO: 195336 - DNA, 272 bp, Zea Mays
caagaggtgtcaagcacactagagatccgtaacgttacagatcaccatgtggcattctgtatgtggtcattgaaccatacagcaaattacattccagtgccgaacatagaagttctatcaccacagtcaatgcggcaagttgttataacaagaattgcacgacgagagcctgtgccagcagaccccgtcgacgacatagtctatgtgaagggcactaccgtggttcagggtacaacgagcgcagatgtcacttatgacatgttcgatggaac

SEQ ID NO: 195337 - DNA, 442 bp, Zea Mays
taactctgaactcgaaatggccgtgatgagtttggaatgccgtcttgtgttgatctttaggactcatacgaatctgatgaaatccagcacgcaaatcaagagtagagaaccaagcagctccatgtaattcatccaaaaatttatctatcacaggaactggatacttggtcttaattgttagcgcattcaaatgtctgtaatcaacacaaaaacggtatgtgttatccttctttttcaccagtatgactgaagaagcaaagtcactatggttgggttggataatgccagtttgcagcatatcctctacttggtgctctatctcatttttcaatgcaggagcgtatcgatatggtctcatttgtactggtcttgcgccctggatcaaaggaatttgatggtcacaatctctgatcgaaggcatcgctttgggtacttcgaagac

SEQ ID NO: 195338 - DNA, 329 bp, Zea Mays
tggttctatccacctttgtgatttgattgactcctgaagccgtaatcccatgctaatggtcgatctaagctctgcccacgatgaatacttcatatattgcagctttataagttacaattgcaaactcctttttcggttttcgaaaatgatgttcagtagtttcagtgccgatgccaaaactgactgaactctgtgtcgatctgttaccttgaaagcttaagcagctggtgtccctgcaaccgcctctgggaatattctgttgaatatcttaggtgttgatgcttgtggtgctggtactctggtagtaattcgatgacaccagacatgag

SEQ ID NO: 195339 - DNA, 790 bp, Zea Mays
gtcttgttgaaggacaaggagaaagacagagagaaacagaatgttcctgtaacagaaagtggtgtgccatgtaatgagcctgttcgggtgactgctgaggttaagacggttgatacaccaaacagatgttcacggaaccacaaaaaggttcctgctagtcttcctcaagtgattgatcagcttcttgagatcatcatgagctatccatctgcaagcaaagaacatgggtttgatggttattccctgttgactccaatggatgttgatgaaccaaatacaaagggcaaatctaaagttggtgatggccaagaactggatggtgatgctttctctgagaggtctgccttgctatcaaagtttgcatttgtccttaagttgatgagtgaaatactccttatgtatgtgcatgcagtagggataattctgagacgggatacagagatatcagtgtcacgaagttgcgctcaaggtgctggacacagtggtttactgcatcatatattctatctgctacttcctctaccttcagtcaaaattgctgatacctcagatgattggattggtaatttgtctgagagagcttcctggttcttggtagctttatgctgcagatctgctgaaggtcgtagaagggttgtttctgaaattgtaaaggcacttaaccaattcattggttcagcaagcaacacctccagaggatctttaatacctgacagaaaagttttggctttctctgagcttgtgaattccatattgtcaaggaatagtcagagcaatttgcctgttcttg

SEQ ID NO: 195340 - DNA, 345 bp, Zea Mays
ttgattatatagaaagatgagtcacattgattacataacagctcattagagcttagctaatctgataggagccttggcagccgcacacacctgttgagctgctcaaggtctttaatgactataattaactagcacaagtaattaggagaatacttagaaaacaggacatgcttaggaaacaggacttaataacaacatttctccccctaaggcctgtttcaactgatcttgatctccttgatcccaattctgcttctcatatcttccaacttggtcttgcccaaggctttggtcagtatatcagcaagctgatctgcagtgggaataaattctgttttgatgcta

SEQ ID NO: 195341 - DNA, 487 bp, Zea Mays
tgaatcgtggcggtgcggtggcaaggctcggacacgcggcgcaaggccgagcgacggcggttcaccggcgagcttatctgcgcaagccacaaggcacatggggtacggcggtgagtcaccggaattatcctccggcgaagggttactatctggcaagcttatctgatcactagtagtgtaaatctcaacggtggtggtgcgaatcacggcggggatcggtcgtcggcggtgagagtcctgcgctggtgatgtaacctgatcctggtactgtaccatgggatatgttcagtcagatgaacttgacagccaaacttggagctaaactttctctcaattctcaatgacaactcataccaagctctgcagcaaaattgtagagctacaaaccagcaatactttgactatagggattgaactcatttgagcactggattaaggttgaattcaaacccaaaaatggctctgttacactgaaagtcagaatttc

SEQ ID NO: 195342 - DNA, 410 bp, Zea Mays
ctcaaaccgaagcatctggtgggtgctgtcagagccacccccctttcctttggccccaagctcacacttctccatgccatcgccatgcatgctccttcgttctttagcgagccacacctactctgctctgttgctcacattgccatatatccttttcccatccatccattcattcattcattcgcgtcctcttttgtgtttggaccccccgtaaaccgtaatctcgctgccatacgtatcatgctgctttgctttgcttggcgccttgcattggttgggtgaacgccgtagcctcacgcacgtacagctaggtgtttcagcctttaattatggtaaactgatgccggggggagaccggcctggagcagcaggcagcagcagagcgcacccatctcgccgatcgccatcac

SEQ ID NO: 195343 - DNA, 377 bp, Zea Mays
gtcaaatgttcattcaagtcctcttctgtatgacattgacaaggatggtgtacgggaaatagctttggctacttacaacggtgttgtaaatttctttaggtaaggaactctatgactatgatgtacaggtttatccctgtcaaatgtagcaatatttatttatttattatgtagggtgtcaggttatatgatgatggacaagcttgaggtacctcgtagaaaagtacgtaaagattggtatgttgggctaaatccagatccagttgaccgctcccatccagatgttaatgacagttcaattgccaaagtggctacttctaatgaaactcccctaatagatcagaataaatcaggtatccaataatcttctatgggag

SEQ ID NO: 195344 - DNA, 309 bp, Zea Mays
aaatgaccagacctttgtgcaacatgcaaccagggtcagcatgccagctggccgcagtagaattcagggtggtggctgaacaaatcagcaccagggacctggtgcaagaatacctggccaacaggacatctccgacgttgagtgataggagcatgccaaaggtaaagggaacaaagaagaagtatgaacttgttcgattgccttatcgttttaagtttgagaaacagtttaaagagccttgccaagaatggctagagatgattgaaactatgtgcaatgaaattttggggaactataccaaaaaagaag

SEQ ID NO: 195345 - DNA, 958 bp, Zea Mays
gaaggaagctagtagctcaaagccgcctgtgaagaagaagcagaagagtgggccagatgaaggttctcaaaaaaagaagccaaagaagaagaaagatcccaatgcccctaagagagctatagctccattcatgtacttctcaaaggctgagcgagctgtaagttacttataaccctgaatttcagaaggccacattgagaaaactgaatatgattagttagagaagcttttaatctatcatttatccagcttctggtttgtgtttctttcagaatcagaacccaacaacttggaatttcactttccatttggttattgctcttctattttctctactcggttgtatgcaaaacacgctaggttgcaacaaagtgcatgtttttttgttattctagatgaggcacttagcctagaattttgcagatcaaacaaacaatagtcatacatgtcacaaagttaacagtgacttccccattgcagaatatcaagagcagcaatcctgaactggcgaccacagagattgcaaagaagctcggagaaaggtggcaaaagatgacaggtaccaccaatccagctctaacatactacctaaaagtccattatcttccacgtagatccttcctggtggtcatgtttgtttagagaaaaaaacaaaaacagacacggagagcatctggtctaaccatttccacccatttaaattttgtagcggaggagaggcagccatatgtggagcagtctcaggtcgacaagcaacgctatgcagaagagtctgcagcctaccgtggtgcagccgctcagcagggctctggtgctggatcggaatgaaggtttaatcgtctcgacagttaacttgcaaggctggatgattgagtcgtcagaataaagctggaatacccaaaaacctaagctgaatgtcatcgtttgacctgttgggttgttccggaattcaaccagg

SEQ ID NO: 195346 - DNA, 453 bp, Zea Mays
agagggtgttcgacgtagtgctggctggggagaacgtcacgaggatcgacatcttcaagcaggtcggaggcttcacggcgttcaagtggacctacattgtcaagaatctgacaagctcgacgttgagcgtcaggcttgtgccagtggtgggacggccgattctgtgcggccttgagaattatgcgatggtgccacttgagatgaggacagtgccgagccaaggtgatcaattctgaagatttttggctggactgctcaatatattaggagcctacaaaattgccccctactacctctgcccctctcagcttcttgcattggtttttgcagtggctgcaatgaaggcgttgaaggagtcgctgaaaattcctgccaggatgggttggaatggtgacccttgtgcaccgagggcatgggatgcatgggagggagttacttgccatcgcggtgaca

SEQ ID NO: 195347 - DNA, 648 bp, Zea Mays
aagacgtgcgcggaaaacttacagcttctgtaactgaaattttacattccaaacgagaaactttcagtttaggtgcattgaatcgacttggctggaacaatgtaagaccaaccactaccaagacattggcccaggaaaagctcaaagattcagatcatgaaagcgggcttaaggataccaaaatggttgatcagaacaggatttctgcaaccgcttttgagggggatctgaaagacattaatatgacaaatgatgataaacctggagaaagcatcgaatcgtcacagggaaagccttctcaaacttctgaacctgttggaacagcgacagaaattggaactgaacagccttataaatcagataaagctaattatggaaccaatgatagcagtgaagggcagcatataacagaacaggacaatgaaatgactccaaagcaagtttctgatgatcagtcagtggccaactgtaatgggccttctaaagaaagggagcaatcagcagatgctacaacagaccagaatctacaatctaacacaacaacagaaaaggaaggtgacacaagtcgcacaggtgaagataagactgctcataatgtgaatgatcaaagcacacaagtctctaaaacagaagaatcaaaaccttccc

SEQ ID NO: 195348 - DNA, 302 bp, Zea Mays
ttgcacaagtgttgatttcctttagacttctagggtaagcagcagcccgttctaccttggcgatagccaaaggcagagcatgacggtggccatcaacgactaccacgaatgccatggagcttggggtgtggccggcgagttaggtcttggcgccctaaagcctatcagcaggtcgacgcaggggtagcgtaggtcttggcgctgcccttaaaccccaccagtgtgcgtggtgggcccctacgggacccccatgaccgataggccacctccgacgaggtgaagttgatgaaggtgtggccctt

SEQ ID NO: 195349 - DNA, 808 bp, Zea Mays
ctggtatcacaaaatgtcatttgctagcccaatgacgtcttcatccactagttgtactctaataccctcacgtgcaattacaatgcccttgacatctaggaaacgtcttttgtggtataaaaggtgatctattgttttgaattctttatattccaactttttagcaattgtacggtggaaaaaaggtgccttacaaccttaacctatatttggacagttctctcacgcaatttggctaaatttcccatggtctttattttactttgagaaatagtgtggcataatgatgtatggtgttatatttgagtggacataaacaccatctaggtatgccttgaatagaggggattattggaaacctggtatcacaaaagtcattagctagcccaataacgtcttcatccactagttgcactctaataccctctcgtgcgaatatagtgccctcaaaatcatagaaacgtcatttgtggtttaaaaggtgatctattgtttgaattctctatattccaactttttagcaacgatatggtggaaaaaatgtgccttacaaccttaacctatgtttggacagttctctcactcaatttggataaattttccatggtcattattttattttgagaaacgatgtggcatattgatgtgtgttgttttcttgagtggatataaaaaccatctaggtatgccttaaatagaggggattataggaaacctggtatcacaaaaggtcattagctagcccaataacatcttcatccactagttgtactctaataccctctggtgcgaatacaatgcccttgac

SEQ ID NO: 195350 - DNA, 308 bp, Zea Mays
attagccgaacaccatcctgccgagccgcggaattcagaccgcgcacattccagaaaatcagatgatctggattcattgcaacaagaaagagacgaccgacatgagccgcagcgcagtcacataccacagaccatcagcccaccagcctccactgacgtctcaggcgcgggccaaccaaacagtgcagccagagcagagatttggacgaccgagagctgttgggggaagagactggcataccgatcttgatctttcatggtgattttgacctccacaacgtgctcagtgtgctggtccctgggtggtc

SEQ ID NO: 195351 - DNA, 351 bp, Zea Mays
ggagccagagctgaatatgtgtggtagcctccctgtatcccatcctcggcagaagagtccgtctgataagctcaaataagtacttggctgctgtagtaaaatctgccggtgaacgtcgctacccatctgagaagggcaggtggaacagagccgcgacgtgagctgtacccggagccacaccaccatgagggcgacgaggagggtcagaggtaccgtagcagaggctgtgaagttgagtcgtcgactcgggaaatccaaagagctggcgaatctgactggcagtaatggtgacatcctctcgctcaaaacgaaacctcatccagtgatgatccgggtctatccatacagacg

SEQ ID NO: 195352 - DNA, 468 bp, Zea Mays
tccctatagttgaacaacattatcctcaattcctcacccgcaaacagacttcgcagctccccctcacccacactcgccccagccggcgaggacaacaattcccgtttgccagtctcgtccacatgaagacgaccaccctccatctcaccacgatgacgcctatcacttcgcgacaactcacccactctccgtttcgccatcgccctccgccgcctacgcccagcactcgcacccggaagatcctcagcacccatcacacgcggagaagtctccgccacagccacatccaacactgcaaaataatccaagtcctcttccgaagactcctctgtccacacaatcgaactcccagaatcatcatattcaaaacacttagacacagaatcatcagaaccatcttcagcaaccacggtcgaagccgccacaaaattatcattgtcagtagcggttgcgtgcgcaggcccagac

SEQ ID NO: 195353 - DNA, 367 bp, Zea Mays
gtcggatggttctcccatgtccgctcgtcacgacgccgacactttcgagcccgcacctgtcccagcctcgaccctttgcatgtctcttcacgcccaggtggcggccctcaccagcatccgggcaaccgtcaccaacattctcgcgccggactccactcagtaccctcggtggcgcgaccaggtcctacagaccctccgccgctacgccctcgccgaccacgtcctacccgcggtcgctgcaccaacggaggattggctcctgatggatgaagtggtgctctcttggatccatggcaccctcacggccgagcttgaaaacatcgttcgagtgccggacgatactgctcaccgtatctggggtgcactt

SEQ ID NO: 195354 - DNA, 402 bp, Zea Mays
gtcacgcacgcggctgttttccccatccttccactccacctccgcaagaacggcgagagagcgcacccaaaccagagacacctacggcgggtcggcggccgaccccggggccgcgcccatcccgacgttttcccgattctccggctacctcctcccttatctccttgcgcgtgacgcgcccacgactcctcgtcgtcctcttgtgatctggtccccatctcgctgccgcctcctcccgacttaccaaactccaacacgccatgcgaccatgcgctcatgcatagcatagatatagctgtagccaagctgcccaagcacgagcaccactcgtcttctccgaccttccagctctagctctgatccgagccgaaacagccatccaagacgcccgcggccgccgtg

SEQ ID NO: 195355 - DNA, 278 bp, Zea Mays
aatatccaaatgcatggaggatcacaagctatctccctcagaattcactacctttgctgccaagattgcgctgctggaagagcgtgttgggaaggcaagacgacaagcctgtagtacaggagctaagcggaagagaccagaggagtgtgtcgagtagaatgctccctgaagcgaagttcagtttcactgtcacgtagaattttcctcacaaaatagttgtaactctccagattgtatgcagactaaccttcacatgttccagtcttacagacatgtac

SEQ ID NO: 195356 - DNA, 291 bp, Zea Mays
gtttctgattttgatgtgaatgcaaagccgactgcaaataagaatgatgaaaaaggtggagaagtaaagtacacaaaccacactcttgatgaagttggtagtatggttcaggctactatatcggcttttgacactaaggtgcatttagtatgttgtttgggattttaacattacacgtgattgttagctgtaaacatttgattgtattagtaatttaacatgctttgataaaaacaggttcagagtaccttccgtgattttgaggaatgcaacattctttgtccatacatg

SEQ ID NO: 195357 - DNA, 303 bp, Zea Mays
gtctgatcctatcgtggcttcacctggtttcaaggcaggaggatctgatagcgcaagcacacaaagaagtatttcatatgcttcttttagcgctcaattagttgcctcacgactgactgccactcgtacccggacccctctaaaagtgacttcatctggttggaagcctcttactcaacctgttgctctgaacgaagagaggaaatgtgcaaaccttacaatcaaccctactgctaagcgttccagagttacttcctccagagctgtcaaagattcaatcaacaattcagcttcaaaagccaa

SEQ ID NO: 195358 - DNA, 363 bp, Zea Mays
gtgaaaacagagggtctctttatcattaacgccaaggcgaagggggtaactctagatctaggccgttggatcttacttcgagggtcacgattagatggcgccttaagtgaaccggtatgttattagacccattcgatccccaatccacggctcccacgcaaccacgtcatccacaaatccgatccgcccatggagacatcaatggctcgggttctatcgttgaagggggtgtcctcagatcccatatgcgccacccttgattaatccaacggtcctatatgagcatggccgaattgacacacaccatcaatcctaaccttctatcttccgatcaacggtctagagcgcgctctcaatcactgc

SEQ ID NO: 195359 - DNA, 342 bp, Zea Mays
gcgtgagcacctcgccatggccagcgtgctacaggttcgttcatgtcctctgctctcttgtttcagtacccttatgtgcccttgatgcttctcgacccgaccgattaagctagaacccattagatcaccgggaacactttgaattgtccccggattgcacggtcaccgtgagcagagaggttgggagctcgaaccgtgcaattgatcgaggggaaacgattgttagatgttgaattaggtatcaaccaagttagagcaccggcctttgcgtgtcttggccagtacaggctcgccggagcttggtctgccgccattctgcattgagaacttggcgcggtgaag

SEQ ID NO: 195360 - DNA, 1127 bp, Zea Mays
atgcgatgcagtacaatgcacctgatacaatttacttcagacaggtatagaatccttaaaaactttatgcgcttacaataccatgatttgattattggcattgaacattttgtactatgcttgggaatgtaggctcattccatacaggagctggcacgaaagaagtttcaggaactgagggatgagggcataccaacagaaaacccgattaagattggacagaaaattagaccaaatttctgcactggagcactggttaagaaacctgttttgaggtatccagatgatgatatagatttgtcccacaaagagaaagttaagagacccaattcaaataatgtggatgatgacatgagcttcaaaaatcaagttaaaaaaaccatgtccaagaattcacaggatcgaagttgcttattacagaaagagcgaattaagaaacccattcccaggaattcagaggacaatttaagttcctcattccacaaagagcgacctaagaaactgatctccagacattcgaaggacgacccagactccccatctggcaaagagcaagttaggaaagtcatttcaaaaaatttagaaaatgatgaaagctccccgttccacaaacatcaagtcaagaagtccactccacagagttcaaaggacgacttcttatcccagaaaaaacacattaagccaattggcagaaatggagaagatccaggtttttcatcccgcaaaaagcccattgaggatccagttcgcacaaatgttgaagatgcaggcttctcatctacgaaaaggctgtctgagaagcccatcagtgtaaacggagaagaggatcgtgaccattgtcatcaggagtcatctaaggaaccgagttgcggagttgagcaggatggtcaaggttactcatgcgatgaagaggctgtgaaaaagccagtttgtatggatagccacgatgcccaaggttcagatatctctgctgccactattgcttctgtgggagatggctctaatggtttaagcatgtcacagcctaatgccactgaacctactggttgtcctcttaccaatggggttatagacaaagacatcagctctccactagatgaaataagatctgagaagactgacgatat

SEQ ID NO: 195361 - DNA, 276 bp, Zea Mays
cttactgtcactacgttctcgtccgtactcatctggtcacgtgaagtctttcaggctgaaatcaccttggcaactccttgctgttctgtccggtgagcatgtcaccgttgtttcatcctgtcgtggccagtcgagcttgattttatttcttagttttgatcacatgttttgtactcttttgatagtggtgaagccgaaccgttgtaggttgtttagaacgaagtcgaaccgtcgaagaacgttgttgtgaaccaccaaatcattgactaacctaat

SEQ ID NO: 195362 - DNA, 507 bp, Zea Mays
gcaagtgtttttaaggaacttttggagatgctttaagagctatcatttgtgttgtcatggtgtgatgttatggctggcctaacctacaacaacctacaacagaagggagaagaggggcactgccaggagacgtgggtgcgcctacgatcttggcaacaacagaactaggaatgggaggagtattaaggcgtttgtgtggggaaggattgctttgatttatcccttctctagacctcactcattgggagcctccgaccactggatctgccctttttttattgttatttgtggcagacagccagacacgccataagtgttttggaagccattcttattgatggtgccaatgacatcaagcatttgttttaccacccatgcttttttttctggcataccctttgtactaaaaaaagataaactgggtagaatcggtagattaacaaactgaaacagaacatggttaaatgcatgtccgactaagacataaatatcttgcatgtccagctt

SEQ ID NO: 195363 - DNA, 496 bp, Zea Mays
acccgatccaataccaagggtctagatttaaagtaacggaggggatccctgtcgtccgttccaaatcaacgatccatatccagttcgatcccgatcttatcacgaccctcaattctcgatccaaaggccaaggcagccccacacgtcccccctttgatcacacccgttcaaacctaatcaaacggccaaaagtttgtctcctacccgatggtgagctcggcgagcggagctctccgcgcggcggcggtgctgccagagtacgccccaacgcccctattctctaattgtactcgtgctacatctcgattgggcactgacgagactgaggaaggcactcttaccggcaatggtcgaggcagagggtctgcccgcgatgcccgatgactccgcgatgacggcgcacgtggatgggggaattccccggtcttccgcacctcggtgaggcacgaacggctttctcgcgcttcggtaaacctggttgacggcgagacggcac

SEQ ID NO: 195364 - DNA, 604 bp, Zea Mays
ctccggatacaccataattcttggtgacaacctggtttctggttgtccaaacatcagaacattgtctcacattccagcgacgagactaagtactgagttgttgccaacaccgttgcataggccacctggttatgccaactattgtctgagatgcacactcccttccgcaagacaaccttgttgtactgtgacaacgtcaatgttgtctacatgtcttcgaaccccgttcgacaccatcacaccaagcgtgtagagattgatctacactttgttcgggagcacgttgcacttggtgatattcgtgtcctccatgtccccatgacatctcactttgttgacatcttcaccaaagagctgccttcatcaatcttcacggagttccagtctagtctaaatgtcggttctactgacgcttcaactgcaagggcgtattagatagccaaatatggctagcgcgtgtgggtcatgcacaaggcgttaactgtcggccgaccctgtgtacatttggtcagagagatttgattggtggatctcctcatgtctatggtacaggtgactgagggccctatctatcatgttgagttgaaaatgcacggaaaagagg

SEQ ID NO: 195365 - DNA, 312 bp, Zea Mays
cgcgggacgtagtgttcgaggaagggcgaggatgggcattatgggacaaggcggtggatgacgacatgactccaacgtacgatgacgacaccatcgagtatgtccacttcgagggagctagggagtaggcaactcttcttctccgagcaggtccccaagtctccactgactccgtgctatgctctccagccacgacttcggctacagtgagctcttcgccaccacgtactccagcaccgacagtaaccccttcgggaatgtcctccccgacgccagctcgtgtcgagcacgacttggtggggcttgttaccc

SEQ ID NO: 195366 - DNA, 424 bp, Zea Mays
gtgccatgccttcaatcatgctataatgtcgaggatgtcctattgtagtggtagacttacatgtcacaggcatatgtatgacatgttgtgctgacaagtactaagcccatgccattggtacgacattgttagtagatggtgtagtagtttatacctataatagctggtgtagtagttggcccggtgcactggaccagtctggctcgctagtctcaggaatttaattataagattcaacgtgttgtctatagtactggtctagtggtgcaccggacctcagggtccaacgactctctcgcacgcaatggctagttcaacggtcgggtgacacatggaggtctggtggtggaccggactgggtctagtgtcatcccaacttggaaggcctcagtcaagatcccgaagaactcgtccctattctcgg

SEQ ID NO: 195367 - DNA, 321 bp, Zea Mays
caagcgtagatcaaataaacatacttcaaaatgactttgcctgcctgttgctatggataaggatgggacatgactgtcaccaccaccagcctattgaagtcgtcactcgccaccagagttgccggagcacgcagcagtttgcttggcttctattagagaatggatggatgccgccatagccagactgctggggagaacaagagaaggaagaatcgaaaccttagaaacaagggagaatcaaagaagggagaaacaagagatctgttgtgcagccctgagcctcggcgacctcacgacctcctatggcttgagtccaggctt

SEQ ID NO: 195368 - DNA, 553 bp, Zea Mays
ggatcatgcatatgaagacagatctgctgaactacataggcgatggcagacctggtgaagatgaggtaatggagagccctgccaggctatggaaatccacagggtcagccactggatcaccaacagtaccaggcaactttggattgacattaacgggggtggagcagggcttgcactcaaccatgtcgacacagtcgaggatgtcaatcatgtactggcgctgagacatgaacaatccatctgccatgtgttgaacctgcatccttaagaagtgatgaagtttgccgagatcctttatagagaattcttgctaaagcggggtgatggtgcgacagagaagaacaactgaagaagctgtcagaacaatgtcatcgacatataacattaggtacaccatatcatcgccgcgacgataaacgaatattgaggtgtcagacttcgcttcaacaaaaccaagtgagagcagaaatgaggcaaactgactgtaccaggctcggggtgtttgcttgataccgtataaggaccgattcagccgacagacaaaattcagatg

SEQ ID NO: 195369 - DNA, 285 bp, Zea Mays
gagctcctggaccggcgagatagggcaacgactagggttcccgagcgacggacatggaattggactcatcccaaacctttcccccaacttaatttcactaatgatcaatagggttgtgctgaccacggtgaccgtgaaggttgcggatggatgaagatgttcctggcgatgggtggtggtccagtttcattgaacgggtcgaggggtttgcggggtgcttatggatgctagaacaagaaacagagggacgcgagctaaccggaatcgagctggccgcagcgagct

SEQ ID NO: 195370 - DNA, 280 bp, Zea Mays
agttgaaaggttggtgttgagatcgtatagaccgatccactggtggtttccctgcgcgaaagagcgtctgctactgtatttagccggccagccctatattccaccttgaagtcgaaaccaaatagcttactaatccactgatgctgaggtacagttgagagccgttgatcgagcatatacttgaggctgaaatggtctgtacgtaccacaaacttgctgccccacaagtatggacgccaatggtgtactgaatgtaccagtccaatgagttctctctcgt

SEQ ID NO: 195371 - DNA, 863 bp, Zea Mays
agctccctctagttacgggaggaagagagacgaggacgacggcccgaggtggcggcggagtggaagtggagccgaggaccaggggcgtggctcaaggtgggacgacgacagggaagccaagaggtcggggtgggacaggaggagccacagctttgatggaaggcgtaaatgcaacgatgacggtggcggtgatgctgaccgtagcggccgccggacacgcgactacgatgagtcgaagagaccaccgatgtcaaggtcctattcgcataacgatcgttgggcttcagctgatgccagagtagatcgaaggaggagaagtaggagcaggaccaggagctactacagtggcagcaggagagatccagatttgctagcaggcacccgtgatttggatcgcaccaaggtgccagactctggcattgttcctgctgctggtggtgatggaggcgtgcacgatgcggatgccgatggaacacgaaagcagctgaaggttcctagttcaatgttggtttcggagatgaatgacagtgctgtcgaagctgcgcctatagaagaggatcatgctcaagacatgtctgaaggtgaggacggtgagtttgcagaagagatttctgaagacgaggatggtgagtttgcagcctctgatttgaatgatgaagatggtgatgaaatggatgacacccaaagacaaccgtctcacatgcatgttcatgcatctgaatctatcgaggaacctgtccatagacagtcccagctcagcaatgctgaagagggaatggaaactggcattgcacacgtggatgcatatatggtagagccattggcagagaacaatgttttctctgaaacaaggtatgaaatgg

SEQ ID NO: 195372 - DNA, 612 bp, Zea Mays
atctaatgctaaaatttttgggtggtattctttattcttccaaggaagatgaccttcctttgacaggataggcatgtctgatttgcaggacggattagaagcagaacttacaactgtggacacctgatcagctgaataatcattgacaggacttgcaggtttaccattcctatcgcattggtctgaggttgttgtaagctctggcttcttattagaaacatcaacttcatcaactggtgaatcctccaaatgagaccttcccattcggacccttgctcttttgaccaatggcaagtgctcatctccatctgacttgcatacttcattctttgaatttggagaatctgaaaggatttcactgtactcagcacgtaattcatctttatttggtgttgtacaatcttcataatgaggaacaggttttctatctgattttcttattctcctgaaaattacttctgtattcatgggtagattagatgtgccatttgatttcaattctgtctctgaagttccattttcagatgcttcactgttacaagtactatccgccttaacaggaggattcaacattttgctgccgttacaagtagtccccaaagttacaggttg

SEQ ID NO: 195373 - DNA, 411 bp, Zea Mays
cgagtattgtagatatcgtcgcgtcgtggtctaggaatttatcactggagttctccctccgccgcataatcacaccacgccatggtcagcaccaacaccactccgatgggcggtatgaaccctctctgcatgttcgccatcttcccctctaagtttagcaccgatcaatttcaaggttgggcgattaggcgtcggatcgtgtggccggcagcgaagctccgccgcgggtatgccctgcggtgccaccgtgttcagttggggttggtggcgtggtcgcatccgttgatctagggatcggcggctaggctcaaacaagctatgggacgttggtctatcagggaacggccacgattagatatgtgagaactttgtcattttaaatcagtgctgcagattgacgaatgggtggat

SEQ ID NO: 195374 - DNA, 541 bp, Zea Mays
agtcatcatgtcagttggattgaagtgtgtactaatcttgcataccctcaattgtacttctgcaattatttcccagttataatgatacttagtattaatgtgctttgtcctctcatgaaacatcttatctttataaggcaaatagcactctgacggccacagaacaatgtaatacaagatatatctccacaaaactcagcatataaatctttcaaccaaacagtctctttgctagcatcacaagctgcaacatactctgcctctgtagtagataaagcaattgtgggctgcagacaagccctggggctacagacaagccctccaactgactacatatccaccagtgaatacataacctgtcaatgatctttattcttatccaaatctgctccataatcagaatcaatatatccaacaaatccctctttgaccttgccaaactgcaaacaagcattagacgtaccacgcaagtacttgaaaatccacttaacagcttcctattgtgttctaccaggattagccatgtatctgctaaccaaac

SEQ ID NO: 195375 - DNA, 423 bp, Zea Mays
aacttgcaagggacaaagaagatgatacgcccaagagacaaataggtaaaacacacaattctcagattgatatgggagggggagactttaaagggtaggtatatgatgaacatcaatgcaagatatagaagtgtcaagggtaaaggtgataataataataaagagcataacaaaggatggagttaaggcaagactcgcgaagtggcaaaatggagaaaacaatcacaggtaaggtaggtaaggttccaacagaatggttgaagtaaaagaaattattaccgagggaagttatatggaaacgatgagaacgttaaggatgtgagaaatagaacgatcgctcatggatcatgaggaaacaaaggtggtcaagagcatgtaaactgaaatgttttgaaccgacattggggtacaaaggtaagcatt

SEQ ID NO: 195376 - DNA, 417 bp, Zea Mays
ggatgagggcatggcagcgagcgggaagctgtcctcatcaaaaaccacatggcaagagatgaagagatgagcatgtggttagaagatagatcaagacaatgatagcctttgtgatcgtcggagtagccgagaaagacactaggtggatcaaggagcgagcttgtgcgaagcagtagaggcagtgttagggtaacatgcgcaacccaaaactcaggtggtcatgcgaaggtgcagaaccagacaaagcgacacgaggacaaccaacatcgatcatctttgtggggagaagttcagtaggtaagtggaagtgtggagcccctcaaccaagtaccgtccacaaagggatgcctggatcagtaacgagagaatgacattgttaatggtacgaataatacgcttggctttactgttttgagg

SEQ ID NO: 195377 - DNA, 395 bp, Zea Mays
ctatggaggtggttctgctcctgcaccaccagcagacatcccatcctcctccggtgagccagcagcagtgccaccgcctccatctccgcccagggtgtccacctgggagttcctggacccgtttggaacttatgagagctactacgagcaaccaactgctacagcagctccatactctcctggcaggagtttgaaggatgtgcgcgaggaggaggggattccagacttggaggacgaagacatggaggtagtcaaggaagcttatggtgatgagaagcaccctgtgaagggttacatggggaacgggaaggccgcaaagggagagggtaggagcagcacgggggatgaattgccccgcaagtccaagtcatctgaggccagtggtagtggtagca

SEQ ID NO: 195378 - DNA, 310 bp, Zea Mays
tcatgggatagctagtacatacactaggtggatatatcatggagaagccatggatgacataattaatgaaaatggtgattacgaggatgaacatgtgagtttcaatgatgatgctggtatgaatcaagatgaagaagatcctgatgataggattaatggtatggtagaggagttatacacagccgaagatcaaggtaaaaggaaatctatgtttggagatatactagaggagatgaaacaagaactttatcctggtgcaacttatacaagattttcgtttgtggtgaagttgcttcatattaagtcgttt

SEQ ID NO: 195379 - DNA, 441 bp, Zea Mays
gggggggggggcaaatttttttggatttataaagttagccacttcactctggcagaatgggtagtatttcaccatttcgaacatttgattgatgttttccttattgtccctactgggcaccgtctgctgattgaatttcgttgctacattatgcggtcaacactgtcgcaagggtcagcttagttgtttaaccagctaaatgtagccacttatgtcaagcaagtatggtttgatgatgactggtgatgcaaaaggaaaaaacaaacgatccaagccactcgtttctccatactgaatgctagctgatttgtttgtggattgaggtatacattgtcaaatggaatgcatattttaaaatgtgaggatatactaattactacaactttgaatagcgatttaggcatttagctttactccactagaaatataactaaacaaacg

SEQ ID NO: 195380 - DNA, 596 bp, Zea Mays
tgcagctcttagctattattgcctttcaccatgggaagatggacattgacaccattagaatactacttagcgctgggccagccttttttgtactaaacttcattgaatgtatgttctctattgtaatattatagttatttttgctttatcttgattcctttctcatttctaaatgtaatctgggatgtgatcgatttatatttctacggttttttatattccatattttgtaggctgcttggatgtcatactcatgtttggtgcatataagacggcaagaggttttgctatctcaagattagttattcgatttctttggttaactgcagtttcaacatttgtaacctatctctatgtgtgagtactcacttagcttttgtaccttatactgtcaatgcacattaatgctgtctattcacttaaatgctgaatattgaacaggaaagtcctggaagagagagacacaaggaattcagattcgacttatttccgaatttatggtcttgttcttggtggttatgctgctgttcgaatcatgtttgcactgatggctaagatcccagcttgtcataggctctcaagtttttctgatcggt

SEQ ID NO: 195381 - DNA, 393 bp, Zea Mays
tggcctgttataaggtggcgggtagtatgaagacgatctcactggtgaagagtgtgttggtaggaatctatccaccatgccactgtcgttgtccatagggtaatttgactcgacacggactgtttccaccggacgtgggtgctcctcaatggacactgatgggttaggccctgacctcaggtaccttgaaacatgaatagttctcttctcatatgaaccataaggcagaccaagcatctctggcttctgttgcttgataggggagatgaatgtatcgaagattagctcatggtgatcatctccggcaacaaaccgttggagagccaccgaaacacgcttcagggactcaatgtaagcaatgtgggaagatgcaaatcggttgtgctgctccag

SEQ ID NO: 195382 - DNA, 639 bp, Zea Mays
attcccgtgttaccacgaggtgtactgcagctaggtgcgacaagtgtggtaagatatccatgctttagcaactgggatcactatatagtatcttgaagttgttctctgttattattatatatgggccatgacgtactactttatgactgtgttacattgttgactggtcaaatgttatttttccttgatctctgtatataaaccatatgtggtgagatctgaggagacaaaaccttcttgtggacagtagtggaatcttgaaaagaaaaaaaaacacttgtgataattgtgctctatttttgcacttagaactgctgtgaaagaaataagaaaaaaagattctcaagtatctctttattctaactctgctaaccaggcttctgacgtgttagagcttatcaatgcttattttttggcaggtaatggaaaataccaaccttgtgctccagtataagaacctgtgttctcagctaaacaatcggtcgagtatggcttcatcgtcatctgttaaaaatgatttgaaccagaaaattcagtcacgccctttgaatggcctcacgagtatacaccctgcagatacacgctcaaagttttttagtggacccccattgacatatcaacaatgttatggtcctgatg

SEQ ID NO: 195383 - DNA, 581 bp, Zea Mays
tgcataatgatgcttatcatgccaaaataattcccacttgccagtgttgcttgagtctctgagctagcaataaaatcttcatacaagtttctttgccttctagaaagtcggcaatatatgacatgctcttgcttctttggtaactgtttctcaacatctcttttcagtcgacgcagtataaatggacgaaggacattgtgcaaccgatctataatttctttgtttactttatcttgaccttccaccatcccagaaattggattgcagaaccaatccttgaactcttgatgagactgaaacacatgaggcatcagaaaatgcatgagggaccaaagttccataaggtcattttgcagtggagttccagtcagaagaatacgtctctttgaattaaagttgagcaaagtctgccaacgttgtgatttccagttctttatcagatgagcctcatcaagaataagatacttccacttctttctcttaaacactttagagtcctgtatgacaagcctatatgttgtgatgcaaacatggaagaaatttggtttcatccagccctgacgcttctgctttctctcctt

SEQ ID NO: 195384 - DNA, 1986 bp, Zea Mays
ctacaagctttggctagtaaacttgtaagttttagcctttgtttctcacaagagcagtgctacaagtacaactattgggtacaacttgagtattaaagacccaaaggttaaaatgacttggataaaaagctcatagatgcattgaacagttaaatacatggttgtacacttgtacttgaagttgtactcaaagccttacgcttcttacaatcttgcacttttgtttattattacctatcaactttaattgcataaattaaggagtggacctaatctatttgtctcagttcgattctctagtacgcacttacgttaacaaataagttacttaactacctaaatgtgtattcaaaactgaggtctcaagtccagtctgatatacaatataagagaataaattgtaaacaataatacaatatactcccactgactccaaatttaagttgtttaggatatcaacagggtatgatactttgacttgcaatttttataaaaccataccccattccatattatatgtatatgatgtttttctctctctagatatgtaccttttgctatgcactttgatatacaatatgtatagataaaaggctctgtttggaaaagccaaaatgtcttatagtttggaacagagggaataacattttagataatattatggaagtattttctgatgaatctagtaacatcaaacatgtgttgtcaaacgggaaaatattcagtgcaaaccctttaatcgatggaaacataaaagccttttacaaaaacacacttcggacttcggagtttattttgttgttgcttaagataaaaggctttgttgttgttgatacttaggaattctaaaaaaactgaaaccatgcatatccacagtgcatctatgtatatacattttcgcaaaatttgagattcaaaattaatattgaaaaaatcacatgaaaataacaaatttcaggttcatatgtattacgcactagaaaaattcctaggaagtttattctctagtgcatatgcatctcaaatttgttattttcataggattttttactaaacgaatttgaatctcaatttttgtgacaacgtgcatccgtagatgcactatggacatgcatagtttcaatttttttaaaaaacttgtaagtatgtttgtctaaagggtattcacgattcaaccgagtggaaagtttgcaccaatattttcctgttgtcaatttatataacatctcatatattgatagcatagatcatatttaagaagtttgaccgactaaatcctacaacaacctatgtctggagttggtggagctttcatgttttataactgagtatactatctttccatatctcctggaatgttttcctaaagcaaaaacatcttatgatctgcgatatgaagtagttttctgattatcatgtttggttgttattttcttgttcttgattgagccgttgagttaatcaggtaattatgattcttatccggatgcacaatttgtatttcaggaaggggagtctgtaaagaagaaagcatttgtcccaccaccacgattcttcaatatcgatgaggcgaggtgacatgtttctccttgtgaattgatctaactgtttctgtcattgtttgctaatcttgtgtaaacagggagatgcatattcgtgtggaacggaggcgagataaagaatctggggagtactttgagtgggttgataatttgaagttcaaagatggtttcttgtacaaatctgtctccactaaatcgatccacacaaacaatattcaaccgaattttgacgaacttgagaagtttaagaagcctggtgatgacatgaatggcgacatggctagcttgtccactctgtttgcaaacaggaaaaaaggacactttatgaagggtgatgccgtcattgttattaaaggcgatttgaaaaatctggagggttgggttgagaaagtagaggatgaaaccgttcacatcaggccaaaaa

SEQ ID NO: 195385 - DNA, 472 bp, Zea Mays
gaactcggagcggcaggcgatgaaacgcgccttgggggcgaacgacgacgacgacgatggatggcaatgaggaggcgcgggcgatggtgtgggagcgacagaaggcggaggggagcagaggcggcgagcagagtggtggcatggcggtggcgaaggggagccatggcaagggcatggcggtggcggaggaggtggtggtgccctacggaggcaaaggggagaggggccacgaggtagggacggtggccggatggaacggaggcaaaggggagaggggggccacgaggtagagacgatggccggatggaggcgagacggagacaccaagatgcgaggaagagagtacggaggacgtgatcacttagagctggattggaaaatgattttaggtccggactccacgaatcgacacgcctgtgttccgccgtacgcgggaaacgcggggagcgccccaaacggggttaggttttaa

SEQ ID NO: 195386 - DNA, 1134 bp, Zea Mays
ctctactctgattggtggcatctacggggcttatcgtcgtcttggtgaggttggtaattattttagtatcttgtgtatttttaatgcacttttctttggccttcgaagcagttccttgtccaacaaaaagcattgcatctagtagcaattagaaaattagtcctaggattgtgtccgctccctatttttaagcaaccgtttctagttttccatattggtagcataaataagaatgctgttattttttttttaccattttctttacccaattctgcttgttttattatgcatctttactttattaaaatttctctagtattgtggatcataatttatcatgattgatgagacttacatttggtatttgcggggggaaggcttcttcagtttatccctttcccagaccctgctcttgtgggagcctccggcactgggtttgccctttccttttttcatgagactcacactagactccttttctggttccattatatcagatacgtacattaggaatgttgagatctcgctttgaatctttgcctgaggccttcaatgaacgcttgattccttctgatgcaaataagagtaaaggtcttcgtgctgctttttcgagtagacccaaggtatttgtttctattgtaagactgtgcattatgagtagaccattggctgtttacctatgtgatcttacaaagtcttggtttttaggcttctggtgacgaaagtgagagagagaaaagagctgcaaggtttgctcaaatgtggaacgccattattacaagtttccgcgaagaggatctcatagacaatagggagaaggatctgctactggttccagactgtaaagaccgtgaacttgatatattccaatggccgcctttcctacttgctagcaaggttgatcttgctctttctgtaatttctctactcactatatttgtcgattcagcagtttattgtttatctgctgaattgtagatcccaatagcactggatatggcagcagacagtggtggaaaagaccgtgatctgacgaagaggataaagtcagatccatacttttcctttgctatcagagaatgctatgcttcattcaagaacatcatcaataccttagtatttggtcagcgggag

SEQ ID NO: 195387 - DNA, 282 bp, Zea Mays
ccctgttgccgcctatggacctccaccaaccggttatcgtttctccctcgacgttgccgctgctcactccatactctccaccgcgaggggtgttagactgtgtattgtgttatgcgcccctttttgtgtattgggttctgttatgtgttatgggcctagaacccaacccatgtatagcctattagggttagggggaaccgtaggagtggctagtgtatatattgtatcctggtcaacaatcaatgtaatccaactattccactctagcagcaagtcattttg

SEQ ID NO: 195388 - DNA, 532 bp, Zea Mays
gagattcttcaaggctatgcaaaaggaatacaaaatagagcccaagttgaagcactacacctgcattgttgacctgcttagccgtaccggcgacctgaaggaggctcttgagttcatcgagtcaatgccgattgaacctgattcaagcatttgggtatcattgcttcacggatgtagaattcacaagaacgtcaagcttgcggagaaggtagcagacaaggtctttaagctggaacctgagaacacagggtactatgttcttcttgccaacatctatgctgaggctgagagatgggaggctgtcaagaagctcaagaacaagattggtggtcgagggctccgtgagaacactggctacagttggatcgaggtcagaagcaaggttcatgtctttattgcagataaccggaatcacccagactggaacaggattgcagagtttctggatgatgttgccagaaggatgcggcaagaaggccatgatcctaagaaaaagtatgctctgatgggtgccgatgatgcagtgcatgac

SEQ ID NO: 195389 - DNA, 407 bp, Zea Mays
cttagctatgacgacaaaatattggatggtttctatgacatttgtgccactggggatgagcttgcaatgtcaaccataccttctctgatggatctgcaagcactgccattttcacatggaggcaaaactgatgctgtattggtcgacagagcactggattctgagctcgtagctcttgagcagaaggctgttatcatggctgtagaatttcgctcgaaaaaatcagaatttgttgaccgctctttggttcagactctagctaatttagtttccaactacatgggtggaccagtcattgatccagaaagcatgctgttgaagtaccgaaatatgagcagtgcgttgaaagctgatataagaagtgcagttgtacctcttgggcagctaacagttggtttggctcgtca

SEQ ID NO: 195390 - DNA, 283 bp, Zea Mays
atttacttttgttattagttggttagttggtgaattgaatatgtattagtcacgatggttttcttgttcatagcgtcagtgtgttgtgtgacgattactagatctgtagccgtagttttgtgctaatttcatatgtgtgtactgtgtagtatgggagagatattccaggtgtttaataacttggggggcatagtcctagcgtgacgctcctcatgtgttcggtgatacacgtaaaccagacagcatcgttgatttcatcatctcaagtcaaatttagttttgg

SEQ ID NO: 195391 - DNA, 921 bp, Zea Mays
ggaagactgtaaagcttcatccgagaaaacagatgtgaatggtatatgcatcctttattgattgtacaattgtagtcatttgttctttaaaaagaaaatcagtggtctcatagaagattaggagtatgcttgatctatttaaagtttaaccatttttttcataacctactgcagatggcaatgtatatggtattagtgatgctgtagtgagatgtgcactgcatgctccagccgatgataattatgagatttttttgggtcccaatactgatgtaccacgtcaggtttataatgacggatgcagtgatgtcaaagaagatcgatttgcttccaaaccctggacaattgatattattgaggatgcctctgtcaaagaaagatcaaatttaaaagattggcaacttgattccaagttggagggcacagaaatagtggaatctggcctttacttcaataaggatattggtaacattttacatagtggatctattggtgaaataactccatctggttctggtttatcaaaagattcatctgtggactatagaggggaggttttagatggcttctcaatggaagcatctcttgaaaggtcttctacacgtggggaacaaaatggttgtagactaggtcagtactatttataaaattacacacttaaattcctgcttgtaaatcacgtttgaactaaagtttatttattccaatgatgtgtcagatgctattgagaatccttcaattactttagcaacttctggttataagcatgaaggtgctttatctgaggaagcagtgtacacaaagaagaattacgctggaacatgcttgtcaaatcccagggaattaatcatggagctgcaatcccatttctcaaaggaaaacataaatgaatctgatcctcatgacagccttgtattccca

SEQ ID NO: 195392 - DNA, 495 bp, Zea Mays
tgtcatttgatccagtatatagggggcaccttgacgtgcttgacaagatagggaaggaggaggaggacctcatggcggagcaacgaaaagatttgattgtattgttccggagcatttgtcgtgtcgcaccagctgccgctcagctgttcataagagggctgattatgacagctctctcgtctgcagaagctagtgtggaggatgttgaggttgctcttaccctgttcttccggcttggagaagctgtgggtgaagaggagattcggagtggggcagggctcctaggagagcttgtgcccatgctcctttcagcgaggttcttgtgtcacacacatcgcttagttgcattggtgtatctggagacagttacccgctacatgaagtttgtacaggagcatgtgcagtatgtaccacacctgcttggtgtgttcttggataaccgtggaatacaccatcagaatgcccacgtgagccgtcgtgcaggatacttattca

SEQ ID NO: 195393 - DNA, 502 bp, Zea Mays
ctcccttctgttggggcagccgggggcattcttgtggcttggaggcgacatgtgggtttcactggacaaaaaagatgggataattatagtgtatcagttcagttttgtaatgacagggggactgattggtggctgacctgtgtttatggtcctcaaggaagcaatgagaagattatgttcctacaagaaatcagagaaataagggctgagtgtctgggaccgtggatgttggctggagacttcaacctcatttatagagactcagataggaacaacaataatttcaacagagcaatgatgggaaggtttcgaagcttaattgaggatatggctctgaaggaaatccccttacatggcaggcagttcacttggtccaaccaacaaaatgtgcctgtactggtcaagctagacagagtgttctgttctgtagattgggaattgctcttccccaatgttcttcttcagagtactgcctcacaagattcagatcattgtcctttac

SEQ ID NO: 195394 - DNA, 282 bp, Zea Mays
ctcatctgaggggcagctcaatattgtacatgcacagccaagcttgcaaacaacagggcaacatcacaagtcaaaggatcacaagaaatacagaaaacactcacagttcatcacatgccttaatggtccacaaattaaatagcagtacagcacacaataattgttttatggtccacacacattaggataagtaaataactagatattaactacacggcgcctagcgcgtgcacaccgtgtctaggcgcgcccagcgcctaatactgcgcctagtccataaac

SEQ ID NO: 195395 - DNA, 458 bp, Zea Mays
ggtatttctggagcgtatgtgctaccctctgcggatggcagagagcaaggatacgtggtgacaggtacgatctcagttgattcgtttgtggcccatgctctttttgactctggcgctagctattcgtttgtttcggagaattttgtgtcgcgagctggtctttcggtgcagaggttgggtcacccaattttggttagttctgctaatggctccattagtagccgttcagtttgtcagcggtgttccgtcattcttgccgatgaggtcttttcggccaatcttgttgtgatttccttgggggcattcgatgttatcttgggtatggattggttatctcagtatcgcgcagttatatcatgtttttggaagacagatttattgcaggcgccgtcgagtagggaggtgatattcttgggaagttccccaaagttcacgttatccttgttgtcgcaattgct

SEQ ID NO: 195396 - DNA, 416 bp, Zea Mays
ttagtgagctcctcaaggatgaggacgttgcataccttgtggaaagacaggaacatgacaaagtgagtgatgcaagtccgaaggtgatggtagcgctcgttgaggccacagagaagattgaggacgagtgtgcgatgggagacactccctggggtcaacagaggggggccaccatgcctttcatctggcgataatactcggtgacaaagaggtctccctaaacgaaggtccaaaaggcagcgtcgaggtggagagcgtgagcctcacggttgccaagaaattgttcctcgacagcaacctagtcctgacgaacaatgccaccacattcgcggacatcctgcaactcaccgatgacggtccccgggatcccggagaggaccacactatccatccaccaccaagatgggatagtgaga

SEQ ID NO: 195397 - DNA, 710 bp, Zea Mays
aaagtatggtgtcgtgacgaggatgcctagacgtcgggccgtgcactttgtagggaggtgaatcgaacctatagataggtagtatttatgaactaaacgtcgtggacaaactgctgccgccagcaacttctccgtggacaagccattgccaacaacttctctgaggtcaaactgccattaatcctctgcctcccattccacatctgttgctctacttggcgtgcgccgcttagctccactctactcaaaacttgacagtcggcaggacacgagaaggactaaggatgatgagaggaagaggaccgattgatcgaggactgattgagtaaatggtagaactagttggtcacctaactgtcacctagacaggcgtccaaacgccctagaggtgactcagtaagtcacctcgccagggtgccgtgataaccatgatagaccatcaacaaaaatggctacaaccaagcaaaaagtatggctatctagaccacatacttcaccatagacaatgcactaataaattcactcgatttgagtagcaggtgcacatatttttttaagtcaaaactcctatagtaagctcttccagtagccaatttcggatgctcatctgatggcgctggcagctttatttggatggacaattgaggatggcgaggaggcccatgcaactactctgctgtcctatttttgagggatcccctccttggttg

SEQ ID NO: 195398 - DNA, 332 bp, Zea Mays
aaattttattcaagtcatttagtgcactaaaactattacaaccaatcaacggcacattctccccgataatcacccaaccatttgtggtttcaattagaccccacatgagcactactactttttacccgtgcccataaccatacacatttagaccacaacaagccattcgctgtgattacgagcttaaccaagttatctaaccattcgattaactagagcaacgacatcgccgctaaataacatacacgtcaacttgccttttattgccgcaatccgagacacaacatatactacaacatttttataaacccacagattcacaagtatattcg

SEQ ID NO: 195399 - DNA, 397 bp, Zea Mays
agaaaaccccacccagccagagcaggggcaaagtgcctgtcagctggcagacaccccaacaataacaacagagaaactatcccacatgactttgagcttggaggaaggaaaccccttagctccagccaaggaccacagaagagcttcctccccggccagctgaacgaccaccaccaagcttggggatgaaccattaaagaccacgccatttctatgcttccacagcatccaagcacccagagcgaccaaagagtcaaaacccttcttactcagcccatctagccgagcactattggaacaccaccagagatcaaaatcctcaatatcatgtcctggaatgaagccctgcagtccaaaagtcctgaacaattcgaaccagaaaagacgtgcaaaggag

SEQ ID NO: 195400 - DNA, 423 bp, Zea Mays
tagccaatgagcggcgaccaagggagcaggtagtaggccgtgttctaggctggccttttccatcgcttttctcgccggtattattagcgcggatcgttcatcgttcgggattggggttctgactcggaacctgatcagtgagtgtggtcttctgaaagcgagcaaaggaggatggggttctccttcttcacctcccgagccggtgctcgactgctggacgggatcgcgcgccccggcttctccaccgccgcgcttctgctcacagcggccaggtgcgagtgcttcctccgtcgctttccaccagaaaccccccgattttgctctctctctctctttttggaggagggcggttgtcgcgtgatttactgctcctttttctgttcacccatctgtttcttcccgtccctttgatttgctctcctg

SEQ ID NO: 195401 - DNA, 796 bp, Zea Mays
tttgttgcgactttatgcttatccaatgtccaccacatgagattcttaggtattttatcataggccttttccaagtcgataaaaaccatgtgcaagtccttcttctgctccttataccgcgtcatgacctgtcttattaagaaaattctttccatggttgacctccaggcatgaatccaaattggttcatggtgatatgcgtcattcctctcaggcgatgctcaatgactctctcccgtagcttcatagtgtggctcatgagcttaatccctcggtagttggtacaactttgaatatctcccttgttgttgaagattgatactaatgtactcctccactcatcgggcatcttgtttgatcgaaaaatatggttgaacaacttggttagccaaacgatagcaatatccccaaggtatttccacacatatattgggataccacctgggcccatcatcttgccccctttcatcctctttaaagcttctttgacctctgatttttagattctgcgtacaaagcatctatttaaatcatcaaaggagtcatccaattgggtgtccatagtctcattctcaccattgaaaagattgtcaaaatacctctgccacctttgtttgatgtcttgtcctttcgtgctacactgttgttatttcctgctgcccactgttgctgttggtgctgttgcctcttatcattgctgctgcacttggtcaactggattggtttggtgggctgggcttgcctgtcgtttctctccgatactgttgtcgcatgttgttcattacccactctaaac

SEQ ID NO: 195402 - DNA, 280 bp, Zea Mays
aggtgataaacaaatttgtagtggatctatgcactaacttactttccaaaatggcaaaatctatgaggaaccaaacaccttagtccatctccagcagcgtactcatcttatcttctactccctctgtccaaaagtcctcatcgtctaagcaaaataaattcttccaggaatccacatcgtttaagctagggaccacaatttgcacctcatcccagacattcatggctcctcgtttgcgttgcttcatttgatgcgtctttattgtccagttgcttcaaat

SEQ ID NO: 195403 - DNA, 354 bp, Zea Mays
tttttccatccttgcttgtcaatcgctcgatctggaaggggacggtggtcgtggttggtctgagggcacacagcagtgagggacttagggaagtgaaaggaagcggagaggtgagcgatggcggcgcatctagaggacagagggaagcgggaatcgtggcggcagcatggggcaggtgcggaggctgaaagacggttctggagaacgaaagaggcgtgagagggcggtggctatgtaatgttctggattgtgatatataggcaggggagggacacatcacacatgggctgcctggtgggctaggccgctaggccagcccactactactttttcttttcttttttcctattcttc

SEQ ID NO: 195404 - DNA, 596 bp, Zea Mays
aaccgttctgcattgacttcttcgtcattgccttagagggctatgaggtaactgggtgcacacccttgggcccatcgtcggggacttcatgcacctctccacgacattattgtggcttgatcatcaggtcaagtggatggggataggcggcctcaacccgcaggcgctcgctctttccaccaacatcctgcagctccttctggccgaattcacagacatcttcgccgaacccatggatctacctcctagacagtcattcgaccaccgcatccaccttctgcggccgactccacttctcaccgtgcgaccatattgctatccgtagctgctgaaggatgagatcgagatgcagtgcaccgacttgctcttccaaggcatcgttatagcaagtatgtcgccattatccatgccaatcctattcatcggcaaggaagacggaaccctgtgcttctgcatcgactatcgtgccctcaatgccaagactgccaaggacaagtttcccatcccggtcatcgacgagctactgaacgagctcaggggggcttcttcagcaagccggacctccgttgtggctatcaccaggtgttcatgcaccc

SEQ ID NO: 195405 - DNA, 370 bp, Zea Mays
gccttacatatgtatgtcaccaccgtcgctttggcgtccaaatctacggaaatcaattgtgtcaggagccatatgaggtgcccttggcgggggtgggagaagggggcaaacaacaggagattctggcgtgagacagacagatagggagtgggggagaaatagaatgcaagacagaatattatgtgatactgcccaggagtcgttgttgtcctcccttgatccagcagtattggcggcagtggccacctctagtcgattcagcagcaggagtcaggagatgctgccttgtgctatagtaacaggggttgctgcctctgatccacactccatcacaaaggaactgtagtctccagcgcatgctccagcagtg

SEQ ID NO: 195406 - DNA, 881 bp, Zea Mays
cttttctaaagtgtccgcaaattccttgaggaggtcatcaaggcaagctagggacatatcctcggtgtcggacgagttctctatcctggtaggaggtagggctggaggggcttcctccttctgctcagtctggcatccttggcttctggtcttctttcggattttcttcgcgggggcgagcttctttagcttcttgccgtaatccatcttcagggttcggtaggcttcacgagtgttggtttcctcgccttccgctatttcgagactctcttggagggatgccttttcccttttaagttccttgacttgttgctccaggctttccacccgggagtttaggtgagtgcagtgggaggaaaggtcatcatattggttatcgagagtgtggaggtatccggccatgtagacgatggtagggtcatcctcggtaggatctcttcctgacagggcctgaagtcttttcctccaggcaggggtatttttgttgctgggtggaaagtagtgaaggggagtttcaaagactactctgctgtagttttggcatagctgtcggagggcttttcgggcaacattttggcaagtgtctgggaagcggtgtccggtgaaagtgacttggaaaagagggtggtttgggtagtttcggctttctcccaggtagactgccatagagcaattctccattctaatctcgagatattccttccagacatattttggcttcttgcggatccccatgcgaagcgcacaacttcgcaacagatgtgggaacccctctacctctgagcagtaggatgtcctaatgaccagagagtcttccatctggaataggaaaagaagggtctgctaatatcagggaaaaggagagaagatttttcttgggg

SEQ ID NO: 195407 - DNA, 747 bp, Zea Mays
atggaattcctctctaggacatcttctagcgatgctcctcttgttgcctttgggtcatctgatggtgtcatcagggtcctttcgatgttgacatggaaggttaaatataccctaccctacacccttttcttcattactggtgtgctgcaagtttaaactgagtcatttgatccttgcagcttgtgcgtaggtatacgggtggacataaaggagcaatagcttgcttaatgacgtacatgtctgcagctggtgaggtaaacttttgcataaatatgtcttgtctttgactctggttgcttcattgtggtagttacaattatgttccttttgttgtgttcatatgttgtaattttctattctcatgtttcatttcttaacaatcaattgttgttaattcttctgattttcatttcttcagatattactgtcatatcttccaattaacaatgcattctcttcaggtacatttagtttctggtggcagcgatggcctgctgatattatggagtgctgatcatatccatgactcacgtgagcttgtgcctaaaattagtatgaaggtactggcatactgactttgattcactgattatttatgtatcaagaaaaaataaaatggtacaaaatgtttgtaaataacttgtaaaaacattacttagcatgcaggttgcttaataatgtttttttgggtgttttctgaaggcccatgatggaggtgttgttgcagttgaactttctagggtgatg

SEQ ID NO: 195408 - DNA, 508 bp, Zea Mays
cggcgggcggggtggttggcgggatctcgcgcgggctcatgcgggaatggtgagaatttcgcgcgcgcgggaaggtgcactccggtgaatcctcttgcggctatatatggcgacggtgctccctctttttcccctcctctcgttgctcgttcttcttccaccccctcccccctcgtgagagaccggcggcgagcggctgtgcgtcgcggctgtgtccagcttcgcctggtgccgggactccgtggtgttgggcatctgctttgtcgcttcgtctctggtcgatctgcttcctatacttctagtctgctccgtctccattactacgaccttgaccccaaggtgaaatcaacccccaatcgttgtattttctggttcatgcttcatgagttagggtttggtacagtgtgttgttcatgttatacctgctgcgattttgattttcatgtggtttgctttggatttatattaaaatggttgatgatgttgtcctttacgttcacttggaggt

SEQ ID NO: 195409 - DNA, 273 bp, Zea Mays
tccttgcagcacttcagtttgttacaatcaaagtaattctgaaagaccaacagcgtcatctcagtcaaaggaccagcatttggtaagacactcaactacacctacatatgtaacatatccaaatggcaccccgaaaagcctatctgcagaaatggcagaacatgccggtccagaagactttgcagtagagagtgagagttcatatgccactgaggacgatgaattcaacaatgtgactggacttgattctcctgttaccagagtttgggaaag

SEQ ID NO: 195410 - DNA, 628 bp, Zea Mays
atagctgttgtagggagagattactatggtgtatttcctctcaggggaaaactattgaatgtcagagaggcaaaccacaagcagataatggacaacgctgaaattcagaacataaagcaaatccttggtttgcagcatggaaagcagtatgatagcaccaaaggtttgagatacggccatctcatgataatgacagatcaggtttggcatatagctccaattctatatcaaccaatcaaactcaagttttgtctgctcatgctttgacaaacaaacttcaggatcacgatggttcccacatcaaagggttgctgatcaatttcattcactcattctggccatcacttcttaaagttccatctttcttggttgagttcattactccaattatcaaggtatataacagttggggtttatctttgggcatatttttatgcatttttaacttttattcttgatcctttagtaatgagcaccgcaggcattttttccctgacagatttgtaatttttgtaaaacatgtgtttgactgccatgatgatacttgaattcatactcatttgtccaggcaaccagaggccaaactactaagtcattctacacgttgccagagtatgaagaatggaga

SEQ ID NO: 195411 - DNA, 792 bp, Zea Mays
tgaagagagatatgggactggagcttcaacacatccaggttgtggttgctccccctacttcttcgtcggctttcgatagtatactataggttgcttcccctgtttgtcattcacctttaccccaatggaacaatcatgttgctccccctgtttctcattcaacttccctgcagtaggacatgggattgacccaacaatcactgcctcatcatcctctgtctcctcctgaatattaatagttgggtcaccatgatccccacttctttcgtcagtactcaatatctgcgtagttatccctttatccacttctggtggaatcatacctccaacaatcaccctcctgaagctccactagcctcatcactacctcgaccactgtcatcctccccctctcgatggtctcctccatcgaccgaagagaagtcctccaggatttgatatggatcaactttctttctataatatgggtcttcctcacgaaatgttacatccatactcactaacaatctcttaccaatagggtcccaacacttgtatcctttctgagtagatgaataacccacaaaaatgcacttgactgcttgaggatccaacttactcaccataggtcgatgatattttacaaaacagacacaaccaaagaccttgggtggaacaagaaagtcacaccttcccaatagaagttctgtaggtgatttcatattaagtattcttgagggcatccggttaatgaggtatgtggccgtcattactgcctcactccacaaatacttaggcacattcatctgaaac

SEQ ID NO: 195412 - DNA, 336 bp, Zea Mays
cttatggtcgaagttgccaagtactcccaccaatggggcaagaggagacaccggctcgatggctggtggcctcgtcagacgggactagactctaaatcgagggtagactgctcgtcaccacgtggctactgatagccacatggaccccgccttgacccagcagtattggggtaccaacagaggcccctagtattggctaatataataagtcatacatttttcgtgtttagttcaggaaaataatagtagttcatacattttcgatcatgcatctttcacattccagagctggagttacgttgaacaggcacaagatggaaatttggcaggtatcag

SEQ ID NO: 195413 - DNA, 343 bp, Zea Mays
ccagaacgcatcaaaattgatgtcgagttgatggcaccacgggaccttaatcacgcattaagcttggcgcgcgcatatgaacggcgttctcaagtgcttgatggcaacgtcatagcagcacccaccaagccaatgagaccgccccaacgaccatcagttccaatcccagcaacacaaccaacagtgccagccacaggcaatgcagcgcagcagcgaccattcaagaagctcacatctggagagatggcagaacgccgaaagctagggctttgttacaactgtgatgaacaatatgttcgcggccatcggtgcccccggttattctatttggaagtagctgact

SEQ ID NO: 195414 - DNA, 401 bp, Zea Mays
agatgaaatgggaggccgcgaagctcaatatccagcaggaaaggcatctctcttccaccggaggccaagaactgacgagaccacctcctaatgtgcacccgaagaggaggtgcaaagaaggtctgaccctcactgagcatccgatcagccagctccacgttgggtagaagggcgaggaaggtattcggcgcaaccaggcgaaggtcgagcgcatcatcctcaagatcaaatttcagagagagcgcatcagagacttccgcggtgcggccagaacacctcagacccacaacggagatgagaagagcacgccggagatcatcttcagcctgggcgatcttcctggtgcgcttgatgaaacgacgtggcggggaaggggtcccagaaatggcgcgaacgtcctc

SEQ ID NO: 195415 - DNA, 462 bp, Zea Mays
cacaactttgttcttattacataaagtagataaaaataaataaagagcacattaatcaattttatataactcagaatggttttgccacaagtgctcgattaggtctgccttaagctgatagtgggtttccttgttcttgatatttttgtatttttgaatgaatgcatcaagttcaggtgaagaatcgtgcgacactgtcaccctttgtcccatgtcatcgtagttgcaaagatattgtcccatatcgtcaaagttgtaaacttgttctcctccgtactcatcccgttcgtcttcaacaatcatattatgcagtatgatgcaagccatcataatatcatggagtgtgtcttcatcccacaaacgagccggcccacgaactatagcaaagcgagattgtagaaccccaaatgccctttcaacatcctttcgataggcttcttgtgcctttgcaaaatatttttt

SEQ ID NO: 195416 - DNA, 406 bp, Zea Mays
gattgatccaacttctgtgccacatgcttcaaatacccatcacaaattttcatgtgtcttgacaaatgagatgttgttgatccttgtatgtaagaatatagcttcttacaatagttgcattttgcctttgatatcatcttccccttctcagatggatctgacacattcaccttagtaaagacatcccaaactttagatttccccttttgcccagttcaacagtcttcaccttcttgcgccttcttttgacccccctttttacttttgctatcatcaaattcatcaattgtgacattgtccgcatcaccaatttttccacctagcactgtcagttcatcttcagacatgtcatccctcttgtcaaatgaattactttctgaatcagtccccttcccttctacagctg

SEQ ID NO: 195417 - DNA, 469 bp, Zea Mays
cgcgaacggaagatgggacaggggacacagttgaagcagcgttggtcgtgagcacaagccagtcgacagggtggagaacagcggccgagcgacgtgtcaccatcgggtggacgtgaccagggtcgcggtggatggcaatcggatggtgcaccgacataatgtcacgggagcaggggactgggggatcggtctacccacgacggtggtagacgcgggtggggtcagcgaagtgtaccgcgtcggacacatgcgacatggtcgtgcatggcgcgtgtagaggcagtgaggtcatgcgtggcacaagcggagtcggtgggaccacgcgtggcgcaggtggggatcgacggggccgcgcatggcgtaggtggcaacactggtaaaggtagaggcagcacggttgcgcatggcgtaggcgaggacgacggggccgcgtgtggcgtaggcagaggtgatgcggtcgtgtggggcg

SEQ ID NO: 195418 - DNA, 417 bp, Zea Mays
caggaagggcagcaggggtagcacgagaactcccagcctcatgatcatgtgagcgtggaggcataggaggcggaggcggaggtggaatctcaaaatcatcatcatcatcatcatcaactgctgcatcctgagcttcgaactgatgaagagcagcatcctcggcctgagtgtcaaaaactggagcagaagctggcacaggatcctcaggcgctggacggtaggatccaaaaacaaggcgtgaggcctcaagtgtgccctggaactgtgggggcgagtcagctgagcaaaaatgtggcacaagtagtgagcatatggcagctaacgacgagcacgcataccatccaatacggtgtcctcgatctcacaaataaggaaatcaacaacgtcaaactaagagtgagagaccatggcaccaag

SEQ ID NO: 195419 - DNA, 348 bp, Zea Mays
caaatattcaaagccccccttcagagcaaatggcagaagccaggctaccaatggttgcatctgagagagctccatccatcaaaaggcaggacagttttgaaatgaaattgcctgatcttcccaaaattgatgtcccgctgcatcgacagtcgtcaaatacatcagacccagaatctccaatatctccattgttgacttctgatccaaaaaatgagcgctcccactcaaaaactttcagccggcctcttgtcatctttgatagttttcatgctgaggattccaagcagcagcacacaaaagcaccatctttttggaggcttgcagagcttagttttgcggaatattttt

SEQ ID NO: 195420 - DNA, 1138 bp, Zea Mays
ctacagtggcctcggcccttcctggcgccgcggccttgtattctgctccgcgccaaccgcacgcctcgtctcatccgtgctctctgtcccgcctcaacttgtcgtctccctcgatatcggtgtccgtatcaccgttgatgggtggggcgtcaccgccgtggacgccaatcattgtcccggtgccgttcagttcctcttcgcctctcctgggccgagagccgagagatatgtgcacaccggtgactttcgttacacagagtctatgacgcgtgatcctaacttgctggagttcgtccgtgctgatgcggtgtttctggacaccacatactgcaaccccaagtttacattcccttcgcaagaggattctgtggattacatagtgaatgcaatcaaacgtgtgaaagaggagagttcagtatcaggagagcgtgtgctatgtctgatcgccacctatgctgtcggcaaggagaagattttgctggaggtcgcacagcgctgtgggtgttcaatccatgtggacagtaggaagatgaagattttgacactgttggggttcggtgggaagaatagcgtttttactgaggacgcaacagggacggatgtgcatgttcttgggtggaatttgttaggggagacttcgccctacttccagccgaattttgtgaaattgaaggagatcatgatggagagagggtatgctaaggctgttgggtttgtaccaactgggtggatgtatgaaaccaagaaggaaggttttgctgttagggtgaaagattcactcgaaatccatcttgttccttatagtgagcactcaagttacaatgagttgcgcgactatgttaagtttttgcacccaaagagtgtgatccctactgccggagtggatgctgggaagctcgatagtaaggaggcagttgctctgcagaagcattttgctgggttggttgatgagacagcaaacaaacaggagttcttgatggcattccatcgtaggtcaatagatgctactcgtagctgcaaagatgtggttgttaattgctcgagccagcttgatggggaggatgctgctttgttaccagcaatctcttctgcttctgaacaacaggataaactgatggagaatactatgcaggaaaca

SEQ ID NO: 195421 - DNA, 401 bp, Zea Mays
gccgccacaacccagtctggtctgtgcctcctcctcttttgcccgactgtgcctcctcctcttttgcccgacatccagcatcggcagttgtgccctagatctccagcacctgcagctgccctagaagtgcagaactccagcaccggcggctgctcacctgcaccccctgctgtcctgctccattcaacggcgcctgcgcccctctgcctgcttggctgctcgcctgctccagtccagatatcagcggctactccagcaccattgacttgatgagctcgtcatctcaaggttcctcctgctccccccccctctcccggatggttgctgtcgtaatcctaagccagtgatgactgatgagtagtgacttgtacttatgtctctgtttgcaaactgctattttg

SEQ ID NO: 195422 - DNA, 606 bp, Zea Mays
gatctgctgcttgaggaactcaccttcacacatcattcctccctgtcggccaccgctctactcgcctccagccccgccaggcctccgcccaagcaagaacaggcgatcctgcagcagtcctccggcagcaacagcagcaacggcaagcgcggcaaacgcgtcgggaagaaaggcgggcgtgctctcaaacaagctgggcaggcccccacgtctacctggcccagcttctacaatccttggtctgggtccattcaaatgtggcccagaccacggatgacattatctacccgcccggtcactcctgcgccggctgcgccagctcctcagctgccccagtccatactcacgggcatccagggcccctggccagggacacaacagcagccatggacgttgcctcaacctcaactgtggtctacgccaccaccaggcttccctcatcaggttgttcccatgccatcatgggaccagcaatcgctcatctccaacttcaacatcatgacactccagccccctcaacaaaatgagtggtacttcgactccggggcaaccacccacatgtcctctgatgccagtactctctcccattccactcctttacaacac

SEQ ID NO: 195423 - DNA, 694 bp, Zea Mays
ctgtgatacatctcgactgttgtttgatagagatcgtgtgaagataatttttaaaatcagtgttcacataaaggtaccattggattcatatttgaaagcacttccatatgctatgagctttgttgtcatgataaacatcataatatatgatatattggtggtcaaagtgtggtgttggcaggtcaaaccgcactttacatttcgaaaaggatggagtaatattttagccttgattttgacatccttttttgcagagcagtggatcaacattattcaaaattttgctcctgacgtctgatatgtggacagttgccattcaagttttactctatcatcaacaggtgaagattcctgatccagaatacttgtgtaagattattaacatgttacccaataataatcttacataatttggcccaacccaaagatatgttaatttaaactccctagattattttgtggaatcccaacagagtttattcatttgcttgtactctatgaagtggaagttcttgagatgccaaaaaagcagggaagtgcggacacaacagtcaagatgagctacttaaaagtgaggataattcaaaggagcgtggtatcccgagaatatgaacactccagagatgcaatatttgaggttagtatgcagtagtcgagcctattcatagattattgttcctgttttctaatcttg

SEQ ID NO: 195424 - DNA, 1821 bp, Zea Mays
atctcgtcccgagggcacccggatgaccggatccccggcacgagttggtcgagccatcacgtgggcccgctctggaacccgccccagcataacttccaagtcccaaataaactcctcggtgactcgccccaacaccaaacagtaaacgacgcttccctccgccgccgtcagatcggagctcgactccgtgccccgcttctccgccgcgatggcggcgccaccgcgccgctccctccttgtccttctctccgggctcctagtcttcgcctcccttgttgccctcaccacagccatctacgaggaccaggtcggcctcgcggactggtacgtcaactcgctcgcctagatccgatctgcccttagcttaaggccagcgcgacgtatcgggacttcgagctcctagttgagatcactattagggttgtgttgtgaggagctgtgtgcggtgttactacagatttgttaggtttcaccgaatcagggtgtggttttacgagcgtacaactgaattctgcagtagtagcggtgggtgttgtgcattagtcctgtcgtgctggtagaaaagttcttttagctatttagcgactatgcagtgattgcatcctagttcgaaattctctgtttttttagctatttagcgagtatacagatggatgggcatgtgcttcatcattgaaataaagcgcagtctgcaggagctagagttagtttgtgttttatggatgaggtctaaggttatgttttgtaccatggatattagtgaactgcattccatgttcgatgtggagtcccttttggcaagtatggcttctgattagtccagtctgagtatcgcaacatggttcacctatgtatgcatgcagtgcaagtagtcaattcttggttcatgtattgcataagataattaagattaaattaggacttaaactttacctttagttaatgtattacttttgtatattttcttctaaatatatttagtgtatcggatttaagtttcttactttagagataaaatttcttaataattatcacgatggaagaatgcatttctcttttttcgtaaatgccttcctctcagttcatggtctcccttgttcttccttgaatcctcgaactccttaaaacctctagtatttaggctgtgccagcttgtacctcgttgtacagtagttatcctgttattatccacctgaagtctgagaatacatcacaacatgtcattatctgatttgctgaattgcttcagtctccatgattccccctctcttaataaggtttgtggctgccttgacatctactcttcaattgctcacaagctgtgctaacccattaagaagcctatctttgtttcatgatgtgtcctgccgtgttgtgttagttctatgtatgagaaaatcaatctttggtaaactgctgtggagttcgctattttgatatggaatcaggcaatctgttattgctagctgctgcacctcttaacatcaattgagttgtacctacctacatgcagtcatttggagtaatccaacagcaccattttaatatgttgatgttcttcacaggcatcagaagtacattggcaaagtaaagcaagcagtttaccacagccagaagagtggaaggagacgagttgtggtcttgacagaggaaaatgtgatctcgtctcttgatctacgttctggagatatatgtgagctttcatatttacagattagcaaatcgagagtgcagtttcttacattttactcacttttttgtccttaatatctctgtattttatgtggtgcagtctggcgacatgtcattgacaagaatgac

SEQ ID NO: 195425 - DNA, 365 bp, Zea Mays
tgactccattgtactttgcacattttaatcactttactccttgtgacacgagtcaatgtatcaagaatcttgataggatactcagcataagtcagatcatctcgaacactaagatcctccatggtagctgctcttcgggtaccctgagatatttcttcaattgagatacatggaagacatcatgtacatccacaagatgatcgggtagttctagttgatatgcaacttctcctactcgtttcaagatcaagaagggtccaatgaagcgaggggacaacttccctttaactttaaatcttcgcattccccagatcggtgacaccttcaaatacacgtgaacaccctccttaaactctagtagcctt

SEQ ID NO: 195426 - DNA, 444 bp, Zea Mays
atgtgactaacctggattaggcgagatgatagccccctcgggtattgtagcatatatataggcagacaataatatatgggccttaacatgtacatcactcttcagaaatttcggctccacattcttgcccctctccagggtgacacaaacttcctacagtggtggaaacgtattgctgatattgtgtcagatatgaccaagaagggggtaaattcacttttgattctgggagcctggatgatctggaagttcagaaacagagtggtgtttgacggcccaccccccatatcactacaatcttagaggccactgctgaggaaagggagaaatggatggttgcaggagctaagggtctttcctttttagctgctcccagtaccaatgtctgagataagttgtaatctttagttgtgtatggattgtttcctttatgcttgtttctgg

SEQ ID NO: 195427 - DNA, 368 bp, Zea Mays
gtctatatcacctattaaaatttagacaataacagatgttgaaaatccagaaactagacttggtatgaagcagcaagttaaaatctaatataaactgaaccactgagtgcaagcggaaaccagatagcattggttgcccacataacacttactgcttgctatccttgttgatttgcagcttgcaagacacacacatgcttgtaatggcaatgaagcatacgtccttccttccgtacctgctcctcctcacaaccttggcatcctgcgatgatcaatttctgttatctggcttcacccaatccagcttaaaccttgatggttctgccatcgtcacaaatgatggcctccttgatctgaccaatagcact

SEQ ID NO: 195428 - DNA, 317 bp, Zea Mays
gatggaggaagatgaccttctggaaggggatccctgcagagaacaagatctgcgcgctaaacttcagaggggatcaggagattctactgacaggatcccagcagagcaggtacgtgccatgccaaacattagacctgcgggtaactttgggaattggaaaaagggtcaaggaggccgtggttttgctgccaggggaggctttggaggtcgacggggtttgggacgctctgaatttgatggtcaaggaagtagacagtttgagacaaaggaaaaattccgtggtgcccaattctctggagacagtggtttgatcacag

SEQ ID NO: 195429 - DNA, 470 bp, Zea Mays
acacgtgaaacaccggatggatggttgaagtagaaggcagctccaatttgtaagcaacactacccacatgagccaggatcttatagggaccgaagaatcgaaatgccaatttttgatttgcctgaggagccaacgaagcctgcacatatggttgtaatttgagataaatccaatctcccacaacaaaggatctctcggagcgacgcttgttggcttgcgtttgcatgcgatgtcttgctcgggcaagatgctgctgaaccaagtcaatcatgacagttttctcctgtactcactcatgcaaggatggaacatggaaaagtgaagttagatcgatccaaagtactttggagagtacccatacaatacctcaaatggtgaatagcccagagcggagtgccaactagagttgtaccaaaactcaaccagatatgtccagtccacccatttattaggacatgcatgaacaaaac

SEQ ID NO: 195430 - DNA, 359 bp, Zea Mays
ggacgcgcccaacaccgtaaccaaagtaccccagttgctgcatctcctgcactcgaaccgaggaaatcctcaaggtaccgaactccaccgtgtggctcggctgtaactccatcgccgccaaatcgctcagggtatcctcggacgacgacgcattcgcagcagatgaggaggaagacattgctacgtaccgtcagtggcggcgcgcggtctacttgatgcgggctagatctccgaagcagaagaacaaaggagggcaggcgagcgggcgagcggtttgaaaaagctagggttttccggcgcacacaagggtaagcaacagccccagctgcgccgccttttatagacaggacgcagcgctt

SEQ ID NO: 195431 - DNA, 281 bp, Zea Mays
caaaattgatcccgcacttctgaggccaggttattggttcaattgttatttactcagcgcttaaatttatttcttggatcacacatataatgctcgttctgctcctttgatctgactttgagatcgatacatgccctaggtcgtttcgatagggtgctggatgtgcaaccacctgatgaagctgaccgtgcagatattttccggatccatacacgcagcatgccatgcagtgccgacatgaatctaaatgaactcgctagactcacagaaggctacactgg

SEQ ID NO: 195432 - DNA, 332 bp, Zea Mays
gagtatcttcgcatggagcttacctaccttaacaagctcaaggctcgaaaggttgctcttggagaggatgtcaagacgctgcaaaagaaagacaacgatgcgagccagtggaaagaggaaaacaaggaactgttcatgccactgaatgaacaggtcaaagatcctaaggagccaggctcggctggagatgccctggaggagaaggaagacctgttttggcgtcaagggttgttaatcattcagaccatatatcatggtgccgtggaagctcttccgtcaagcttaaccttgcggaagaaattcttggagatactaaacagtgttgacttggc

SEQ ID NO: 195433 - DNA, 684 bp, Zea Mays
cgacctagatttgccctttagtttagtgcatgttgtaggctagaccgctagaatatggtttctttgtgtggacagcccctgcatttgaaccatttggactagactaagttgcctagagccagcttcagggatacacgggaggatttgaaagtatgtgtgttgggttaggggtgtcaagagctcattgtattcagttatccagtctcatatatagagtcctttttgtatgccatctctattttatatcagtgtatatattcaggcctagtgccctcatattgaatatgagtgctatttataacatggtatacaaagccaaaaaaaatagggctagaagttatttctctccctaatagttcctctctcacatcgcttggtggttgtcctgctgccttgcagctttgcacatcttcgcatctcctttggactagcggcactcatcttcacaaccgctcgccggagttcgcccatcagttgcaatgagccatctgtcgacgctcgctcctgtcctcctacaggcctcttctcgtgcgcccatccatcggcgaatgtcgcaacagcccactagttggcagttgtcccccgacctttagtttcgtcagacgtatgacttcctgcctcacttcgtgaggactttgagcctcttcgtcctatgttgctcgctcgccatcctcctgtttcact

SEQ ID NO: 195434 - DNA, 378 bp, Zea Mays
ccaatatgtcattgagttgcttggcacattgctactgaggaaaaagaccaggtcaaccacttagcctagctttagctccaccaatgcttacacaatttttttgtaactaaaaatataattatacaaggttcgccacaccatcatcaagtgccacgatatgaacagaaaaataatatacaatggataaaagcaccaaacgttatggtcaaatgaacttaagcaaaagcaggcataagtgtttggatgcaaagagaaggattagagaaatggtatatcctatttttctgatattccgatactctcgaaaaggttgaatatccaaacttcccacttgcttttactatttcgtgattattgcaaattaaggctgccaaactt

SEQ ID NO: 195435 - DNA, 358 bp, Zea Mays
atgcaacttctcccactcgctttaagatcaagaaaggtccaatgaagcgaggggacaactttcctttaactttgaatctcctcataccctggattggtgacaccttcagatacacgtgatcaccctccttgaactccagtagtcttctccgggtatcagcatagctcttctgccttgattgtgcaattctcaaattctcccttatcattcgcacttgttcttctacctcttgaataagttcaggcccaaagaactgtctttctccagtctgatcccaacatagaggagtcctgcattttctgccatatagagcctcaaacggtgacatcttcaaactggcctggtagctattattgta

SEQ ID NO: 195436 - DNA, 460 bp, Zea Mays
agcatgtcgcaccgtcttaagtcattgccaacttaagccaattgctccgttagtagggcatagtggtcaccccgagttaagtatgcgtgagcatgtcgctccgccttaatcattgccgacttaagccgattgctccgttagtagggcatagtggtcaccccgagttaagtatgagtgagcatgtcgcaccgccttaagtcattgccgacttaagccgattgctccattagtagggcatagtggtcaccccgagttaagtatgcgtgagcatgtcgcaccatcttaagtcattgccgtcttaagccgattgctccgttagtagggcatagtggtcaccccgagttaagtatgcatgagcatgtcacaccgtcttaagtcattgccgacttaagccgattgctccgttagtagggcatagtggtcaccccgagttaagtatgcgtgagcatgtcgcaccgcc

SEQ ID NO: 195437 - DNA, 391 bp, Zea Mays
gccctaagtataacgttcgcttcattccaatgtacttggacacgcgtagatagagataaatacacatgcatcaaactaaatcctcctgacttttcaacacaaccgattaccgacccccgtttcacaaatacaagccgttcctttcagaactgccgctagaaacggccggttctggccactgggtgaggagaactgttcacgaccattattaaatccagatgaaaggtgggtggtggaaggcgatgaagacctgatctgaggttgcctcacgtgacatgcatccatagtccacccagacagtactactctggtaagctaacctcggacgggagacgcagtcacggctcgctcgaggccatccttggacgggagaagcagttacggctcgccc

SEQ ID NO: 195438 - DNA, 303 bp, Zea Mays
tgtggtttacgattcataggagttggtcggtgtgcgaatatacttgtgaatctgtgggtttataaaaatgttgtagtatatgtctcggattgcggcaataaaagttcaagttgacgtgtatgttatttagcggcgatgtcgctgctctagttaaccgaattgttagctggcgtggttaagctcgtaatcacggtgaatcgcttgttgtagtctacatatgtatggttacagtcgcgggtaaaaagtagtagtgttcatatgatgtctaagttaaaatgcaaattattatgtgaacaacacttc

SEQ ID NO: 195439 - DNA, 289 bp, Zea Mays
caaccttggaccctccttcatcaagctgtcccaaacttagtatggagttcttcagcgctggaatgtagtaaacgccgtgaagaactctctgctcaccggtcttggcttgaaaaatgatggatccaactcccttgatttccaccttcaatgcatccccgaaccggaccgttcctcgaacgccagtgttcagatcagcaaagagtttctgacgcccggtcatgtgatgtgttgcgccagagtctaggtaccaaccgctgtccatatcttcttcatccacgccaaggtaggc

SEQ ID NO: 195440 - DNA, 290 bp, Zea Mays
ccgccacgcgaggagcaaaccaccacgcctcttcatctccactgaaaggagcggactagcctctgacacggggcccggggccacgagtcatactccttgggcatcggtctccgagtgcgaggaagacgaaccatcgcgtgaggagcgagccaccgcccgcagtagtgcgcctcttcacctccgccgaaattaacagcccagtgtctgacatgggggcccaggcccatgagtcatcctccttgggcaccggttcctcggtgcagagaagtcgaaccaccgctcgcgccagt

SEQ ID NO: 195441 - DNA, 587 bp, Zea Mays
gcaaaaatggaggccactgcacgacaccaagggtccgatcagacacataaggaacaagtagcagctccttctccctatatcaaaaattgtgggcatcaacttaggtcagcaaaaacaaatcaagctggaaattaagtttacccatataatccaatcacctattgtctataagatcttcatctcgaaagctggtgacaatttcattccacatttgtgcgaaccttgctgctatattctccttgtcagcatgttccatctgaaaagtagcatcaataacaaaaaatatccataaaattagcaatcaagcaattcaaagctagaaaaacgccagaaatatattaagagtacagaatgacacctctttgaaacgattgtgtaagtaagacctcagacctttcttcctttttgcatcagatgtttcaacaggaattaggcacgagttaaaggctaaaggtattgaatcaaagcgagatcgcagcatccccagagtacgaatctgtctcatccaaaaaatgaaggtttgctttttatcaattttttcaaccaaaattagacacacataagaggctaaaggtattgaatagaag

SEQ ID NO: 195442 - DNA, 959 bp, Zea Mays
aagctattgagcttgatgatcatgttccgagtagtgcgatccttcatagaaacattgaaggggtcaaactccataaaacacgaattatcagtagtgaagcaacgaatagaaaggagatcctaaatgatatcaggggtaagaagaatgtcgttgagttacaatagcccgagaagaaccaagccacctgctgaggtgatggggaggttggagccattatcgacaacgatagatagagtagctgaattagaagggtggaagagggagatgttattggcgttattggtagtgtggttggaggtatcgaagtcggccacccagttgatgaccatagcaggtggattcaaagcaatagtgctaaacaagttagcagactgctgatcccagctgtcgggccatggactccaacttggcagagtggatgcctatggtggaaatgctggagcctgcaggggttcagagccaaggatgtcgagcggcccaaacagtccaaatgtcgaatcatggcatggagcgcctgacattgttgttgttgctgctagctgccaagagccaagcctggtcacatggtgatgctgcatgtccacaggttatagaaggttgaccataccttgactgtgccctttcttcttgctagatcctaaggtgggagtgggatactaggcttccttccggtcccgaaggaacatactagagtagaggaaggagttggggcagtcagcgtgcgggcaaccagtggaggagtggtgatgaaggttgttagagcatcgacaaggctggtggttgtcatgttaagctcctcaaggacaagattgtcccaaccttgaggaagaataggaaggggagtagcatcggatgatgatcccgacgtgctcaaacttcttgtccaggcctcaaagaatgttgaagaatgaagacgagggtccgatcattgacgggggcgcccaagtcagccagggagt

SEQ ID NO: 195443 - DNA, 416 bp, Zea Mays
agtaccatgaactacgaaagatggttatcaagcatatgatgcatggtccatgcgggtcgctaaaccctaactgtccatgcactaagggtcgtgcatcgtgcaagaatcattaccctcggcctttcagtgatgcaactttgcaagggaaggattcatatcctgtttacagacgtcgtgacgatgggcgtaaggaaaaggttcgagggtgcgaattggacaatagatgggttgtcccttacaatccttacctccttcgcctcttcaactgtcacatcaatgttgaggcgtgcgggagcatcaaggctgttaaatatttgttcaagtacatatacaaaggccatgatcgtgcgtctgttgttatgagagatgcgagcaagacagatgatgatgtagatgagatcaagcagtacagagat

SEQ ID NO: 195444 - DNA, 691 bp, Zea Mays
tacaaccttaacctatgtttggaaagttctctcgtgcaatttggctaaatttcccatggtctttattttattttgagaaatgatgtggcataatgatgtgtgatgttttacttgagtggacataaacaccatctcggtataccttgaataaagggattataggaaacctggtatcacaaaaggtcattagctagcccaataacgtcttcatcaactagttgtactcgaataccctctcgtgtgattacaatgccctcaatatcatagaaacgtcatttgaggtttaaaaggcaatctattgttttgaattctttatattccaactttttagcaaatgtatggtggaaaaaaattgccttacaaccttaacctatgtatggacagttcactcacgcaatttggctaaattttccatggtctttattttattttattttgagaaatgatgtggcataatgatgtgcggtgttttacttgagtggacataaacaccatctaggtatgccttgaatagagaggattataggaaacctggtatcacaaaaggtcattatctagcccaacaatgtcttcatccactagttgtactctaataccctctcgtccgaatacaatgcccttgatatcagggaaacatcatttgtggtttaaaagttgatctattgtattgaattatttatattccaacttt

SEQ ID NO: 195445 - DNA, 632 bp, Zea Mays
aggatacatccatgatttcacagcttgacagcaggaaagctcatctgagtgctctgcaacaggaaagggttgagaaagtaaaccaaggtccggaagatatctctgcaaatattgggccagtggaaaaggaacatgttcatggggatctgactttgcaatctgctagtgttttactttctattagctgcaatggttctaatcaaggaactaaatctgaaaccaatcttcaaccagggactgctacagaggataggatggcttttgaagagcagaatgcggagaagtctcacttagaactcagtggtaccaacaaggctaatcaagctctgttcgatgatggcagcgtcatgaaaaataatacggttcatggtgggctgactgcgcatactgctccagtgtctcaaagctgcagtgtaaccttacatgataaaacttcagaagccaattgtttttctgagtggaaaaatgaaaagaacggtcaaaaagataattgccatacttctattccaggctcttctcaggatgggggtggagaaagtgcaaagaagacatcaaatgaggtaaactctggggacacttcttcaaaaatatgtgtccattctaaggataaagacattaatgatactcttgag

SEQ ID NO: 195446 - DNA, 420 bp, Zea Mays
gaaagagacactttaataatgtaaattagcatgtgacgataggttaattctaaactctttacttctcgcaacacatgatcattttaatgtcatcaaggtaccacaacatcatacgaggacatatgcataatagtttccagttttacatctacaacttctttactagttattttcaaccacttaatcggcattgatcgaattaaacctctaactcaacaatttgggcaccataaatttcagaattctacctagacatctagcgtcacatagagagtctactaattaacttgcaaccacttgaagtactggaaacatctacatataacaattacttaacgcaattgaattcctctatttaacaagagttggctaacacaacataaaaaaatagtaattcatacacaagttcatatttttctc

SEQ ID NO: 195447 - DNA, 401 bp, Zea Mays
cgttcctcgaccgttgttgagcccccgtcgcgtcgttgcctcggtgaggtccgcctcgccgtcagcaactcgggacacccctcgatttgcccttagcccatcttgttcgcccggtccacgctcaccggagtgtttccctgtgcagccagagtccatcgccttcaacccaaggcttccccacgtccccgccgtcgcccaagcgctcctatgttcgcactcaaggtgagcaaccttcctatgcacttatttcgtccgttactgccctagtgtccgcacaattcatcgccagagttgatccacgccaccgttagaccgcctcgccgtgttccgcgccctctggtgcctctgtgcctgtattgcacccacgactgagtttgccagatcgccctgagcatgcctga

SEQ ID NO: 195448 - DNA, 455 bp, Zea Mays
gccggaagaccgttaaaaccgtgatggcgtggccgaacagaggagagcggcgccggtgatcggacacggccggaaggaggaatgaccgcgtggcagccggagttagtgccttccaccgcggcggtcctatccggaagaaaaagatcttcgggggaagatgctcgccgcccgaacatctcaactccggcaccaatcgtggcgcggataggtcgtcggcggtgagatttttccaccgcggcgatcggacccatatctgttttccctgaagcactgtaccatggccactccatcagacagcctgacagagcgttttggagcttcattttctcttaaactcctatgacaacataagttcaactctgcagcaaaagtgtatatcaatgctccatctacaactttgtaatattaggatgccacgaaaacccattggatcatacttgaatttaagcttgaag

SEQ ID NO: 195449 - DNA, 479 bp, Zea Mays
cgcaagtagctgtgcgctgaatcatatctgtctcgatcatcggatggtgacccttaattctattcgtccagccggcatatattaaagtatatcaattagacaaagctcatacatatatgcatcttgtgctcatcttctctgcagcctccggcgaatcagcaagcacgctaatctgatttagtttcctctacctagatatagccgtcttgctggctatagctagctgaacgacgttacgtgcgtgtcgcccttacatacgccctggtggcctgctatatatatggttacaagttgtacgtagtgaaataaagaaagtttcttcaatttgacataggccctccgatccctgcagctgggcggccagtgtaacgggttgatgtgttctttgtgttattatgttgggaacaaatcaggccagtgtaaccactgccggaaacagctgcttttcctagtgttgaagtactcggcgaaaaaaaaga

SEQ ID NO: 195450 - DNA, 581 bp, Zea Mays
ctcacttgaagattctgagatttttgggtcaaaaatggcaaaagaggcaaggatctggtctcatgttatttttctgcttgatacgatatcttgtgttcatgttatagtactatattatgccagtttttatatgttgttttttacagtgatttctttttgcatctgtcctcatcatcctaattgtggtgatatgcattgcagaaacaccctggtactacaggaatcaatgagaagcaaagtggaaaaccaccattaccaattaatgcagtagcagagcttcgaaaaggttcttactatgcttcgttggaacttgttcaggctttatgtgatacatcgtatggcctggtagacatatttcctattgaggatcgtaagattgccctccgggaggtaggtcaaacacattaccatgtaacttcatggctattcatttcacaacccttcagtcatcctgtgccaatcattgcactctctttgttcttttcacattttaacttgtaccctgcactgcaatgatatcttcttttgtgtggcagtctcttacagagatcaatagccagattgcttctgctgaaaaaaac

SEQ ID NO: 195451 - DNA, 505 bp, Zea Mays
acgagtcgcacgataaagtgtatttcgatcgcgaaggtcatatcgcggaggaggtgcaccaagcacaggagacgatctagatgatgccggaggggatggtggaggacgtggacgtcgagtgtagtggaaaagaattggaggacgcgacggaggggatggtggaggtaggggaggcaatggtggaggtggagaaggcgatagtggtggaggtgagggaggtgaaggtggcgatgatgaaatatgaataagggagggtagcgaagataaggtggtaggaagaggtggaaccaagcgaaggaaatcaacagacttagaggaagagaaagaagaggacaaatcagtagtaaagaaaggacatgactcatcaaaggtcaccagtataagaataatgaggaaaggtgccttgcttagcgagaaacatattaagagcacgagacaagtactcacctgcagaattggcctgaaaaacgcgaatggtagaatcaaattgggtgtgaaccatagt

SEQ ID NO: 195452 - DNA, 419 bp, Zea Mays
gaacaaggtcagcacggatttccagctcttgtttcacttcaacaacgttgttgcttaaagaaaagcagcattcttcactagtcttctccttatgcagcaaaggggaactatcacgagaatcaacttcaggcaagccatgcagttcctgccgtaaatccactggaacggagagcatatttaattcaggacttctgttatcattggaaaactcgagaaaatttaaatggaaatctactcctggtgtctcgtccttgcccacgcgatcttctttaccagaaacaaccattgatgtagtgccttgtctttccacagcacatgaatattcgacacactcagaacagaacttagaatgaatacaggcttcctgatctaacttcactggcaaggcagagttataacatggaaaatctgactctctg

SEQ ID NO: 195453 - DNA, 345 bp, Zea Mays
cgctcgccactcacctgcaggcttggactggtatgtgagacaactctaggaggaccacactgcgcttctacacttacgccattgatatgcaggtgtttgagttttggttgtgatggaaatgccttgtttgcagttttgattgtgatggaaggaggcagtgtacgggacaagggaaaacagccatgtattggtgaatcatcatctgcccgtgaatgagtggttactaccgatggtaacgctttctagcattagattagcactattgagttctcacatgcaaactggaagtataaattttaattctctagtggaaagtcattttttagattagcactttgtttattg

SEQ ID NO: 195454 - DNA, 374 bp, Zea Mays
gtctgcgtgaaccacctgggcggctttgtcggggtgcggtgagggctgccatcgctccggtgtgggggacaggttttcttatcaggatttatggctccaccatggatctggtgtctgccgcgggcgggaccctttgtgctacgaactccggtgagctatccctgttccttctccctgtggttcatgtttcgttttcttctctgcgtagcaaggcggggatcgtgcacctctaatggcagtcgtcgcggtggtatttcttgccactgaagatggtgtccggaggtaggagaggcataggtagcggtcgatctcacaacgggtgatcgagattagatcctatttagccattcattccttcgtaccgatgtcgtaga

SEQ ID NO: 195455 - DNA, 740 bp, Zea Mays
ctccgacagactgtggaccatcgattcctgacaaatcatttccgctattgtttaagaaaccatcattacttccatgatcctgattcgaactgttgccatcagctcctcgagacagttgtgttttatcatctgactcaacagcaccagaatcaacaaacatggaggataactccccaaggagtaaacatctaaaactcttctgagctgcaacatcatcatcaggagctaaagtaacatcaccaaattttgtcaacaagcctctaatacatttccaaacatcagcaatctctggacgggattttggatcatatctcaagcacgatgctataactgcagccaatggttcaagtatagtaccaagcaatgtggcatcaagccttgtaaccacttccttctcccaatcatcatacagtccttcagagttccaacctgccacaggcacaagctgttcatccctagtaagaagtgccacgaacacacaacccaacgaccagatatccgaggtacagccaaccaaaccatcaaaatcacgaccctccgtccgcaacgtgtcacctagcactgccgccacctctggagcgatgaaagctcgaacactgttcgagctagccccagcttggactccccggcacaaggccaacgcctgattcaaatcaagcatgcagtgcccaaaacgatcgaggcagaagcagtccagcccgaggcaccccagcaccagcccctcgctgtgcaaccccatg

SEQ ID NO: 195456 - DNA, 287 bp, Zea Mays
ggcacggtgctccagttcatctaaagcaatttgtcttttgggtaatactggtttgtgttcgttttttccaaaactgtctggggttcagtttcagctgaacctgctgtccgcacgccctttgtttgagacccctttggatttattgttataatgagttttgcttgcccggtgttcaatcagtgtaccattgaatttttagcagagcactgatcaagcgttttgttccaaggattttttaatcagttctaatgcccatagattatctcatacatgtgttgatttctaca

SEQ ID NO: 195457 - DNA, 473 bp, Zea Mays
gttgggcacaaccacatcttcttgccttacgtatgatgtaaagtatttcccctgatgattggaggttagtgtgctgatgctttcttccagttctttgcgtttttgggggaatttcaaggactcagtcaatagcactgaactctcatgatcatggccaattcgttgtgcatgttttacttggtgacattcattgggattctggatatgctgcgtttagtttatttactcattttatttttctttgtatatgaatgttgcaacaaggtctgttgcccagtgtccacatcactgccagattgtgccatgacagagtgccttcttttttttaactatgaatggtgttcgaatcaatgctaaattgtttcacaaagtgcctccttttttggttatgtatagtttctcatggtagatagatgttgaatttggagaggaattaaagtcagaattctatcatttttagcccgtgctttgta

SEQ ID NO: 195458 - DNA, 985 bp, Zea Mays
gaaggatctactatctcggaacgtgatcgtcaggtgcaatagctccgggccactataccccctgtgcctccctgctgcacacagcttcatcgccagctccactccgtcactttggcatcgccgtctcagtcaccctggccacgagtccctctccaagctcgcatcaatcgttcccatgtgtaataaagatgctagctctcctttatgccatgcttgtcagttgagtcgtcatgttcgccttccgttccgtacgtctacttctcgtgcggttaacaattttgatcttattcactgtgacttgtggacatctcctattttaagtgtctcgggtttcaaatattacttagtcgttcttgatggttgctcccattacttatggactttccctttacaaataaagtctgatgctttcccaactctcactcagtttttcgcctatgtgaaaacacagtttggtgtcacgattaaagttgtgcaatatgacaacgggcacgagtttgacaactccagctcccgaacattcttcctcacccacggtgtcctcctacgcatgtcctgcccctacacctcatctcagaatggtaaagctgagcgcatcatccgtactaccaataacaccattcgctctcttctctttcaggccagcatcccaccaaccttctgggttgaagcactccacacggcaacacttcttctcaacattctacccaccaaaacccttcatttttccactcctcacttcgccctcttcaaaactgtaccctcctatgaacatcttcgcatgttcggttgcacctgctatcccaacttatctgccaccactagccacaaacttgatccccattccgctaagtgtgtttttcttagctactcgtcgcatcacaaagggtactggtgtcttgacctcctatccaaccgtgtcatcctttcccgtcacgttgttttcgatgagtccacttttccctttgctgaacagcaacccact

SEQ ID NO: 195459 - DNA, 356 bp, Zea Mays
cacccgtgcggtggttaggcagcggagattgacgcatcattgcgacctcgcaaatggtccttgtctccctggtggttgtatgctctgttccaacatccgttgaggaactgcgcttggtgtgtgtggtccagttcctgcaattagcgtggttgttgttcgtcgcggcatcttcgtgggatttggtagatctgcaagaaagtgagtgctgcttttcaatggagttctttagcaatcagtgagatttggtttgccataggccgccttcttttcctgggtctactgattgagccctcccagtcccatgtgcttgccattaagcaacttgacaatcaatgaaaaggtgagggggtccgaag

SEQ ID NO: 195460 - DNA, 279 bp, Zea Mays
ccgcagggaatcttggagtcgtcccacgcaaagatgctgatgcaccccgtaagaagcctttagcccatacccgggcgctgttacaacaactatggaatgggcagccactccacagggggcttgggtgtacgaacagtccctcggtctctgccttagctctcagcgggaaaccaacggacgcaagtcaacaacatagtgcaccgtcacatcggcttgcagggcgacaagacatctctccttcgaatacaacacccggcctcactgaggatgccccatttc

SEQ ID NO: 195461 - DNA, 480 bp, Zea Mays
gtcactagaaattgaagaccagtattactatccagggagtcctgtgccaaggttcttggcaaggtcttttattaatagcatgcaaactcaagaactcccgtctcttagccgaaagaacagtgcaggacctagaaacaccccattgatgaaaaatgacagtgaggaaaactttttcgaagcatcagatgattttgatgaatttgaaacacctatgcatcaaaagaggactatatcagactattttagcacccagaaatttttgcctactagcgttccttccctacagccgccaacatttaagcgcattcctgatttgataccagatactgaacttcaaactggcaaattcacattggaaggtagtggcactttcaatagttttgtgaaagctcagatagtgatttatgatcaacattctccccagtacaacagcttggataacagggtaaatatctccaaaatcccattacactacataat

SEQ ID NO: 195462 - DNA, 501 bp, Zea Mays
tacagatgagggttcagttaagcctgatatcatggtgaaaactgagcagaattcttgttcagataacctggatgtggaggctactccacctagtagcacgcgaaaagcacaacgtgcaaaggtaactccatgtcctggaactggttctgagccatctaacatctttgaagcattctggcatccaacagatcttgcagttaaaccagttatgcctagtaggaaagcagataaagctgtggacatggtccccacacttccttttgaagcacttacagcaagtgattatattaagttaccactggaacagatgaatgcattcaacagtcagatacttcagagtttaagtggaacctatcaggtttcagaaaaacaaaatactatcagatacctggagatgttaagcatgaattcagatgctgcgaacaaaataactaatggaccaattatgctgctactaataaaaatgcttcgactgtcaaaaacttcagtcttgcgtgtcca

SEQ ID NO: 195463 - DNA, 467 bp, Zea Mays
aattcctgcagaccagccccctgtagggggcaccccacatactcccctcggtgctcctggacagccacccattcccgtttgggatcaacagaccctgagtctgccttcagcatcatgtccttgtcctagccacaaaacaatgactggtacttcgacacaagtgcaacctcccacatgacttccaatgttggtactctctcttgcactttggcttcttccattacaacaccttcctccattatcgttggtgactgctcgttacttctcgtcactgataccggctccactaatttgttcaggtctttacatcttaaccatgtccttgtatcccctaaactcatcaagaacctgatttctgttcgctagtttaacattgataatgactgttccattgagtttgacccatctggttgctctgtgaaggatctgttgtcttagaacgtgatcgtcatgtgcaatagcttcgg

SEQ ID NO: 195464 - DNA, 582 bp, Zea Mays
aacaaaagctgagtgagcaaagtgagaaatctgctgtgacctggagcgagtgactcgctcgtgaagctctccaatcatctgctgaggtgggtgacgacgctgaatgtgctgtggagcctcccttgaggaagtggcctccccctcaacagcagcctcagctcctccagtctcagcaggagctgactcgagcggaccccaagtggtggaagaattggggtcaggcccgtcagccgaatagtggaagcaggctcgactggggcagccagtggagtcggctcgggatcaccccaatcggcgtcgtcgtgctcctcctccacaaagatggtctgtcccatctgatctggacctgcaggctcaaagacaggggatggacaaggtgcagtctcatcgaatgtaacctcacaagtctccataatgcggttagtctccagattaagaacacgataagcacgagaatgtaatgcataacccagaaaaaccccatcagaagaccgagactcaaatttgtccaaatttccctgtttcagcacaaagcatctgcagccaaacaccctgaaatagctaaccttgggtggccgtcca

SEQ ID NO: 195465 - DNA, 365 bp, Zea Mays
atccatttggtgaaattgaatctacgtttcagggcaagtaacatcagtacacacctgaaatgaaaaggttttcttgggcgggttcttcttggcggggattgctcctccttcctcggctccttcctcagcttctccaaagtccactgctgcacacgattgacgcttgagagagaagaagaacataaatcagaacggttgaggacaagtagcatcagtacacaccaatcatgtgtaggtagactcgtaggggagaagatgagtcgcaggtggtgaatgggatggggcaggttcctgggcgtgtatttagagggggtcaagcatgagcgcgcagatatgttgtagggcagtcgcggatccggtggagg

SEQ ID NO: 195466 - DNA, 315 bp, Zea Mays
tcgggaagaggtcctttgcatctgccgtagtcatgtagttactgatcacgatgttaactactgtcgataacatcaggtttaacatagtcgctgcgttatgcaaggagtagttagggtaaggtgggtggggctagatcacccttccgatgtgtaatgtgttgagatcttcatcaggggaaattcgcatggtatgggagactacggcccgtatacctttgaaccctcgtaggaagtcttgagaacccttgcatgcattcgctgttgtatgcgtgccatgctgttgaatttagctgtactacaccagatagtgatacc

SEQ ID NO: 195467 - DNA, 636 bp, Zea Mays
ccgaggtgcgctgtagagggccgtggcgggagcggtggtcgcagcggcggagaggcgaagctcctcgagaagcagatcgttcttagcctccgcaaaggtgggaaatggcttcatgcgggtgaggatgggggccacgcgatcgaagcgaggactcagaccacagaggaggttgagcacgaggctctcatcggtcatgggggccccgagggtgcggagagtgtccgccatcgtcttcatctgacggtagtactcatccacagagagatcgccctgaacaagctggcggaaggcggtctctaggtacaggatccgagtctggcggttgtcgaggaactgagcctcaggggcaccccagatatggtgagcagtatcgtccggcacgcgaacgatgtcctgaagtttggccgtgagggtgccatggatccaagagagcaccacttcgtccatcaggagccaatcctccgtcggtgcagcgaccgtggggaggacgtggtcggcaagggcgtagcggcggagggtctgcaggacctggtcgcgccaccgaggatactgagtggagtccgacgtgagaacgtcggtgacggttgctcggatgctggtgagggccgccgcttgggcgtgaagagaggcgcgaag

SEQ ID NO: 195468 - DNA, 570 bp, Zea Mays
tcttatatcagtaaaggcatctggcagattatttgctaagttttgcaggtgtattattcgttgaacttcaagttcggtttctctagtgcgtgggtcaagcgattggatgctactagcactccattctatttctcggcattctttgttattaaggtacaatcctctccctaatgccgggaaatgctcttcatcgaagatgctatcagcgtaccgagccgtgaacagatccccggttctaggctctaaatatttgattatggacagagattcataaccaacatagatccccaacttctggtgaggtcccatagatgtacgctggggtggtgatatcggcacgtatacagcacagccgaattttcgcagatgggaaaccactggttgttgaccacgcgttaactggtggggagaagcagagtggtaagcagaaggtctatattggattaaggccgcagcgtgcaaaactgcgtgtccccaacaactggtcgggagtttgctatcttgtagaagtggcctggcaatgaattttattcttttaattaaggactcagcaagtccattctgtgtatg

SEQ ID NO: 195469 - DNA, 346 bp, Zea Mays
atgcacaaagggtggtgtggctggagcagatggtggcgaggccaatagacccccttgtacgaaggagagtagtcatggtagttgcccggtcgacgcagatgagggccagcgccggacggagcgttgcagaggggcgccatgtcttgcagcctcctttacgcggaggtgaacaaccaccacgttgctcaggcacgctggtgcagctacgactcccccgcaatggagcacccccatcatctgcttcacccgccgacgtgctaggaaaccgcgtgctgtagcctgtaggtggatggccgccgccgtctgtcgtggagcaagcaccctctcctggacatcgctcttgggt

SEQ ID NO: 195470 - DNA, 696 bp, Zea Mays
tgacaccttcaccaccctatctcacttcttcgcatgggtgttcactcagttcggttgcaccatccggggtgttcagtgtgacaatgagcgggagttcgataactccacgtctcgtgccttctttgtctcgcgcggcgtgcgactacggatgtcgtcaccttagatctctcctcagaacagcgataccgagcgcaagattcgcaccatcaccttcctcattaacgtcctcctgtttcaagcctccatgctcattactgggctgagggtctccgcactgccacctacgtcctgaaccgcctcccttccaaggtggttagccattccactcctttcttcgtcctctttggcaccgccccttcctatacacaccacaacgtctttgattgtgcctactatcctaacacctctgccaccactccacaaacttgcaccccaatccacttgctgccttttcctcgattactctgatcacaaggggtaccgttgcctcaatcttctcacccaccaaatcatctctcgacatgttgtcttctatgaggatgcttttccccttgttggctcctccccacctcccaacctccactctctcctccatgctgattttgtcgatgtccatcctctctcaccaccggtccatcgagctccaccgtgccctacgcgacaccatcaccttcggccacgcccggcgtggtccca

SEQ ID NO: 195471 - DNA, 1035 bp, Zea Mays
gtcgaccgggccctcgactcagtccctctcacgtacggcgtctagtcactggatggtgggacctacctgtcatctctatctcttcccccttcttcgttgtttctgttcctatccgcgtcaacaactcagactccgcgcggagctcacgcagtcggcgaacggagtccgcgacccgacctccaaccccgccgagatcttcgatgggcgacctataaggtccggccacctccgctcgtccagagacatcatgctgtgccagatatcctaacagacaaagaagttcgtcgtcttctccgcaattccgccctcaaattccactgcgtcgacgacaagcttgccccgtgctccttgtgtagatccccgccaacttcccccatgcacccgttgttgtgccactccctgtccatggggtcgcgacaacctcatcgccgccgccctgtgattcgccgtgaatcgcactgctcgtgtggacagccctgtcggcctcttcattctcggtaagaaatccactacctgcttcgtcctcatccaggaatcgcgtggcacatgcccctttcaaattagaacaccgtagcgccgggcgtggtgctcgccgaagtacagaggtggagccgtcgtcgtcgatacctgcatatccagaccacatagggcaggcatggggccggggtgattcactgtgccctcggaattgcactcgtatgcttctcagatggggagctgggcggcgttccgtgcgtggtgggcggtcaacagaccggttgccggactagcgccgctgggggatggccctgtgccgctgtgtcggtcgcctggggaggaagatgggctccttgtcgttcgatcgtgatcggacggtggtgatcaagctagaacgtactccttcaggcggtgaatcccaaccgttggcgcgtgatcggacgggagatagtgcatcatcggcatggatgattgttaaccgtggatctcggatccagtggtccgtattcaatatcggttcacaagtgaagtaaatctaatccgaacgctcgaattatg

SEQ ID NO: 195472 - DNA, 701 bp, Zea Mays
ttgattcagctagtgatgaagtttcaaccatctttggagaattagatctggaagctttgagccgtttggatggcagaaggtggtcaagctgtaaaagccaggatgggattgcactgtctgtgagtggagctgatcatgtagtttcagatcacagaagcttgagccaaaaatatcgaccaaggtcatttctagaaattgttggtcaaaactttgttgtacagtcacttagtaatgctatcgcaagggaaagaatagctccagcatatctgttccatgggccccgcgggacagggaaaacatcttctgcaagaatactttcagcagctttaagttgtactgctactggagagaccaagccctgtggagtttgtactgagtgcagtgactttttcactggaaatggaactaatctaattgaggttgatgctaccaacagaaaaggtataaacagagtacgccatttgattgaaaatataccagcatctgcaacttcttcacggtacaaagtatttgtcgtggatgaatgccatatggtatcttctaaagtctggtcggcatttatgaaatttcttgatgaaccattacctcgcgttgtcttcatatttataacaatagaccctgaaaatcttccccgttctgtcgtatcacgttgtcaaaagtacatgttctccaagatcaaagacattgacatagtatgccgg

SEQ ID NO: 195473 - DNA, 279 bp, Zea Mays
ggagaattacgcccgtactagatggaggtttacaaataggattgtgttgtaaccaaaccacctatccttttgtttcgttgttggtagagtggaaggtttgttcctcctcttcggagcagacggatgtgctacggatcttataataatttagctctattctcttggcgaggtgaaagccggatatattatacactatctaaaaaagaggaaccaaatgcccccgtgtgtaagtacatgcatgctgcaaaacgggttggtgaccggtgagtatggccattg

SEQ ID NO: 195474 - DNA, 792 bp, Zea Mays
tcatcataacgctgagtctagcgaatggttttctggtagatggtcttgcaaaggtggtgactggaggagaaatgacgaactaagccaagatactccattcaggaaaaaacttgttctcaatgaagggtatcctctgtgtcaaatgccaaaaggtagctgtgaggatccacgccggccctgcaaggatgagttgtactaccctgtacgtgctaaaaagtatgaactgccattgtgggcattctcattgacagaagaagatattgatagtgttaatgacaccactaaaagcggtgttgtgcctgggaggccaggtcagaccagacagccttctaggggagtgaagggcatgatgctttcagtggttaggataaattctcgtgttgttaaagatcaatcatctgttgaaccccatacaaaacccagaggaactgatcgaccactgtcgaggtcttcacgctcccattcaattggagctgagagaagttctgtccatgaaggttcgtctcatttcaggaagcaccatgaccatgattcacaaagttcgcacaagtccaagcctgttccaaacattccaaaggaccgtgtatgcactgttgatgagctgtcagtttatcggggtgactggtattaccttgatggcactgggcatgagcatggtccattttcttattctgaattgcaagaattagttaaaaatggcactatcattgaacaaagtagtgtgttccgtaagattgataacacatggtttccagttcttaaggatttaaaacctggaagctctgttcccag

SEQ ID NO: 195475 - DNA, 367 bp, Zea Mays
tttctatgtattatggttctgtgaactatcatgagagctcagtgtgtcgtcactgtatggtcagtgtatgtgggtgccataagtgacgatcccaactttaggtgacgcgttgactggaaaaatgtgatagataacaccgtcatatatagcaacaatatgtgacggacgaacgcagccgtcacaaaaggtgatgacattatgtgacggtactctgaacagtcgtcacaaggtacatactgtgacggtcgttatatgacgacccttatgacgcagcattttcgtcataagatgctttttatgaccaattttgtactaaacatgacactttacttttgtcatacaaaaccatttttttgtagtgcatcct

SEQ ID NO: 195476 - DNA, 292 bp, Zea Mays
tgacatcggggaatgtgtctgacggtggtcttggggttaagcgcattttaggggcataatctatgtacccctaattatgatacccgacaagtatctcattacacattgattcgatggcctctaatctttcatgatctgactcaccaaactaactctggtaccaatatgtatactttaggttcaccaaaccaccttttcctaccccttgttcagatgtgctgccctccttagccttcaacatttcccattaattcacaaggggacataccttaaaggctatgtgctcatgaac

SEQ ID NO: 195477 - DNA, 974 bp, Zea Mays
gttatgtcttgttaccaccacgtgagcggaccaaattgactgctcaatctgtagaatgtgtattccttggatacagtccagaacacaaaggctatcgttgttatgatccttcgactcgtcgtattcgaatttctagagatgtgagtttcaatgaaaatcgccccttattttacaaccagcctactcactcctcatattatcccccacagaatctacttctttcatgtgtcttccttccattcctgcatctacaccatcatcttctacatccacatctaatgttctcattccaataacaccaccttccacctccacgtcatcctcttcttactcttccaaaccacctgtcatccaaacctacattcgtcgttcccgctctatttctacggctggtcccgatactaatcctgtacctgattcttgtactaaccataatgagtctaatgatgtttttaatcagtgatatcgtcttcgtgaccgtggtaccattgaacctccagatcgctatggttttccacgggctggtgtggcaattgttgaacccactacatatcaggaagcttctgggattcttgagtggcagctagctatgattgatgaattggctgctcttgaacgcactggtacattggtacatggtatattgttcctttaccctcgcatgttgttcctattacatgtaaatgggtcttcaaagttaagacaaaatcagatgggtccattgagaggtataaagctcgtcttgttgctcgtggctttcaacagactcaaggacttgattatgatgggacttttgcacctattgcgcatatgactactgttcgaaccttgattgcagttgcagcctcatcttcttggactatctcccagatggatgttaagaatgtttttctcaatggcgatctacaagaagtttatatgcatcctcctccaggggttgatactccctcagggcatgtttgtcgtctctgtcg

SEQ ID NO: 195478 - DNA, 361 bp, Zea Mays
gaaggtggtagcactgcacagatgtgaaccacaatgatccacagtgatcttggttgggcttggagatgacaatgatcctttccaccccctcggttgctctttatatggatagataaaaactcaagcagtggctagattcaagggatgtagaacaaaggatactcttgaggggttggcaactgcatgagcatgattgcgtggctcgatccagggatccacgctcgactcatgaacacagcaaggcagtagaaatgatggagctcaccacggtagaggacagttagataaggctcccctaggtagatattgttcagtccaactttggatatttcagtgatggctaaagttctgaacactcctg

SEQ ID NO: 195479 - DNA, 278 bp, Zea Mays
gaccagggtgttttcccccaatcctcagctagcgacggcggcgccgctcaaggagcacgacggaggatcgccggcgtacaccaaatctcgcctccccagtgttatctactacccgatttctagcgcaatgccaagagcagtgaattgcgaaactaatagtggcgccataccgggagattaggctccgagggagttcgtcctcgctgcacggcggctcggccgcggaagccgaagtccggcgagcgatttcgcccccaccagtcgacgtctgcgcccag

SEQ ID NO: 195480 - DNA, 411 bp, Zea Mays
gaaacacccactacactagggttggtatggtggctgcgacgtggcgctcttaggcccgcgccagatgcatgtatgtctacaggtcctggggttcctagagctcaacatcaaccaaaatgtgctttggaagacccccggcgaagaggacagccttctagattggaagaagattcagcatgtgcacactagtgtgttgaagtgctcctgacagccctggatcgtggtgtggatgggcagcctcgcgagttcggcgagacaatgactgggaatggctaggtcgaaccgcaaatggcaaagatccttgaactactcccacaatgacatgccctcatcttgctccagggcatagtaccatgtccgggctaggtctgcgaggtggtacgaagcaagccagatccgatccaaggcgag

SEQ ID NO: 195481 - DNA, 332 bp, Zea Mays
gaacggcgaggccagttcagcaagagtgttatgctacatgggaaggataggtcaagccacgacatccgctcataccatggatgctacgatgcgctatcatatccactgttcttccctagaggtgaacttggatggcatgcaaatatcccaaaggttggtgtatccatggacgaagtggatgcataccgggcgacgcatagggcaagtaatgcaaatgatgaagatgtcggttagttgtttctttgtaatttctaagttgttcacattattaaatatgttttcggcatcactaaataatcaattcttgcgtatgcagaacctcctacccatct

SEQ ID NO: 195482 - DNA, 502 bp, Zea Mays
agctggtcgtcatcgattcagctcggagcccaagacgcaaggaacatggcttttccacagccaaatgctgatcgaggccacgttttgtacatgctcttgctagctaacagcatccaaacaaacttgaagtagacgccttaccccggcatgtgcacggtattttcaagaaaaatgtctcctatcgtcatgtcctatgacccaaccatgcttatctcattttgaacatatttagctggagcagttcagattgttgagggcataaacttcaatgtcttaagacggcaccagtaattttagtaccaaatcaccccagtgcaaagaaccgttggtaaccgaggaattccattgcaaccatttcaattcctatgaacttaaagttgcatacttataagattttaattgactcagaaacagtacttcctgtatcagaaacacagaacacaaaaaaatggaacatttcagacgagctggatgcccattttaatttcagactccaacactc

SEQ ID NO: 195483 - DNA, 281 bp, Zea Mays
cacttttctctctcctgggtaccggccacggcggggcccaagcagaacacgacggctttcatcgccggcgatctcccaacccagtgccccggtattcaaacccaccactagcgcatgcaatacgttgagaggagaaagacgaaaagcatggggggcttcatacctcggatcgcggcacaccaagccccgcccacagtgaagtgtggaccacggcggcgactactgctccgtttatcaattcccggccaccaggtccctccctttcccccgattgagctgcg

SEQ ID NO: 195484 - DNA, 295 bp, Zea Mays
atctcaagtgaaattagagcatggtagcctatgcaaacatacaatgttggtgagtatgagtctagatggattcagggacacatggatttctgtagtacagtaagtaggaatagatttatctgtgtaataatcagtgttatagttcagttacatatacagtatacctgtattctatttgcaaacgcaagttgaagattgaaccttgtgttaaacttctcatgttttttgagagtgctgaacaccatgttaatagttttagtgaatacctttgctgtttcgatttgagttacagact

SEQ ID NO: 195485 - DNA, 794 bp, Zea Mays
cccctggatagtgaaaacgagctatagatcccagcactgtgttaactggtgtccgatgacctttgccactctatgccacctccacccaactcctctctcctgcagggtttatgaccctacgttggtccaagggttgtgtcggtggaactctaagggaccgccgaaacctacaaaattgtaaattgtgcactggtaataatatcaatccaacaaaaatggaactcctcgtcaaaataaaattacctgaagttcgttgcctgtgtcgttgtaacaacctcgtcatcagcctctccatcggcctctccatcgtagtcctccccatagtcatcatcatcacgcatcggtgaatcttggcgtgccagctcgtcctcctgcctaggtgcattgtgctctgccgcctcgcgcgcttgctcaaatgcattgtggtcctgctctagcataggtccacttgagcctatcgcctcacgctctggctcaagtgcattgtggcctgccacatcgcgctcttgcccaggtgcactatggcctgccacctcgcgctcgtgcccaagtgcactatggcttcccacttcgcgcccctgctcctccatgcaaccaaggagctgctctagccattgccttgacgctgtagagccctacaaacataatcaacaatgagatatatcaagtactcgatgtatacgtagaagaaaagaaaataaaacaaattaaatacctggaacaacatagaggatgtatccccaccacctgaacccctagtcgaccgtgacctcgaggagtcaccacggtctccg

SEQ ID NO: 195486 - DNA, 362 bp, Zea Mays
gtcggtggacaccagacggaggagcactgtggcttcgctcacgttgatgcagccaaacagaggggcgcacaatcggatggagaagcaccgcgtatgtcacctcatgcagcgtcgcttacgcgcggacgtacgaagaagtcccgcatacaggcgcacgactggacggaggagtgcatcatctccgcgaaggagcattgcacctacccgtgtgtagatcaagaccagacggtggagcagtgcgtgtatacgccacacagaggggtggacgaccgtttggcgatgaagaccggacgaaggagcccacgcgcgtggtcggacgtagaggaggcgacgtcgatgcacatgaacagaccggagcagag

SEQ ID NO: 195487 - DNA, 306 bp, Zea Mays
tgcaaattaaacttaataaagaaatccccttccgtgatggcaccaacatcaaagacatcagcgtcaattcctaacaacatccccccagatctaccatgaggttctttgcaatgccagataaaatttttcccagcacacaaattccttagtagatgatctgggaaggatttgcggccagtttcagagagggcaataaaattgagaccgtgttctttggtcagatccgaaacgtatctaagttttttcaaatccttgaacccattgctgttccaaaagattcctttcattggtaaacaattaattaat

SEQ ID NO: 195488 - DNA, 277 bp, Zea Mays
acaggctcgacatatggaattgcaagttggtagagttacattgccatgctgcgacaaacctgtaaataatcattggtttacttaatacatctctttgtcaagctttcatttgtttgctgactcctgcttcaaaatatgcagacattaatccagaaagggccttttgctgatattcggcgtgcattagaaattcttgaaagggttgcatgttctataaaattcaatgagcccattcttcttgttggtgaaactggtactgggaagaccactactgtgc

SEQ ID NO: 195489 - DNA, 314 bp, Zea Mays
cacctagaggctgattgagctgggttctactagagatagtctaggctcaactcacaagttgaacatccaggtcgaccgaactcaccatagctgagctaggtttgggggcagcctgagccggttttcaccagagacgatcttggtcgacaccccagttaagaagccaggtcgatcaaggtcacctcggttcagccagcctaggaccttggctgagctaggattgactagaggggaactcggtccatacctcggttgaccagctggtcagccgagcttacctcggtgaggcacccctgggggccagttgagccaat

SEQ ID NO: 195490 - DNA, 486 bp, Zea Mays
atttcgggaaacctggatctgcagctagcttatcagtcactacgcaaaaaatgaaaaatatgaacgtagaacaccattttacaagttagctaggtggtggactaatggttgataagctaagaactggtgacacaagtttcaaacccaactgtgacacctggtgcataaatcgaatggttgtcccgtcagtatattttcggaaaacattccggatatatcacaagtagagaagaattgcatgatttcgggaaacctggatctgcagctagcttatcagtcactacggaaaacacttcgacaaaattttatcttattttgcataaagcgagaggggaaagggaaccacgactgtggaaccatggaaactggtgctttatacagtagagatttgagcataaaggtgttaactgctaccaatagtccttgcaagaacaggtgccttctttgaacaaatggaagcgtgttctatctctaacaacaatttct

SEQ ID NO: 195491 - DNA, 287 bp, Zea Mays
aaggcagtggggacatgtatgtacgtgagtgctgtggtgtattgaagtagtggtggcgtaagataattgattgaggtgtgcgggtatatgccgtaatgtggttatactcgcgacgaagaaaagatgtatgtattgtgtaacccgacgtgtaggttgctattgtataatcgtgtgaaggatgctcccgatggtcatgtgactaaagggtggtgtagtggcgaagcgagaagtaagtttaatatgtttaaacgggtaattgatagcatccatcggtgccgtcatgattt

SEQ ID NO: 195492 - DNA, 496 bp, Zea Mays
cgttcctcttcctcgcctcacctcacctctccacctgccgtcgtcttcctttcgttcctagacacgctagacttggctttggccataccttggactccccttccctctcctctccccgtctcccggcgtgcgtgcgtactacttactgcttgtccaatcgccgcgaccagagctcccgcgcacgctactggagaggattccagcgcccgtcgagcaacaggactctagcgcccgacccgacaaacgacagatagtagctactgcctccctacaccgtctcggcatctccgggggcacggcacgggaacggaggagcggagaaatccatccgccgaaccgcttgctttgcttggcaggcaccccgtacaattgggggttccggttcgaggaacgctcgggggggcgtgtgtgcggccgccttcgctcctcatccagaccacttgattacgccgcgctccctacgacaggaggtgcccaggccgaggtccttcgccgg

SEQ ID NO: 195493 - DNA, 298 bp, Zea Mays
agcacatccaaagactcgaagctgctcatatgtgggaggtgtgttgtacagggcagcaaagggacaagaggcgcagacagttttggtgggaaggcaattgagaagataagtgactgtatgaagagcatctacccaatagcgaggtggcatggacgcttggagcagcaaggtgcggatcatattgttggtggtgcggagcatgcatttggctttaccgttctgtggcgatgtataggggcaagacatgcgaagcttcacaccattggtgagaaagaaggtccgggtagaggagttgtca

SEQ ID NO: 195494 - DNA, 420 bp, Zea Mays
gtgaggagtagtccgggaggcgtttgtggaggagttggtgaggtatctggttttggatggaggaggaaggacgcctattcaggagaaaaatggcagtagcgagggcctcagcccagtaggatggtggcatgaacgcatggaggagcatggtgcggatggtgttgtttgttgtgcgaagcatgcgttcagctttgccattttgtggtgaggtgtagggacacgagaggcgcagcgagatgccacagctagcgaggtatgaggtggtggcagtgttaacaaactcagtcccattatcggcttgaaatgatttgggtgtggtggcaaactgtgtctgagcataagcgatgaaatcgactatgtggcggtgtacttcagatttgtgtcgcagcgggaaggaccaacagtaatgtgaaaaatcat

SEQ ID NO: 195495 - DNA, 315 bp, Zea Mays
ctttgtagcacctactggttgtgctccgttaagctcaccgccatcagatcgaacaccatagcctaactccggcgactgcgggcacgggataatgtggagtccacgggagtcgtcgatttgttagtctatggtccagattagatcccatgtaccccttcgcccggatggatttgcaccgttggatttcgatctggcgcatctatggtggtgtgaaacgttttaaaccagtgtcgttgatcgtggatcaaagggctaccatagcatatcgtttcaggtagtcttgatctaatctgggtcgtccattggagatccagc

SEQ ID NO: 195496 - DNA, 387 bp, Zea Mays
gtcatcagtgctacatactgggctgattgatactgatccaagtgtgaacttgcacgacaatggtggcctctctgtgtcttcgtctcaaaatccagttgtggactgtgtttctaggagagaggatccccttcgtgattggggcaatatcgcctgcagtgaaggaataattggatgtgaccataccaccaccgataatgaacacataaagctagcacacaggctgcacgataatgttcaaatgaatgtacctgtcatagttgaggacgtgactgataatgtgccttcaggcattccatcatcgagaccagttgttcctcaggttgtaatggcagctgaagaacaccaagaggtgattctttcatcacagaaggatgacgatagtaggac

SEQ ID NO: 195497 - DNA, 644 bp, Zea Mays
cccctccaccgtcgccgtcattccattcgtggggggcgcattacttctgcggttctgcgccccgtcccgaatccctgtagcgtccaccttctccctcccaccgcccggattccgcaagactgagagcagcgctcgctcgcctcctcccaatctccgcatcgtttctgtccaggtcggcggcccgatttgttgccgggcgtcgtcctcgcccccgccctgcctgccactcctcgtaggactcggtcctgtccggactcccgctccacctgtcccctcctcgcttccatcgccattgccgccctcattttgcccccctcccgctcgaagccgcctgctgctttggaccgtgccgagcggggcggcgtaaatgcccgcccgtgcagaggatcccagacagccttctccgcccccaaaccccgtccttgtttcccaccaattaggagcaggggaaggttctcgcacgcgtgcccatcctaccaacggccaattccagatgcggagggcgtcctgactccacctgccaagctccggcctctgctctgctccgccccgcaccccacccgccgacatgggcttcttgatctgccgcgtctgcctcctccaactgctgctcctcctcctcctcgccttcacctcctcaccag

SEQ ID NO: 195498 - DNA, 403 bp, Zea Mays
cctccactggcctctcgccggctcttattccaagaccggcgaccactcctctaccttccccggtgtcggaggcttctccccttggtgttcaacgtggtgaaagatcgaaggagcagcgctggcaggaggacggcggtgttggtgcctcctctgctgcgtcactggtccaggaaggcgtggttaggaaattctataaggaggccctgttttcatccaagcctgcagcttccagggatgatgatggatggatgagggtggttcgtcgtcgttcgagcaccttgaagcccctccccagaccagtcccggtggatttgcgtgggagatgcttcaactgtttctcttctaagcatcgtgcgcggagtgccgaaatcgcgtgtggtgcttcttctgccggctgtcgggg

SEQ ID NO: 195499 - DNA, 821 bp, Zea Mays
agactgtggtgtttcagacgttccgttgaaagatgagttgccacatcaagcacttactcgtgctgtgtttttattcttagaccaatatgtaagttgagttacccttagtcttcattattttcataaattgccttaccaaattaagtcatcaacttgtacctaccattagctgcagctattgcacctctttgatgacttcctgaaaatcattgagcacgtgtttctcttttacatgcaaccagcttatagatctccaatttactactaaccttattaccttgctaaagattttcgtttagctcttcattgttttcataaattcccttaccattttaagacatcaacttgcacctaccattagctgcagctattgacctctttgatgacttcctgaaaatctttgagcatatgtttcccttttacatgcaaccagcttatagatctccaatttactactaaaccttattaccttgctaaagatttttgtttagttactatgttttgctggattagaaaagtgcctgaattttaccaccctatatgacatcaatctccagggctacataaatgctggaattgcatcagataaggtggcgaaggggcacaatgacactccatatgaggttattgaagtaccaaagctaaatgaatcacatcaaatggaatcagtcaacattcaaaatagcgttgtatctgtatcacaaaagaatgaggattttgagcatggaacgagcactgaatgctgcagaactgtaagtgttaaaaatactgaatgtgctttagtagaagcatcaaatgaaaaaaatcgttccacggttcac

SEQ ID NO: 195500 - DNA, 725 bp, Zea Mays
aatgttcagacattgagaagcgatcgacaatggccaaacgtcttggagatgcaatttctattatatgcagaggaactggtgatgttgaattatttgaagcctttctgcaagattttgttgagtgtgctgggtttcttgactacttcaaagctgtatggcttccaagacttggtcagttcatgtgcctttcatgtatcatattttgcttctctatctctggttttttactgtagttgccaaagggttttagttataccttttcttaagaagtaatgtgttaagttatttggtgaggtttcttgattgctgtcagatcctctactgctgagtgctgattgttaaatatcttccaggggcatggataactgtcttaaaggccacggcattggctagtgcacaggtagcttcagcaatagagagttaccatcacctgctaaaacttcggctgctgaatgaggcagatgaaagtgtctactggcgtgctgattggttggtcgataagttgggtacaaaggtccattcttactactggctggatgaattctcaggaaagaacagtttttcgcgttactggaggagtgagtggagtagtggcccaaacccatggtgccagggaatgcagattccagattccgatgtcgtcattgaaggcaattatgccagtgtggtcagccagaagaacaaggagaagtcccatgtcgtactgaatccaggttctgagtttg

SEQ ID NO: 195501 - DNA, 304 bp, Zea Mays
gcagaatccttggatgttgtcacaactgttaagcacagggaaccacatatgccctctgttgatgaattttcggcactaatagaccactcaagttcaggtgttgagctcgttcaatttcgtcagggtcaatcgaaaactgcatcagatatacaacctggaaaaagtacaaatccatatagtctaaaattagaatcctctcatgcacctttagtcagtagttcacacccactggagtcaacaagtttagcttcgtcttcccacgttacttctgataatgggttttcgttgcataccaaaagcagca

SEQ ID NO: 195502 - DNA, 415 bp, Zea Mays
gcaaagagcagcgttttccccatccactgtactgctgaaaatctggataccattcataatctgctgccatgcgttgttgccaacttcccctgcaaatatttgggggtgcctctatccttaaagaagctcgacagacagcacttacagccattcattgataaaattgcacatcgtcttccctgctggaaagctgatctgttgactagagttggaagactgattattgtccagattgtcctgtcttcaatgaatatctacttaatgatggccatggaccttccttcttgggttttcaaagcaattgacaagatcagaaggaatttcctgtggagagggagaaaagaagctttgggaggacactacttggtagcttggaacaaggttactaggcctaaagaatttggaggattgggta

SEQ ID NO: 195503 - DNA, 1032 bp, Zea Mays
agtacatgattgccactgatggtgtcacaatgacatgcatcacatgtacagacaagggccaaatttttgtagctggtcgcgatggccatatatatgaattgcagtatacaactggttcaggttggcgtaaacgttgccgtaaagtttgtcttactactggcattggcagtcttctttctaggtaactactgttgtaaggccagaactgtgattatttgcttatctgtagataatgtggccacctgcttattcaaccatcacgattttcaggtgggtactgccaaatgcattcaaattctcaactgttgatccaattgttgatatggtcatggatgaggagaggaacactatctatgcgcgtaccgagggcatgaagttgcaattatttgatctaggagttaatggtgatggccctttgacaaaaattactgaagaaaagaacattgttgatccacgggatggaccttatggtggtcggaggtctaatgcgccaagagctgcacgatcaccaagaccatcaattgtttgcatctcacctgtatcttctgtggaatcaaagtggctccatgctgttgctgttttatcagatgggaagagattattcctcactacatctggtggaagtggttcttcagttggattgaacagtggtctgcagaggccaacctgtttaaaaattgttgctactaggccgtccccacctctgggggttggtggtgggcttacatttggtgctgtttctgtggctggcagggctcttcctgaagatctagcattgaaagttgagtctgcattctattctgctggtgctcttgtaatgtcagattcatccgctacagccatgtcatctcttctggctgtgcagaaagattcagctgcgcagctatctctccccagcacctttggaacagcttctagaacctccagagctctacgagaaacagtctctgctttacctgttgagggtcgaatgctttgtgcctctgatgtcttaccacttcccgatgctgcttacatgatgcagtctttata

SEQ ID NO: 195504 - DNA, 308 bp, Zea Mays
atctgctgcaagtgcattgatgcgcatggcaaaatcatctactgactcaccatcgtggaaggcgatattctcgaactccttcaacaggcattgtgcattcgcctccttcacacgctccgctcccactcgcatattcttcacggccgcccaggcgtccttcaccgtcttcttggatccgagcatttgccacatttcttttggtactgaccgcagcaggcagcccattgcgagtctgtcttgcgaccgcttcacaccatcaccaccaggctcgattacatcccaaatctccatagcttcatagttacact

SEQ ID NO: 195505 - DNA, 458 bp, Zea Mays
ggcgcgggcaaagggcggtctgctgtgcacgcggtgagtgaggtggagcagggccaaggcattgcgggggcagcgcaggatgtggatcccgcggtgtttgaggtgaagaagatggacgtgagcgagggtggcgacgcaagcaagcagaatcagcactctccgtcttgtacggccagcgaggtggatgtggggatcgttcctgtggcagtgcgagatttggatcctgtggggtctgaagtgatgatggaggtggacgacggccatgtcagggaacaagagcgcgcgggagtggctgtggcgggcagcgagtttaagatggaggaagctgatggaagagtggtgcatcaagggtctgctgccacatctgctgggggccttcaggcgcgagccgaggaagtgggagagtgcttggtcggccgttacattggccgcaacgcgccaatgcaagcggggatcct

SEQ ID NO: 195506 - DNA, 715 bp, Zea Mays
atgaggacctaagtgaagaacggctacaaggtcttctgaatcaactcaagttagcataccctaaactctataatattaacaattctgcaatgttagcatgatcaattccatgcactattaaattgtaaattgtagcagaaaacaagaaaaaggtagctcacagcgcgcatgttgacatagcatgggtccaaattaggaacttcaagactgcgaatggcccctgtcaaccattcacatgcctcaacatttttcagcatccatgactcttcaaatgagcctccagttaatgatgttgtaaactgaattggatataagaaaaaataaataaatcaatcaataaatattagacatcaatttagggagatgaatattattcctctccatcatacctcatgtggaatccacagacgctcaagcaatttatctagctcttccataagccctttgttatttacagactgcatctccaagccattgttacgtgattcaatctgcaaaattagatagtaggggaccaaatagtgaagttcttccatatcagcatctagaaaaatgtgtcttctgctaacaaatgactgcagcaggacccgtggaccacaaaaacaggcacaatatttaatgtttcaaaatgacaaatccaagaggccaggctgatgccaaaggaagaattctaccaaaattctgaaaccgatgataacaagcaagcaagaattta

SEQ ID NO: 195507 - DNA, 314 bp, Zea Mays
ttgttgagtggtctttgcaacggtccatatcaatcagttgatcctgctgctgtgctggtgtctagttctagtgctgttggtgataagtctggttcaacagccttggctgatcttacaggtggtcttccattcaaagatgtagtcgctactatagatccaaattcactgcaaccattgaaaccagcaccaccatcagatcctgtggttgtatcttttctcaactctcacagccttggtgacgttggtgcttccagacaaactattggaatcaagaagacatcagtagaacataaggtggggcgtgatgtatcaac

SEQ ID NO: 195508 - DNA, 477 bp, Zea Mays
gactaccaggttcttttctaatactatcatgtgtcttttggacacttctgcctgtactcctggatcacaattttcattgccctatgacacttctgcctgtactcctagagccaccatgctaggaactgtattgccaccaatgttattattagtagacataggcatcggctcagttgggtaaatctgaacacttggtggtcgaacttcagcagcaacaaacactgcatagatagatagatccagctgccctcatgaatactgttcgtgctaggggatgatgattgacgaccagtattcacggttccctctggattccattttcaccggtgagctttggccggatccgatccataaacgcccagtagctgcagtgcaacagtgttggtttgattgggtggtgcctggtgctggtggtactcgggcaggcctgttcttgcagttcatctgtgtactctctccctgcctctctctctcttt

SEQ ID NO: 195509 - DNA, 381 bp, Zea Mays
gcaaccatgaatttggaacagaatgctgcccagtggtggagatgttataagcttagtcatggaattgggaattggcaggagtttgttgcagctgtgactgaacagtttggtgctgatgcctatccaaaagccttgaggaagttgttggctctgcgtcagactgatagtttggagacttatgtggatgaatttgaacgagccaagtatggagtagtagttcataatccaaggatgggtgaaccattttttgttactcagtttgtgcggggactcaagtttgagatacaaaatgtggttcaagttcaagtacctaccaccatgaatcgggctattctgttggcccgcatgcagcaagaggtgttggaccgcagtaaaactcga

SEQ ID NO: 195510 - DNA, 511 bp, Zea Mays
gagaacacagaacaccaggtctacggatccaaaagatataaaggaatcattgggtagaattcgtgccgaaccatcaaacagggtacacacaaccagtgttgggtattactctcagcatgcagctcatgatccgatttcatcttgtaaggagatcaaagtgcctttgcgagacggtgcaagggattctggaagggaccgtgcactggagttagtggttacaagtccacgagaagagactcctcgatggaggcaagaacagtacgcacttcagattttagaagacgttcaaaattcccgaattgctgagagatctaggatggagatggagatcagagtactgaaggcacaagtcagtagcatggagagacaagtgatgaacctggatcacttctctgaggtcaagtccagatctagtttgaaccaacaaatggtacatttgcacaaaccatacttctgaaactgtaatgggtttaaattttttgaaataaacacaaatccatgcaagttctct

SEQ ID NO: 195511 - DNA, 346 bp, Zea Mays
gtggtttggaagagtaagactgaggtggtgtggaagtgggaggtggtgtgatggaaataagaacatctggggtagaaacagtagatgatggtggtactgatgaagtttcaaaaatgggaggaaggctcatgaaggaggtagactctgtggaataaaaagaagaatgagtggaagagttgtaaaagaagggtcggttttcattaaagctcacatctcgagatatacacatgcgacaagaagatggatcataacaccgataacctttatgttcagggctgtatccaagaaaaacacactcaacagattgagcagtcaatttagttctttcacggggagataacaatac

SEQ ID NO: 195512 - DNA, 837 bp, Zea Mays
aagcattgcacgggtaacatatttgtctgacagcgattgattttgggaaccaatttggtaatcagtacaatggagtgcaacagagaagaagccttgaaagccagggaaattgctgttaagaagttggaaagcagagattttgttggtgctaaaaggattgcccttaaagcacagaggattttcccagagatagagaacataccccagctgttaactgtctgtgaagtacattgtgcagcagaagcaaaagtaaatggaatgttggatttttatggaattctccaagtagaaggaacagcagatgaggtgaccataaagaagcaatatcgtaagcttgtcctctcacttcaccctgataaaaacagttatgctggtgcagaatctgctttcaagtttgttgcagaagcatactcaacattgtctgatcgaaccaaacgatatgcatatgatgtcaaatggagggctgctcccaaagttgcaccaaagcaggctacacagccgacacaaccaaatcaggctacacaacagaaacaggatgcaaaaccaaagcatgttgctaaaccaaagcaggctgcacagccaaagcaggctacacaaccaatgtggactacagagccaatcaacaaaaatagcacaaatagtagtgcagcaggatatggaccttggacattttggaccgtatgcattcactgtaaaacaaaatataagtaccatggtgacatactcaatcgtcagatccgctgtcagaattgcaggcagaatttctttgcacaccagacaagtacagaggatgtgccttctgcattctcatcaaaaacagcaaatagtgctgcgcag

SEQ ID NO: 195513 - DNA, 731 bp, Zea Mays
cgttctcgccaggtggtgtagtaacaacagcgagggctgctgcaggagcagcattggtcatggtgagttcctcgagagtaagatcatcgcggacctgcaaaaaagtggggagaggagaggtgcgacggaggtgaaggccgagcgcttgaaagcattcgttgaggccgcgaatgatgttgaggacaagggtcttgtcggagaccggctcgccaagatcgcgaagatcttcggcaagctttttgtagcggcggcaataatcagcagcggagaggtcgccctgagtgaaggagcggaaagcttggtcggcgtatagggtgcgcgtcgtgcggttcccaagaaattgggactcgatggcgagccacaggacgcgagcagatgcaccacgctcggagattgtatcagcgaggttgtcggtgatggagccgttgagccaagacagaacaacgacgttcatgcgagtccagtcgggcgagtggtggacaacatcggaaagcacgtggcagtccagagagaatttggtgagggttaggaggaaggactcacaccaccgagagtagaaggtagagttgacgtcgaggaggagtgggacgagggcccggatgttctgcacggcgacggcttgagcgtgcagattgagaagagcaaccgcttcgtgttggagaagagcaaccgcttcgtgttggagaagagcggcagaaagctgggcgacggagtcagcaccagtgccgtcg

SEQ ID NO: 195514 - DNA, 831 bp, Zea Mays
tgagtgatatcaacacgagcacagtaaacaggatgtatatgatcaaatccatcttcctctcaatcctgctcctcttggatggcgactcagttgagttctgcatgactttactgtcatgaccggtaaaaatgaccactccatagacaaaggctgtattccttagttttgagtcccgcagaagtatctgagacggatcaagggcgtaaacctgcctctcatactcaaagttaccagtgaatgtgtacaagctcgggttgggatcctcacagcgtatcactgcctggaaatctttaaaggactcgtcttcttccaacggcagcgtaacctcaagtgacctcttcaccttaaggtttgtctcgccatcgaggttcattgtctcgacatagcaaatgccatcctcatagcttgaggacagtagcagtaaatcagcagggaagaactggtccttctcaaccctgaccacatcgcctacgcaaaggtcctcccagtgccggtagtcgaattcgccatcactcttgtgcacgctgacattgcggttgttcaccttcatgtcctgcatgaagcggcgccagtcctccaacccctccttcatcatgctgaggccaacgacaaatgccagcggagcaatcatgctgacggcagagaaggggcacaccggggtgagagagaggatggcggtgaggaggaagtagaggttggcaacgcgtcggaactgctcgaagatggccttggggaagaaggtgacgacgttgtacttggtggtggtgatgtagttggtgatgtacttgagcggcttctgcagggcggcgttgttgcagtacacgacgcgcg

SEQ ID NO: 195515 - DNA, 337 bp, Zea Mays
gctcattgtttctcctaaggtacctgtggtgcaggatgctgatgtcaaaggggtcgatatgatggaggttgaaacagctccagttcgcaatgcaaaaacagttccttcagaagagagtgctgtaactcctggagttgctgagggtaaggcatgtgcagctgctgatcttagctcattgatagcttctgaagaagctgggtctcaaaatgatattgacaatgacaggccgaaaacttctttgtgccatgctgattccatgaaaattaaagttagtgatgaactaccagtgaagcaatggacatactgtgatcatatgtctgatttacacagttctttc

SEQ ID NO: 195516 - DNA, 1396 bp, Zea Mays
gttcaaagaaaatatgttcaacaatttaatgttgctgtggagcagatctgcaaggcttataatgaattgccaaaaacatctgaagccgcaaatgtagcattgcctgatcagagtgaaaagactacagagcacctggtgaggtcacctgatattggtgggactccaggactgggacaaatggaagatgatccccctactgattgctcaagtacttcagggcaagggtcagggaccgaggaggatgtcaaagatggtggtcatgaaataggtgataattctttggcagttcctcaaaagaaagcatctttacaacaggatcctaagcatcccaagacaaagaagtctgctgcatcaaagtctggttttgacatgtacacagaacaggagcattcaccaacatctctgcgggcagaaaggcagattgaagaggtgaaaattgaagaagagagctgtcatctagaaggttttgttttggaacctaacttggaggtggtttgcgcccttgaagtgccaaagaattttaaatccaacaagctgttgaggaatgctgaaagtaaggaaaatgagcatgttggtgttggtagtcctactggaaggattgctgttgaggccgcatctgatgttgtattaaacatgagtgctgaagaagagagcagagaatttaagaagtcaaaaatcatgacaaaacaatcactgactactggttcagagaaaagggataataaaattgtccatggaaagcctgacaagcaattgactggaaaatcatctgcagggttttctctcaatcagaaatctctgacaggtagcgggcagcacaagatggacagtagtgctgatacacgtccggcaaagaaggcaagacttatggacagggctggtgaaacagataagacagttgccaagagtgagacgaagttaaacatcaattatgaaaatcataatgctgtgaaacatgagcaatctactgctgtggaaacatgtaaaaacacaattcttaagactggtatcggtgatgatagggcacggaagtcaggtggtgctgtatcacccatatcaaagcttcattctgagatcatggaaccagcatctggttcttctgtaactcagtctactgttgctgattctcttaaaaagggttccagcaggaaggaggatgtctcacgtgttgataggaaattggttaaacctaagagaagagcgtgtcgttttgatgatgacgaggatgaaggacagcaaacaccacttcatagaacttctgccaaatctctctctacgcatatagtcccaactgagaaaccaggtagtcggggaaattttgcttcgcatgttggcaacgcttctggaaaaaaaccaggccctgccagagaagagaaatcaagaagtgttaggatgt

SEQ ID NO: 195517 - DNA, 306 bp, Zea Mays
gacgatggtggggattggtaggggcacgaggagacctgccgggtgaaggtgctcagatttgtaccgctggcaagtgggacatgcccgcacaaagtcctgcacaacacgacacatgttgggaaaatggaagtcgcgtcggagccgttgtagggtgcactggacgccctcatgtccatcttcatggacagttgccacaacctcctgcagaaggggcgaggacggtgggatgtacagacgcctgtcgtagaggaccatgttgtcggccactgcccatggagcagcgtgtgtgcctgtgttgatttcgtc

SEQ ID NO: 195518 - DNA, 1044 bp, Zea Mays
ctggtgcagagttagacgtggtgaaggtccacctaggaatgggacgggccacatggagatgcggctagtccatagattgtagacagagggtcaaggagcttccccatagtcacgcccaccccatagccacccttccatcaccgacgaccaccaccaaaccccacactgcctaggcccaagttgggagaaggtatgcgtggagctggacactagagagatagaagtgcacgatggcgagcccccaaggcaagagtggaggaaggcggcgtaaggactggccccataggtggagctataaagtgcaatagcggtgtaggaacaaggaggcgccccttggtgagctcctcgaggatgaagtcattgcgggccctgtggaaggacgggaagggaactgatcgagtgtccaagttcgaatgtgattgtagtgctcattaaggccacgtagaaggttgaggacaagcatacaaacaaagacaggctccccaaggtcacagagggaggccaccatgcctttcatccggtggcagtactcggtgacagagaggtccactagatgaaggtcctgaacgcggcagcaagatggagagcacgagcctcatggttgccaaagaactactcctcgatggcaacccaggcctggcgagcagtgccaccacgctcatgaacgacatcatgcggctcaacagtgactgacccaaggatccaggagaggaccacactatccatctgacaccagtaggggataacaagagatgttgtttcggtgaagatgtggtcgtcaagggcgtagcgctgcagcgtgaggaggacaaggtcgcgctagcaggtgctggaggaagcaaggtcgaaaaagacaggaaccaaggagcgaatgttctgaacacctgccttctgtgcacaaaggatggcgatggaaacctcatacatcgaggaggcgtcgaccatcggataggtcgaggagggatcgaggtcggaagagacaagcagatggctctcaacctcggcaagctaccttccgagagtatgagcagtggtgcgttcgtg

SEQ ID NO: 195519 - DNA, 436 bp, Zea Mays
ctgaccgtgaaacttactgaattctcatatcgcggttgcattgtgaatgaattaatgcaaacaaggaatataaaatgggccattccagtcttgcaagaatcagctcctgggaagctcagtgccactttgttaaattccttacttcaagcctatggttggctaaaaaattggagaaagttagatgcagttctttgcaagatgctaaagatgcatgccaccctttctatatctagctaccgctttcttgtgtgcagaatgtgtgagcaaagtcgtttttctagcgcttcaagccttagagcacttttccaacatactgacaagtcaagagaactgattgcatgcaacattctaatattttatctttttcaaagaagaaacagctcacagattcatgatttattgaaggacattgaaggtaatggtatttctcttgaca

SEQ ID NO: 195520 - DNA, 461 bp, Zea Mays
gggtcactgttccaatagaggacacccacgagtctgttgtttatgtgccattcctcatccgcggacttgctcttcctgtttcttcctttttccgcggtctccttgacttctatgatttaaatcttacacatttgaatcctaacttcattcttcatgttgccattttcgtacacctgtgcgaggcctatcttagaattctctcccactttggactctggaagtatctttaccactatcggccctgcatggctggaggacaacatcaactcgtcgacggcgcaagtttggaactttgctaggggaggaaagtggaataccttgacattcccctcaaagacagcatcgagggatggcgtctcgagtggttcaccatggagaatcacaataaatccctcccccctcgatcaggaaggcagtccgacgttcacacgcctaactgggtggagtaccctacttattca

SEQ ID NO: 195521 - DNA, 413 bp, Zea Mays
tggtcgtccagtggcggctagggtttactattgggcttcatccttttttggcccatctacagtaagcaatataaaccgcttgcctcccctgtcgaaaccctagcgctgccgtaacccaaaccctgcctgcgcccctgcccattgtctgccctctaccgccgtcatttgtccagtgcattcaccagcggctgctccagtacaccggcgcaggctctccaggactccaccagcgttgtctccagaccagcaccagtgagcagtgacgaagaggaactgatgactggtgctggtcccttctcccccttttctatcttattatcagtatgtctacactctgcggtcagttgttcttgacttcttggttcttaccatcacagcaccagtgcattctgcagtctctagttacaatttca

SEQ ID NO: 195522 - DNA, 411 bp, Zea Mays
atcgaagtgcattgtagtggtaattgcgttaagttaatcggtagtgtctcgagtgcacgccacaacatggttgtatgcgagacaaggtaatataaggtgtgctcgacacgaatgttcggtcgatataagtaggaattgttttggcttaaatagagaggtggtgacatgctgaagtagtcatcgcttcctctatgtttatgagtcgagtcaaaatgtggggtactagtggtacgctaggcaggcggtgtccaaataaattaaccggttgatgtggtagttgccgtgcgtgatttattgttagtgagtagtgggattacgagttatgtgaggattatgttagaaactagtatgcggcgtgtaactgtgttcgtgtggtgaataataggtcggtaggtattgttggtgtcagta

SEQ ID NO: 195523 - DNA, 408 bp, Zea Mays
aatgacagacagcgccaagcaattgcacggaggggattttccagtattcttgatatgagactggacgcactcggcagcagatcacatttagcttggctgatggaaaagctcgaccacaatgacatgacaattcgagccggcccagggaaggagctgaaaattacaaaggatacggtgcacctaattttggggttaccaaatgctggtggaggaactgcattgggcatcgatgaagctgttgctgccaacaatttaagagctgaacttggtttatcgaaagaagattttggggttgcagctcttcaagatcgtctgaggaaagggtctgacgatgatttaagcatcagatcctttttcttgatattgtttaataggttgttgttccctactgccagctggggaataacc

SEQ ID NO: 195524 - DNA, 339 bp, Zea Mays
ttgtaggtctgaatgacagggggtttggaatcacaaatggacttaagaggagcctgcaaaggtgactcagagggcaacataggagagggtgcaggaggtggtggaggaagaaacacagtggggatatgtgtagttggaaacgtcaagaataaaagtcgctcaaacaacggaggaaggttgaggatagaatgtttgagactcatcaaagtgacgtcttgagaaatccacatatgacgagcaacaggatcccaacaatgatatcccttgttcatcaccaaagctcaagaaaacacactcaacagattgaggtgtcggcttagtacgttcatgagaagcgag

SEQ ID NO: 195525 - DNA, 315 bp, Zea Mays
atcccctttcctacataaaccagctataagaggggaatatgatgctggacttggtgtcaatcccttcgcaaccatctcattcaaaagacctcttgcctgatgaaaattgttgtgtttgcagtaaccattaattaaagagttgtatggataaacagtcattctgattcccttctccctcatcctatcaaacatgcaaagtgcatcttccatcatacccctcttgcacaaggaatgtatcagtatagcataggtcacctcatttggatctagacctctgtctgccatccctctgaagagcttttctgcctccctata

SEQ ID NO: 195526 - DNA, 322 bp, Zea Mays
aaagaagtggcctcgcatgtgaccatggacaatgatcctgaagtagacacagaattttatggagaggaggatgaaagcatgcttggcaataatgatgtcattgtggatagggtccatgtgaatccagccaagggtagggctctgggtgatggcaactcttcaacggtgagctgggtgacaaaggattcagactctatggcggtgccttggaggagtaagaagtcgcttgtagagattgttaaggagattgatgagtacttcttgaaagcagcagcaagtgggaatgacgttgtgatttttttggactctgctggtggacggc

SEQ ID NO: 195527 - DNA, 290 bp, Zea Mays
ctaatgagaagctatcactttcagacggtaccatgttgagcaatgaagatgccacaacttatcatagtgttgtcggtgcactacaatacttaacattaacaaggccagacatctcatttgcggtgaacaaagtttctcaatatttgcatagtcccaccacccaacattggtctgcagtcaaacaaattttgaggtacttatgtggcacattggggtatgggctttatcttcgtagaagtccttctctattttgagtgccttttctgatgctgactgggctggtaattctg

SEQ ID NO: 195528 - DNA, 302 bp, Zea Mays
agaattcttgacattccattttctaaagcattctacaaacttatccttggacaggtatctttgactctgcatccttcaatgtgaacgacagttgctgttcttactttgcgtgtctatttaaatctaatctttttctttgttataggagcttaatatatatgatatccagtcattagattctgaactggccatatgccttgtggagtttcaagcgcttgcttgtcagagaaaatatgcagagtccaatttgacaagggactgccagatatcagatttgacttatcggggttgtagaattgagg

SEQ ID NO: 195529 - DNA, 619 bp, Zea Mays
agaacacatacattgctgacagcgacatgcttcgtgtgctgatgctacacgaaattggtggagaggtaggctatactgacgttgttgcagtagacgaggatggcacacgcgaggggctgtgaaagtcatggagaagctaacagagccaggatgcctcggtaacgctattggccacagtgcgatactcggccttagcgctggagcgtgagacgacatgctgctgcttcgaggacaagcagacgaggttggcacccaggaacatggcgtagccagaggtggatcgcgtgtgttggggcagccaacccaatcaacatcggtgtagacgaccagctcagaagttgcagaggaacaaagaaggccttagtcgaggtgccgcggaggaagcgaagaattttcttggcagcgacgaggtggggctcacgcggggtgtgcatgtgaaggcgcacctgctggaccgcgtaggtgatgtcgagccggtgaaggtgaggtactggagagccctagcgaggctttgataggccatcaatgtcgttgaccggggcaccgttgtcgtcggagaccttagcctgagtgtcaacaggcgtagagcaagggtgtagtcagacatgccagcctgctc

SEQ ID NO: 195530 - DNA, 302 bp, Zea Mays
caaaatactgtaggaacactctggtaaaggttgaaaacaaacaaaatccgtttgacatgagttggcatggattcttcctcgggatggagcagtcggacagacctctctctcccctcccatatctcttcactcagtacacaaaatctttgacctcccctacaaaagaggttgcttgtggtaaggagagcacggcaggtgaagaaatcttgccaaaatcaggcttggaacggcgtctacacggcttagaactcgggcagatgaacactgccacgtgttcgactagggatgacacgccagcgcgc

SEQ ID NO: 195531 - DNA, 303 bp, Zea Mays
gattcacgcgcgccagtgctcttcctttcctccgaccgccgcgcgtcgtcatccaaattcccggccgcctctcttgcttcctataaattgagccctccgacagccccgcaaggtcatcacacacccagccaccaaaaatcactagcaatcgttcgtcagagagcttgaattttggttttcccccaaactggtttccgccaccgcagaaccgagctcaccgtggccagtcctccacaggtttaatcataccatccttgttcttgttttagcatctctgtgtgctggtgatgctcaccaactcgc

SEQ ID NO: 195532 - DNA, 431 bp, Zea Mays
gatagcgtgggttgaaaatataaattatgtgacatgtgattcgtgttttaaaggcgagatgtgcgaatgatcggttagtgtttcacttgtctagtcgataaacgttgtcataaataattgtgctaaaattgggcatgagaaggcagtggggacatgtatgtacgtgtgtgctgtggtgtattgtagtagtggtggcgtaagataattgattgaggtgtgcgggtatatgtcgtaatgtggttatactcgcgacgaagaaaaggtgtatgtattgtgtaacccgacgtgtaggttgctattgtataatcgtgtgaaggatgctcccgttggtcatgtgactaaagggtggtgtagtggcgaagcgagaagtaagttaaatatgtttaaacgggtagttgatagcatccatcggtgccgtcatgatttctgtt

SEQ ID NO: 195533 - DNA, 625 bp, Zea Mays
caagatgtttaggaggagagttgcagtgtgcaacgcttcagcccaatatgaaggaggcatgcttgcctgaaatagaagagagcgaataatatcgttagtggtacgaataatccgctcggcgcgaccgttctgcgaggacgtgtagggacatgacatgcgaaagtgaatgccatgtgtgaggaagaaggtgcgcatgctggagttgtcgaactcccggccgttatcactctggatggccttgatgcgtgcgctgaactgggtggacacataggcgaaaaagttagacagggtggaaaacgtgtcagatttaagccttaaaggaaacgtccagaggtgatgagagcagtcatcaagaacaactaagtaatatttgtaaccagagacactaacaataggagaggtccataagtcacaatgaataagatcaaagttgttggacgctcgagacattgaagaattaaaaggaagacgaacatgtcgtcctagctgacatgcatggcacaaagactccaagcttttattacaaccagggatagccgaagtgagtttggagagtgcctcgcgaccagggtggccgaggcgacgatgccacagagaggtagatgtggagctggcaacaagggag

SEQ ID NO: 195534 - DNA, 542 bp, Zea Mays
caagaacatgttgcataaagtttactttcgttcattccttcattcaccgccattgttaagcaataatcctgctgcacggggtcaacaaaagcagtttcgttttgtatgcaccatctatggcgatattagtactaagggcatgtacgagaggtaaggaatgagggcaggcatacctcaccatgttttttggaaggggagctcgccggaggggatggagaagcctcgtcgatggtactacctcgcagacctgcaaagagagagaagaggtgaggaactaaaggcagagaggatccatgcggctagtggagggggagggggcaggcacagctggatcttgcttggacagggaaggggcgcttgcggctggatggcatagacaatagaaacggacggtccagatagatgggaggcataacggcagaacgaggggaggtagactactttttagattaaggaaggctagtgagactccatgggatgggatccgaagctgtagggaggctctgagctccgcccgccccaccccgccccaccgctggccg

SEQ ID NO: 195535 - DNA, 353 bp, Zea Mays
gggcaaacatattgttcatcgtcaaggactacgacagggtgaccccctctcaccgatgctcttcattctagtcatggatgtgcttgggcgaatggtcactgcagctgaaggggcaggacttcttcaaccccttgctacaagatctgtgcatcaccgagtctctatgtatgctgatgtagtcctcttcttgcgaccagctgccgaagatatagcagccatagtggatattcttcacctattcggcgaggcttccggctgcataataatgtccagaaatctaatgtatatcccattcgttgcgacgagagtgacattgcagttgtgcaaggtttgctgccgtgtggaatttcgtc

SEQ ID NO: 195536 - DNA, 499 bp, Zea Mays
ggaagcttgtatgatgtacgagagtatgcgtcatgtaggcattgctccagatggaaagctgtgttgcattttgggcattggcaatgacaggggtgattgtgatgattctcagaaagcgaagggtgtaacataattacataattttcacagagatttattaacttgatgaagggacttctctatgatggctgaatggctctgagctctccagtgcaggacacactgtttgctccatttgtttcctccacttccacactgccatcctatggacaaggaatggaaagcagtaacctgaaatgtggcagttaaatccgtggacaactgctgagggtgtgaccgatacaggttagcctttgtattgtgcaaataatcagataagaagtctgcattctgaaaatgcttcttttgttcaaagtgttacatcaacagttttaacttccggttacttgagatatagcatcatactgaaaatttccctgcttttcaagtttcatgttta

SEQ ID NO: 195537 - DNA, 494 bp, Zea Mays
ttttagatgaagatgacaatgagacgctacttatgcacaacatcacatctgatgatatttacagaaaacaagaaggtgaactaactcagtatcactctgtttttgagctaattcatatcttttttgcaacttcctaatccatttcttttgttagaaacaatcatttcatggagagatcgtgaagcagcgacagacttagcactaagctttcaggaagctgcaggatgctcctacatatggtgattgaagcaagagctgtggtgcagttaccatgtttttgttcaattactctttttggtttatttgtgttctttgttggtgctttgcagggaacatatatgtgaaattcagagaaaccttcagttcagtaaccttggtggtgagtttttaaaaatcagctgtgactgtttattcaaccacacatttgcatgcagcatgctcttctcattttaacgatgcctgcagctccggaagttggtcgtcgtcaatcatca

SEQ ID NO: 195538 - DNA, 286 bp, Zea Mays
atgagatcatccttcacctgccatggggcggtcagagtaccctctctgatctgattgcagaggcgctgaaattctggatcagaggcgcacactcttgtcgtagatcctcatataactggaaggtggggctggacactgcgttgagcaggccgtctgctgtgttgcgacgagacagggcgtctgcaactgtgtttcactggcctgccctgtattccactgtgcaatcaaatcctaacagtttgctgacccactgatgttgaggtactgtggacagtcgttgatcaag

SEQ ID NO: 195539 - DNA, 362 bp, Zea Mays
gccctcgccaacgcagtggctgcacctccacgcaggaatctgggaacctgcttggcgtggtgaagcttcggcccgcactggattgggcgaaccttaccccggcggtgagcaattcctcgccgtggtactcctccgccgcggcagccgcagtatcacgtggtccgtcttcgccatagctccagcccctcggtatgaccttcgaccacctttaccgcatttgtaggatcgtgatgcacctgtccgtggtgaggatcgtgagttatggagtcggattgcctctctccggcgtgaggacgccgtgaagtcaggcggtggcgccgtcgctagctgaggattgggggaaaacaccctggtcgtccaat

SEQ ID NO: 195540 - DNA, 433 bp, Zea Mays
cagcgggagatacatgagctcagcagaaccttctgcgcaacagcagtagtcatcgtaccctacaacatgaccgccaggaccctcatacccattagcgtagacgcaccaaccctccgcgtcatcatacccaccggctaacaacaaggacgacggcggccaatacccgaacgacgacgacgacgcgcatgcgccttcgtagtcgtagccatcggtgccgtccgacgacagcgcatcctcgatcctgtccatgctcacaccgccatcgtcgtcggcgaccatcgctaccgcctcaccgccgccgatctctgcctcgagggaccggatgacatggctcagccggcgatcgccatccccatcgccatctagaagaagcaagtcggaggagggcgggtcctgctcctgcatcagctccatgaggaggagcgccccgtcg

SEQ ID NO: 195541 - DNA, 796 bp, Zea Mays
agcacttggtcccaagtcgagagggctatcaacttattagaaagagtacttagctgtgatcctagctgtccagcaatggcggccatatctccaacaccatgagtttgtcatccttacatatcacaaaagtttaacccaactcaacgagcagcgcctccatataccttggcaacataaagttttcaccaagttacttggtctgcaatacaaagttcaataccgtcctggttctgagaatcgtgttgccgatgccttgtctcgttgtgtgcctgctgacatgcattatccatggtggtaccttaatggttattggacgttcaggcaagctatgatcacgacgccgaggctcagtctctcctgtccaaactagcggttgaccctgctgctgtcccaaacttcactctgaaggctggtctgctccggtataagggtcgggtcgtatatggcttggggaggatgaaccattgcagcgcaaaattgtatcagccctacattgctcggcgattggtggtcattccggcgtcccagctacatacagccgtgtcaagagtctcttttcatggacacggatgaagcaatatgtgaagacattcgtgcagcaatgccaagtgtgtttacaggcaaagccggaccggtcagcctacccaggcaaagtacagccacttgaagttccgctttcggcctgacacacggtgtccttggattttgtcgaaggccttcctcgttcgggcaccgcggattgcattttagtggtggttgataaattcactaagtatgctcatttcatcccattgcc

SEQ ID NO: 195542 - DNA, 434 bp, Zea Mays
tttgtcatttggttgcactgatttgtgtaacggtttaataccatctttcaagcaggattttagctccttattacagatctgcaagctaccaactcgagttatttgcatctgtatgttgattaaaagaattactttacaatcttctacatgatgattagattataattcttttgcaatcttttatgtgttaattacaagaactatcttgtgtttatcctccatagtgtcatttggttgacgcacctttaatacgctgttaaggcgagcttcaaaattggaacatgtggattatcagttcataaagaaacatctgtctgaacagtttaatgagtttcactcactttccactgtgaatattgtagatttgatcactttgttactggcgcatgaatgaatgcttgttagctgtgctcgtttctgatctctttctctag

SEQ ID NO: 195543 - DNA, 273 bp, Zea Mays
gaacgccccacactaactaggaggcccgaaccccctcttccccgtgaccggcagcgacgccatcctcttctagtcccgacgatctactcttgatcgggcatagccagcgccacccacctgcaatcccgattgggcattgtcgatgctgcatcaatcaatcctgaccttcatcacgtacggacccatcttcgctgaccactgggagctgccgcctgccagccctagccgttgatcgccttccccatcgcggaccacaaggagtcgccgaccacc

SEQ ID NO: 195544 - DNA, 371 bp, Zea Mays
gtcagggccacccacagtggggtcccagggttccaggacagaacatacttgggccttaatcaggacctaggtgagggtccagagccgacacgtgtctagacctggtctggtgggatccggacatatccacatacactcctgctccccgctcaggcggagacccgatgctgccacatggcatactgcgtgtggcataagccaacgggcggaacctggcatgacgcctctggactacgcgcgccttcgtattcattacggataagatgtatgcctgtccattacactgacaggcggcgtgctcagtccacgatacgtgggccgtgcagttactcacacgttaccatatcgagggcaatgactcaccattactc

SEQ ID NO: 195545 - DNA, 412 bp, Zea Mays
gtccagtgatttgaaaaaaggtttggttaatgctattcaagacctatatgatgttgttcatcatgaagcgttttcggttgatatgaggtctgccgtttatctgtgttccttctaccttatcctcagattttgtgcccttacactttcacttttctaaagccctttgtttataaatgttagtggccacattgaagactgggatcaaattagattagcaagggctgaaggtcgcctcttcaataaactcaagtggccaaatgatcccaaattggtattttctaagtactgaatgcacattttgctattgtgtctttatttagttggtagcctgcatttttctttagtcattagtctgatatgttcttttgtaatctgcccagaaagacttgatcaagagattgtattcacttct

SEQ ID NO: 195546 - DNA, 321 bp, Zea Mays
cataattactcagagaatgaacaaaatattcagggaaaatattgactttctacttgagcgctttgaaaatggagatctttgtggtgttgtggtaagaatgttttacttttgtttaacaatataattgctggtgctgctactttattgttttgggaccactttttttgtcttctcaaattaggaactgcaacaactgctggatattttggagcttacacaccaatcaatatcaagatttcttgaattggattcttactctcttatgcttagcgagatgcaagaaaatctttcgttggtttcttattcaagtcgcatctcttc

SEQ ID NO: 195547 - DNA, 1082 bp, Zea Mays
gtttggagaacagcacagcaaacagaactatgtatggagctggaccactttcatcttctgtagtaacaatgacaaacgacacagagccagagaaagtctggcactacaaggatccttctgggaatgttcagggtccatttactcttttgcaactttcaaattggacaagttacttcccacgtgatctgagagtatggcttacatttgagagtgaagagagatcattgctgttgactgaagtgctttcaaaacagcagaaagattttactcaggctgcatcacatacaagtagcaaggcaacactggttggcactggacatacaaggaacaaccctagtgtggatcagaccaatgctttctcccctgttggtcatagcgtggttagttcttctggaatacctgttcagtataataagtattctgttccagaaagggaaagtgtgtactctccagatgatagcttgtcgctgtcaactagttcggttccaccaaaggatgcttatactgtgaatagccaagcacactgccagaataagcattctgttttcattcaatctcctgggagttcatatgggcacacagacttgaaccatgatggaatacagggaggatgctctggtgaatcaaaccaccatcacagcagtagagccctatggagtcctacagtggcacatgtgagttgtggacgtggtaacgtggaatctcatcagaatcagcatgtttcctggtcagaaagtcaacatgaatctaaaaatggttcacaaggaggatttgttaaagatctgaattcaaggcaggatctatcgaaaaacctacctgctcaacgtattgggaaagatgtttccagtcctttgtttgcttggagtccggccgagtcgaggacagcttcaagtcaacaggaagggtcttgcttaagttcaacaactaacccaagctttctcgatgaacttcattcttctattgcttctgcaaagcctaagagctgcgctccagcaacccccattgaagacagaggttctagttcaccatcagatatgctaagtcatgaagaaagagttccaatctgcagtccacaatcagcc

SEQ ID NO: 195548 - DNA, 547 bp, Zea Mays
cgtgagaagactcctgggaagggacctggtacttatgggggatgctgggcattggcagtaactcctggtagttggaaccccttgatgactgcttggttggttcagtgttgacgagcgtagcattgaatggtccctggtatcctttttggctgcaagatctcgcccggtgcccggatttcaaacagtgccaacagcgcgtaggggccgagcagcggaacgcgagatgtgcagatgagaggcagttgtagcatttacccctgagcttcaatttgaaaagtctagagcctttcttgtccgattgaaggttccgtggagcaccaccaggatcctgcaagatcttgcgccaccaatgccgcggccggacaacagaccatcccccctcgttgacattgggagctgcaggggatggctgactgcacacacgcgacgcggcaggggcccctctagcacggcgatgggacaacacacagccagaatccaaagccccctccgccttgtaggggaaatggtagcccggcgagtagactgccacactgtcggatgaatc

SEQ ID NO: 195549 - DNA, 1056 bp, Zea Mays
attaggcgtgtgtatcgatctccatgcgcaagcgcaacgccgtataaagattgagcaatgctcagcagcatcggccggcactaaccacatatcaaataatgcagcaggcgcgcgatcgatatgattctcctctacttttgcatgcatgcacgcacatttggtcaagtacgcacatacgtagtagtaggtgcacgcttttggtgccgtcgcccatccatgcatgcactgcacacgcaccaatgtctccccttctttaatttatacgtatacatactattaactatatctctagctttgagctaaacaaaattcagtttacaacgaattttgtaggattaagatctgccctatttggaaagcaaaaaaactgaaccaaaatgcagattcttcgcatggacctttttacaacaaagagtattgactgtcgataaccttcagaagaggggatggccccgcaacccgattaagatctgccctatttggaaagctaaatttatctgcaacccgattaagatctgcaggaggcgcacgatcgatatgattctcctctacttttgcatgcatgcacgcacatttgctcaagtacgtacgtacgtagtaggcgtgcacgcgtttggtgtcgtcgcccatccaggcatgcacacacaccaatgtccacttctttaatttatacatatacatactattaactatatatatatatatatattaagagccctgagctctatataactgtggagagtcccgatcatcaacaccaacaaatctgttcgagcctacgtccgctcactatttatgccagcgaaccaatgtagcgtaaacagaaaaccaatttagcgtaaacagagtaactccctcgaccccacgttctagaaaaagcggattaggcccactttccacacggtcaaccactactgccatagtcaaaacatgtttacgctatttcaatccactgtttatgcaacaatatcgatttagcgtaaatacctcatccagacccatgttccagaaatacccgtttaggcccactttccacgcggtcaaacagttctatac

SEQ ID NO: 195550 - DNA, 1238 bp, Zea Mays
tcgatatcgaaggcgacgagaccgcatgaggcacgatcggaggtgatggggccgcatgtggcgcgatcggtgtcggtgggaccgcgggtaaagaaatagaggggacaatgatagggttggcatccaggagggtgttgaggtcgataggtggggaagaaccggtgaggtgaaagagggtttagagtttagggtcgattggtgggatgactgagcaacttggacggaagactgttgaggaggtaggtgacagtgttcagtgtctcaacccagtggcgggcgagaaaagcttggaagaggcggtaacacaacatgttagtggtggtgcgaatctgcactcagcccgtccgttctaagttctgaggggaggtgtgaggacactggacacaacatctgcagttgtatgctgtgggagagaaagaacgtatgagatgtggagttatcaaactcccacccgtcatcacacacactcagaatgatgcgatcgaaccgagtcgacagccacacaaagaagtgagatagattggtgaaggtgtcactgtcagacttatagcagaggggaaaggctcataggtagtgagagaagtcgtcaaggatgattagatagtacttataaccgaagatgctagggattgaggatgtccaaaggtcatagtggacgaggtcgaagggggagtggtgcgagacattgaagaagggaagggtaagcgagtgtgatggccaagctgacaggcatggcaaagcaatgcatcagtgtcgtgggggctggtgatggccgaggtgcctaggagtctagagaggatgttgtgactagggtggccaagacgacggtgccaagtggaggtggaggcagtagcaccgagagcgtagggtgtgggaacacatgataagggagatggggcatgaaagcaaataggatatatggtgcgggagatgtcgcattgggcgaccacaacacgagtggtaagatcccgtatggtgagcccacaaggatcgaactccatataacaatggttgtcagtggtgaagcgacagattgagagaaggttctgtatgatgttggggagcaaggatgttgttgaggtacaagggacgaggaaggaccatgtcacctactgagatgacaggtataatcgacccattgccgacaatgatggaagaagggaaggtggggttgtggggatggggtaaagagacattattagggcaggagtggtgtggtacgaggcgcctaagtcagc

SEQ ID NO: 195551 - DNA, 441 bp, Zea Mays
gtccatagacacaagtcagccaccaagactgcccattagttctctggaattgcaaggagatactataagaatccactctgttcagccctgtcacctttatatgctttttccaggaaatcagaattccccccctagcaccctcggacggcagcattatatactgatcaaaatctgttcccaaaatagccagcacctttcctctgttaatttcctgcattttagtttcctgaagacagataacgtctgcgccacaagcatcaatgcaagttctaacagaacattgcctagatgtagaattgagaccccttacattccagctcaagattttttttggatccattacaaaactcttacatcagcgacctctacatgacaactcaacaggcactaatgccaacactaatgctgcccaccttgagatcatctggtaccacccatcca

SEQ ID NO: 195552 - DNA, 833 bp, Zea Mays
ttaagaatgtcaatggtatcctgaagccatccaggtacataccattgattatgtcaccatccaaatccaatccaactgctcatatgcaaccaaaagtggttaacattttcttaatatacattgcttatccttttattttatttatttatttgtgaaaaaaggcatgaaagaagtattttatacccactaagacgccatgtatctttcccatctcctcctgctcctttattttgtactgtcagtcagaggtatcatggcaatcaatcatcctagaagaaaatcctatccatgaattttattgctttgtattcatgtaatttgataactacgtatatcgctttatcgcactcttaaaagcagagcaagtactaagctagtttccccctccctcttttaggatgacgcttcttcttgggcctccatcctcagggaagagcacactaatgcgagcactcgctggcaaacttgacaaaaatctcaaggtttaacttaaatccaccatcctgtgccactctatcagtttggcctatgcgtttatgtcacatgctaaatacttctaccacaaagcaggtctctggcagcattacgtattgtggccatccaatttcagaattctatcctgagaggactagcgcgtatgttggtcaatatgatctccacaatgccgagatgactgtaagggagacacttgatttctctaggcggtgcctaggcattggtgccagatatgagatgattacagaacttgctagaagggagcgggatgccggcattaagccagatcctgagattgatgctttcatgaaagctactgcagtacaaggacaggagac

SEQ ID NO: 195553 - DNA, 839 bp, Zea Mays
gtagacgcatatacagagagaggttggaaacgagtgatcgtgatgctgacatggaacaaagacgggcaagtgtctatgctttgatatatgaatgagatgtttggaacttcctgttggcccatgttataaccatgtcgaattttttgcaggcatttcagaagttaatttatgtgtccaatcttgtctttggagatgcatctgtattcctacttccttggaaacgtctgtttggggtgactgattctcaggtaattaattataaaaatgcttgttaattttttgcatgccttctctcagttttatgctttgatctcacagagttatttgttctgtattttgaagttcagttcgttttttctggcaacgttgctctttgcatagttgttatgctgcttttgatgcagttgatatttcgaagagtttggacaaatgttcatcaagtgttaatgccactactcacagtccaaataagaatgtctttctttacttaccatggtattaagtatcatttgacattatgtttctagattgacattgctatgagggaaaatgccaagaatttatactcggtgcagctcaagtctattggaagaggtaatgctagaacacagttttgtttaggtgttagttcaattataaagtcatagtgtcatattattcataagttttgctttatcaagtaaatcatatagtgtgctgtaaagacagcaatatcaattttgttgttgttatatttattgtttgatatatctcttattgcatctcaagaacattctgaaatcacaaaatgctctcggtttaggtcttgacataggcacactcattgaagtaaggagagc

SEQ ID NO: 195554 - DNA, 484 bp, Zea Mays
attaaatctggaagtatatcttgcccgcaaggaaagaatagaagaaaatacaggcggagagaggcgaggaaggaagaaatcgacgaggggattggattggactgcgactgttgttgattctctcttgcacgcggcggtcctcctccagagtccagacccaatcccaaatccctaatcctacagagggatcccaaatccggcgtccagtccagtccaacctgtagtagatatccccgccggcttggccgtccgtccttgccccaattccgattgaccggagaggagttggatcagggagcattggaatggccgccgccgcataggatggagctggattcctccggccgctgctcggttgctcccgtgaatgctgtgatcgtcgcgattggaggtggaggcgaaggttctcttcagtaagagcttcaagagctgtgatctagctgattgggtatggaggagagtggcggcagctgcggaaagcggg

SEQ ID NO: 195555 - DNA, 559 bp, Zea Mays
gtcagactctagccggccaaatcgcaaccagtcctaagtgaacaccatcaccaatcagcagcagactggagacaccgctcgttgccacgagtaccccatgcaacagggctgcggtagcaacactagaggtagaggcaaaggtcgagtcccgcaacagcgaaggttttactgtcttttccatggcgaagacttggcacatcccaccagggattgccctaaaaccatggccaccaaagataggatggccagaaatcaaccgactgacaaccaactagttgtcgcccactcctaccacccccaacaatatcactagtgccaattccacaatgaataataccatccccaccagcaaaaccatatgtaccagcaacaccaataaattcaacccctacttccaccgccaccacatcaccaaaatccaccaccacccccaccagcacccaaacaagaagacttcgccgaccaacccttctgaggggtcattcatatgattaccggtggatcgagcgcagactttgacacaaaacgatagaagaaagatcactaccgaagagtcaat

SEQ ID NO: 195556 - DNA, 331 bp, Zea Mays
gctggcttctgcaccgtaagtcttcagtgcaaatattttgcaattttgttcaatataaatttgaggcgtaccactaaggggttggtatattttgcagcttattgcgtttgttatcagtttgaggatgcctggtgctcgatctagtacgtgcaagaagaccgcagttcagcatgagcaagcatgacagaatatagtatagtgccacctactcttttttattctgcccaagtgcatagacagaaaaggacaggatgggaaaaaagtgacttcgagcaaaaggaaaaggtatagtgacaggaagtgctggagaaacatgctcgatttcgtatgt

SEQ ID NO: 195557 - DNA, 411 bp, Zea Mays
gtgaacccgcaccctccagcctcccgtgctccactggcgcccttctggaaccctcagccctcctaatctcagccgaagttattaacctctttttttcttatataggccaaattagttcccctcccgcgattccaaggctttgctcttcgatctcagccgcgccgtgttcttcgcggcgagttcggagcgttggtgcccaatccgtcgaggttgtgagttgcttccgctgctgctactgccgccgccaccgctggtgttagtgatctgatctggtgggcggattgcggcgcggaggtggaattgttttggctctggggaaagctagctatgcggattgaggcgtcgccggattgagcatgaggggcggggctgctggcggtggcggtggtaagcgtggcgcggatgatggga

SEQ ID NO: 195558 - DNA, 341 bp, Zea Mays
ggatgttgtacgttgtttggtggactcagtcaaagctgatgttgtttgcctccaggaaacaaaaatgtcagttttttctcgcttgtttgtgttccgtttgcttgggtccgagtttcagaattttgttttcacaccttcagttggggctagtggagggattctagtggcttggaagaataatatcagctcatgtggctctaggattgatgatcattgtgtctcggtgaatcttagccttgagacttggtcatcttggtggttgtcatgtgtctatgcccctcaagggaatcatgagaaaattcagttcttacaagacctcagattgattaggacccactgtt

SEQ ID NO: 195559 - DNA, 557 bp, Zea Mays
agaagcatggcctttatctgatcacttattttttgtttttcttcgcgtagagctcctgtaccttcaggcacattcattttcccttttcctggctgcagaggtaagcagccacattcagatttgacaagtggaggtctacccaaacgacctgttttgggaggactaccagaagtatgcttcaacttagatccagccctgtgtttatgcacagatttcttacgtttccgtcgattctttttcacaacaacaacttcttcagaatcactggagtcctcttgttttggcacggcaagacgggcagcaccacgacgacgtccgctacgagttctcctgtaggaagtatcgctgctgatgtcatcatcgtcagattgatcctgtgtctgcttgatagcattttgattagactggttagaagacctgcttgacaaatatgtttgattctgatgctgccgttccctcaaaacacgtttattgcccaaatcacagttatttccaataagcttctctccagaagacttatcaggttgatctatctcaggatcagaagacgtatttct

SEQ ID NO: 195560 - DNA, 618 bp, Zea Mays
atggaagaaccatgacagatttcatgcatgcaaggggacttaatatgtcctctttaggcagggtggtgggtctaaattttatgcctatatgtttttcctggtatgtttggataagcttgcataataatctgacattgtttttttttaaattgatcaggtagagctagcagagaagctcccacacatccagtctatatgcattcatgaaatggttattagatcctttaagcacatcatccgagctgttattgctgctgttgatgacatgcaaaatatgtctgcagctatagctgaaactctaaacatattactaggatctcccagacttgaaaatggtgctgacacggatgcccatattgacaataatttgcgactgaaatgggtagagagcttcctttcaaaaagattctgctggaaactgaaagatgaatttgcacatttacggaaatgtatcattctgagagggctttgcagcaaggtatgggtagtgaagtgaattatgggaacattcatagtttctattccaaacaggcatagtgatactgatatggtttgttgctcaggttggactggagttagctgcaagagattatgatatgaatagccctaacccattcg

SEQ ID NO: 195561 - DNA, 1671 bp, Zea Mays
gggatgctgatggaagatcagatgaagaagttgcagatgaatattgggcaaatcatattgccagaaataattcaatcattgttgatgtatgccaggttagttctaaacctgtgaatcacttgtcttactgttgtgatgctttggctttagataaatgctaatagccattgcaatttgggaccatcatgtttctcttgcttggtattgtaagcaccgctagcagtttcaggcatttactgtatgtaatgtaaagacccttctatgatcttcctgttgtgattagatgtgcagatgtgcactgttttcaagtcgtccgactaatcacgattagtcgggcaggtcgcctggtagtggccgatcagccggacgactcgactagagtatcacgtccaggtcgtccgactagtcgtcgattaggggcgattagtgtccgactagatggtaaatcgatcaggatttgtccaggcggctagggttttctagtgggctactgggcttctattttttcggcccatctacagtagtataaaggcaatgcgccaccaccccttgtcaccccttgaaacttttcctctcctctgctgagtccagaacacaggctgcggctctagaacaccagcagcagctccagaacactggcgacgtctccaaaacactagcgacgagatgagctcctcatctcaaggttccccccttctccccctttcctacctcattacacatggagctgaatatatgttatttttatgctgaaggattagctttgttagacgtactccctccctccctcccaaaatagatggccttataacattcaattttgttccaaagtacttgaccttctcactttccaatgcacctttctctttccccaatatacatttatatttctgctccttgacgggcattttggtcttttggctccagcgttggtttccgtgagagtttctaaaatgacatctaaatatgggacggagggagtatattttatctgtatatatgtactttccagtgtagggtgtttcttacgatgtgtataaactcttgtgtatcttccctacacatactacgatacattggaggtgcatacttgtcacaggacacataaatctgcatgttgcatgcaatttgacatattttgtcttatgatttagttctcttttcctaattattctaagacaaatgttttactgacatttccttttattatgtttttccaggggcagtacaagtccactttggtttgcccagtctgtgggaaggtttcagtgacttttgacccgttcatgtatctttccttgcccttacaatttgcctcaacccggagcgtgactgccgtggtgttttcttgtgatggtagtgttccaccaacaccattcactgtgaatgtaccaaaacaaggtaggtgcagagatctattacaagcccttggtgctgcatgctcacttaaaaatggggagaaacttctaattgctgaggttggtcattaatgctcacttgagttaatgtactggttggcaggtttgacgattgtgtgtccttaaacattttggttgaatttatctacagatacggaatcataagatctaccgttttattgatgatccagtgcttcagctgtctacaataagtgatgatgatcatctggcagtttataagctcccaaagttg

SEQ ID NO: 195562 - DNA, 497 bp, Zea Mays
ggtcctattgggttgtctccgcgcccaaggcccccaacttctatcgctgggacctcctcgcctcgtcctcctgccccctctgaccctccttccaactatggtgggggcatccatcattggcacaagcgtggtggtggaggtcatgctagaggcagaggtggtggtgctggccagggtggtgcaccctggtcgtccctctagaacccatggaccggccaaatcactgtggcctagcctgtccataggtggcccgctgtcgcgtccattgtcgactcagcatgcgctccttaccacttcatcctttggtggtccaagttgtcttcttgagccctcgccttcggctccaccagcactgccccaggcaccgcttctccctcactcgctgctgacgccccacatggctccatcctggatgtcgtggtctgaggcgtgggaccaagtgtctcttgctaactcgtttagcacgatgaccttgacccctcctacagccatcactg

SEQ ID NO: 195563 - DNA, 561 bp, Zea Mays
gtgcattgttgatctcatgatagatcctggtactcttatttcatcagatggtgctgacctgggtagagaattggaagacagcttagtcgtagataatcaacatgttaacaaagatgacactagcactcagttactttcctctttcagtgaagcttcaagttccatgcacagttcatttgaaaatggatcgcttgaaaaaggatttatttgcaatgctgggcattttggtccatatgaagcaacaactgcccatagtgacaatgatgtgcttgggtctggggtatcaagttcatttgatgagctatcggtcagcacatatgcatgtgaaaacatacctattattcatgaatctaatacagatcataccatgactgaaaaaagcaaagataagtcgatcacatcaaataattcgtcatcatgttcgcctccatcttctgagataggcagtactcctgctgtacgaaggaaaaaggtcaaagacgtctcggagtatatgattagtgctgcaaaagagaaccctcagatagcagaaaggatccatgctgtgttacttgaaagtgg

SEQ ID NO: 195564 - DNA, 802 bp, Zea Mays
ctgtgttcgtccacttgcaaacaaaccctcaaatagcgatcggattaagtcggaaacgccttaagtcgacacaacttgcatacctgacttagggtgattactatactctgctaacggagcaatcagcttaaatcggaaacgccttaagtcggtgcgacatgctcacgcatacctgacttagggtgattactataccctactaacggagcaatcggcttaagtcggaaacgccttaagtcggtgcgacatgctcacgcatacctgacttagggtgattactataccctgctaacggagcaatcgacttaagttggaaacgccttaagtcggtgcgacatgctcacgcatacctgacttaggatgattactacaccctgctaacggagcaatcagcttaagtcagaaacgccttaagtcggtgcgacatgctcactcatacctgacttaggatgattactataccctgctaacggagcaatcggctttaagtccaaaacgccttaagtcggtgcgacatgctcacgcatacctgacttagggtgattactataccctgctaacgcaacaatcggcttaagtcgaaaacgtcttaagttggagcaacatgatcaattagacaacaaagagctcagggagcataccataccctactcatactcaaagggagaataactcaacgttcaataaaccgctgaaaaatatcgtcttaatgaaaaatgctttctgttttaacaaatcaatgtttgctttcactctccggttactgtgcaggagcatcctcgcgaggaaccttatctacagg

SEQ ID NO: 195565 - DNA, 443 bp, Zea Mays
cctccgccgtggcagtacacccagatgtggacatagctcgtagcggcgaaactctcggtgagaacctccctatcctgtccgtctcgaccctatgcgcattttgtacacacccgtatgggttttggcctgcgtttgcgtcgtgttgcctgctcgtcggacctctccaccgttgaagtgcggcggtgttgccgtgttctagggcgggattgggagaaacgatggtggccattgatcttgcgctgaacgactcagattagatgcaccagcaacccttcgctcgggcgaatcgaaccgtagatcgtaggatggatggtccttacggggtcgctggtattttagatcatggtcgcagatctccgatctgacggtttggtttactcgcaggtttggtatgcgcctgatccaatcggcgccgtccgtttctaatcggatggccgtgctcg

SEQ ID NO: 195566 - DNA, 377 bp, Zea Mays
tcgccgtgtctctctctctccttcagctttcacggcgctcctcctctgtctcccatggcgcgcgcctgcttccctcataggggcggagctacatagaaattagggggtgcacatgcatccacgaaaatttggaaatctaatggtttggaccaaattttcaccatatatgcaccacctgtaaattgttatcatgcaccctcaagacatatgcaccctcccctaatttactctagcttcgccactgttccctcatggcactcgaccatcatctcccatggccgccatgccctggtctaagctccctgctcttctctatttcgagctccctccaacagcgccgtcgtacctgcgtccacgaatccaaagccatctttaac

SEQ ID NO: 195567 - DNA, 676 bp, Zea Mays
cgcgaaggaagcttctaggcgccggggaacctgccgggcggatctcggagacctcctgtaccacgcggaggaaggattcggcctggcgtcaccgcgtgctgtcatcgaactgctcactccctcaacgacgccgtcggccaagtccactccatcgacgggagactggggtcccgcacggtgctgtgtgctcggttctctgctgctcgaccaccggtaaatttccgtccatgttgttcttgctcctcctctcgtcgtagtgcgtgcgctggggttgttgcttgtcggcgcttaagccttcgcggcagcggaagcaccaccgtcctgccgagctgagggttgaagatatgtccgtggccgtcgatcgttaagtgaacggatcggacgagatctcgtccggatgatgtctggaccgttgatgtggatagacggtcgggattaaaggtcacgtacccccttcgctttttggtctagtgacgttaagatcagatcggagggattagattgaatcacgccttcatcaaattttggccatagatctcgaagcgtgtggccgtgggtgcgtgccggttgggataaccggggatttaatcccaatcgttgaattatgatcccatggccctgagcgcaccgtgaccctttgatccaggacattttgcaaaagagaccctgataaaca

SEQ ID NO: 195568 - DNA, 337 bp, Zea Mays
tatcgccttgctttgaggttggtaagggagacagagaaatttctgctaaatagcaacacacatgatgatacacaaccaaggatcaagtctcgtgttcctaaagtaaataaaccaaatattgtgactggccaaaccatggtgggtgcagctactggaaatggaaatgatggtctcaaaggaccagaggtactggctcaacttataataaatcttagatacacaattacacatgttttcttgtaagctttgtggaaattagaattgttactcgatatgattttccttaaatgggttgttttgcaatatgcaggctacagcagtcacgcaagtaccacaa

SEQ ID NO: 195569 - DNA, 523 bp, Zea Mays
tgacagttctcatctgatgtgaacccttcttcgtgatcactacaaacgtactagtcactcatcttgttgtcattcgttagaagcactccttacgacgaggtgattctacagttgatgagttctacagtcatatgtttgccatctggtgttaagcttgatactcttagtccacaaatctctatcactactcctataaagcaccagtttcgatggtcgtcctgcatcacgcacgaagcgcataagtttgttcccctccacccgataagttgattcccctcccacgcttctcgcctaacaaaccagactagtgtaaccaaccatgcaaccaccacgagcgcttcctcctcatcgttcccgtccaccgcttctcgcctaagcctttatctattgcttgattgcatgtgtaaccaaccatgcaaccatcacgagcacttcctcctcgttgttgccatagtatattaacccccaactttacatctcttttcctgtctccgcctgcctcaccaagattctttcacaccgc

SEQ ID NO: 195570 - DNA, 1166 bp, Zea Mays
ggtttcaagtggcttcaacacatcggccttgcaccaaaggactttggatgtggagtgcgcctttgaagagaactggtctggatggaactgaatacagtcttgtgttgttggatactgaaggaattgatgcttatgatcaaaccgtatgtattagtggcttacctttgaattaatggcctacttttgcaattggttccacacctttcctggcgattttatttgtttttttgtcgtactacgtatatttgtaatttttgaaatgttgtgtcatatgtactttttccctcttggcaggggacctatagcatccaaatattttccttggctgttttgctgtcgagcatgttcatctacaaccaggtacatttctaaatgaacgaattagtcacatttggaagtttgaataaggagggtattgtagactacttagggtgcttcagtttttttgtctgaaggacgctaacctacgagcgtgctgctatttcttctagatgggaggtatagatgaatctgcgttggatcgtctctcgctggtcacagagatgacaaagcacatacgtgtccgggcctcaggtggaaggtccactgcatccgaacttgggcagttctcgcctgtctttgtttggttgttgcgagtaatatatttcatcccttttctcctatactaattatgtatactgaacgttgaacgctttgactgttccctagctgcacatcatcttataaaccgtcaaacataaacctcaggccctgttatgcatcagacacctttggtgtgcgacgagccgatgacaccgtgcttcctttactacaggacttttatctggatttggcagaagacaacagaaaaattactccacgggattacctagagctagcattgaggcctgttcaaggtggaggaagggacatatctgcaaagaatgcggtatggtagattttcatgggtgaacgtagctttgtacttgtgcttggtaactagacgtatggactatacttatacttcttttgttgttctggaagatacgggactccatccgtgcactttttccggacagggaatgttttacacttgtgcgacctgtgaacaatgagaaagatctccaacgtcttgatcaacttcctgtaagtatttcttcctttgaactacagctgctatttgtggc

SEQ ID NO: 195571 - DNA, 303 bp, Zea Mays
ctgcattttgtcatcatgaatttatagtctccatgtgaagttttttggacatttgttgttttggtgtaattgagcaggtctgtgaattgaagtagcttggaagagcggtgttatgcactgggatgggagacaatgtcctaaaattcagggtggggttgttaggataaactgcattatggattctggcaacagttcgtgctctagaacacgaagtgggcttgtaaggaaaaaagacacatttgctctcagtagatcttcatgttcaagaactcgaagtggacttctaagagtaaagagctctgt

SEQ ID NO: 195572 - DNA, 513 bp, Zea Mays
agaaaaagtaagacgaacatggcggcctaactggcacacatgacaaagatgctcatcatgtgatctagtacatgggatagtggcactacgattaagctgcatcaaggcatcgcgtctggggtgaccaaggcgacgatgccaggtggtagaagacgtggtggcagcaaaaacagcagctgtgtcaggtgacgaagacgaagaagatgtggcgtgcggaagccgaagggtgtagagggggccggtgctatcacatctaaggagggggcaccgagttgccaagtcctttacagtaagaccagaagagtcaaactcgacagaacaagaattatcggcaataaactgacgaatagaaagaagattatggaccaaagaaggagcgacaagaacatcgggaacacgaaaagagccgggagggccagcggcacccacagatgtgacaggaagacatgagccattcgccaccatgatggacaaagggagagaggaaggagggcaaacagaggtgagtatacc

SEQ ID NO: 195573 - DNA, 381 bp, Zea Mays
ggttgaaaattttgttttgcgctagtgtagcctcctcgtaatccaacagctttattatagacacggcccgacccgctccccacacggcgaccaacaggcgtgaccctacaacatgtgccggattgtacatgggcctccttttatatcgaggaaggtcgagacgtagggtcttcgaagtcttggtcgtccgtgccccggagccttagagagtcttcgcttcggctcgtcgagacgaagggagcgcttgagccttcgcttgggcgtcgttctcggtctcagctcgcggggccttcagtctcgtatgtgttgatgtgggagtcgtcgagcgagggggacgtgttcgccttcgtcccaacattttccctcctaggggccagttcg

SEQ ID NO: 195574 - DNA, 840 bp, Zea Mays
cactgcatccactttagatggatccatagcgaccccctgtgctgatacaatatgtccaatatatgacactgccggttcaccgaaggagcatttggaacgcttgagaaccagcttgttgtcactcagtagctggaacacctgctttacatgcctcaggtggtctgtccaggacgaactatatatcacgatgtcgtcgaagaaaaccagtgtgaactttcggatgaagggcttcaagatgtcattcatgagagcttggaaagtggatggtgcattggtaaggccgaatggcattacaagaaactcgaaatgaccacaatgtgttcggaaagctgtcttgtggatgtcattgggatgcattcgaacttgatgatatccactgcgaagatcaagcttggtgaagaagcatgaaccccgtagctcatctagaagttcatcaaccactgggattggaaacttgtcttttactgtttttgcattcaactcacgatagtctatacaaaaccgccatgtattgtctgccttctttaccaacaagacgggcgatgaaaatgctgatgtgcactcacgaatgatcccctgctgcaacatttggtcacactgcctctcgatttcatccttcagaagttgggggtatctgtacggttgcactgccaccggttctgttccagacagtaaccgaatatgatgatcatggcgacgtgaaggcggcagaccgtgtggttcttcaaacaaagcaacaaatgattgtagaagttcctccatgcattctcggcttttgtcaatggctgtgctgtagagaatcgggtcccccatgcctgtcaagcggatcagccgtccttg

SEQ ID NO: 195575 - DNA, 283 bp, Zea Mays
atttcgtcgctacacttttcgtctttcagttgaattagtcagcttggctttgcattcggttcttggtggctccccgacgggtttccatgttgttgaagaatcaaaccgacattttcgtttttccgtggccactaagaaagttggcttcatggtccttgctcttaaacgcatcatctctgcaaactttgacgtctattttgatctttggggaaatggaagtccaaactggagaaaggaatatgctctttggtgcagagaggaggatgaaaaatggacagttgtt

SEQ ID NO: 195576 - DNA, 334 bp, Zea Mays
tgccttcagatggattggtgcaacaattgtgtggaagatggtcagttgtgcgtgctaattccttctcactttcttgcaaaagatggtcacgcctgatgaattcctctggaagcacccttgctcagttgttagaagttgatctggttggcatccctgtacatgcctgggaagtacccaccgtggagagtttgctcagcccttttgcatggattgagagtgtgcatgaagatacattgcaactaagagatctcagcagcttccgttgttctgtttggtgtctggaccctatcagcatacctcctgctagagatctttgggttgttgaacctctgca

SEQ ID NO: 195577 - DNA, 449 bp, Zea Mays
agagaacggagccgctctaatttaggaatattccctcaagatgttgcatctctagtcctaaaaaactaccggacccgagcgctcacgatcgaaggctcctctccccgtccctgtatgctcgtcctcttcctctgcgctcttgctcctagcacttcctcgtgtttgtccctggccatggcgcccgtgacctggcagtcgttctcctgcgccccgctcaccggtggccgagcacgcgacccgtgcgtcgtctacactgctccatttgctgaccttgcttctaatccccatgtgagcaagtgggcaagtccctgtgctcgctcatggccttggccgtttgaagccaaaaagtagcatgtgaagtgtggtcttgaatctgtacccatgctcctaatctgaaattagcttcaacttctacttgttcactctagaagcaaacaaaaaacagagtg

SEQ ID NO: 195578 - DNA, 612 bp, Zea Mays
cattccatcagcaatcctttattcaccatggacaaggctttggatgtgctcctccatctaattgttaccttcctcagtttggcaacatgagaaatgtgcaagaattatctcagcagtatcctagaagcggtgatgaacataagagaactatcaagataacacatccagagacacacgaagaactgatgctagatagacatgggcattcctttataaatgttcctgcttctgggcagatgcctttaaacaatataaaccagctacctcactctgttcaaacattttctccacttcagaaagtgtattatcctagaccaggaacgtacaattcagcacatgtctatcttcccaactccactgatgtccctcttgcaagtaggcaattttcctccaaaattcaaccttcgatgcatggttttgattccactaatagcaaccagccatttacttccatcagacctcctatgccgatatctcggcttgatgctacttccgggccattaacaaatttgcatactgcttccgaaatctcaaatttcaaagggatgtttccatcaagcctacctgctccagttcatgttgagctaaagccgcctattacactccctgctg

SEQ ID NO: 195579 - DNA, 496 bp, Zea Mays
gccggtaagccagaagccacggagacagtccgtggagcggcatgacttcatccgtgaggaggtccggaagctgttgcacgccggtttcattgaagaggttcatcaccccgtgtggctggccaacccagtcatcgtgccaaaggcaaacagaaagcttcgaatgtgcatcgactacaccagcctgaataaggcatgtcccaaggacccgtatccactgccacgtatagatcagatcgtggactctacctcagggtgcgaccttttgtccttcttggacgcctactccggtttccatcaaatccggatgtctagggaggataggaagcatactgcttttgtgacggtggatgggctgtactgttatgttgtaatgccctacgatctaaaaaacgccttgccaacatttgttcgggcgatgagtaagaccttcggggacctgattcgggacaaggtggagatctacgtcgatgacatcatggtcaagactagagagggg

SEQ ID NO: 195580 - DNA, 693 bp, Zea Mays
gtcgggacgaagacaccgcagaaattaacagtatatctgcaccacagtttcagttgtttgacactcttcgcactgaggccaccactgacccacagatcctagatttgtgtgccaccatagcagctggaacagcaaatcctgggtggacatacgtggatggtctgctgctttttcaggggaaggtcttcattcctgacgcctcttcagtatgggcagaaatcttggcagcagcatatgactatggtcacgaaggcattgagaagactttgcatcgatgcagagcatccttctacagccctcgtgccttacgaagggtcagagaattgtgcaagcttgctacacttgttaacgaaataaaactgagcatctacacccagcaggcctgcttcagcccctgtcggtgccatcggaggtatggagtgacatctccatggactttgttgaagaattccctaaggtcggcggaagactgtggtattgacaatggtggacaggttctctaagttcgctcactttattcctcttggccatccatatatcgtagtgtctgtggcccgggcattttttgaagggattgtgcgccttcatggtattccttgttcagttgtgagtgatagagacacagttttcactagtgctttctggtccgagctctttcaccttgctggggtcaagctgttacttagttcagcg

SEQ ID NO: 195581 - DNA, 810 bp, Zea Mays
agaaccctgaattttgttgccagaaccactaaacacattgggacctgatgggttccgagtttgtacatcatcttgcctggcatctgaattgaaatgattagaatgatattttgcaggaggtagaccaggatgcccttgactccttatttgtgatggtgaactggaaaccatcacagaaggtcctgagaaactctgctttggctttgcatagccagctcttgggtaacccttcccaaattcattgttcacggaagggttataagccatctttccctcaggaaagttaagttgattctgtgccctattattagaagaatggttatcagataaaatctgataagaatagttagtacccatctgtggagcctgatcagtgcttccattattagatgaggacctgatattaaccagctctgaatatacaccagctccagcaattccagattgagaaatgcttctggctgtctgcttagatggctgtacataatcacttcttatgatctgatgatgactgtgaggatgattgcttctgttactagatgcagcctcctttcctgaagttgaggtagtggcatgaacagctggaactgggtggccagtagctctagtagcatcttgcaaaggaggctgaatcttcacaaatgttctgtgggttgaatgagaattctgctcgatagcacttgcagtctgcctttttggagcataagtctcatcctcagggcatgtgcatgaagctccatctgtgctaccgcaccttgatccattaagatagaaggaccgtgcacactgagttagggtgctgagttgctt

SEQ ID NO: 195582 - DNA, 527 bp, Zea Mays
gccaaattggggctgggtaaagcttcacgggttcaccagggtctacggacacattttggtttgggcagaacaaggcccgaggagtgggtcaacggtgagggggtcacgacggtgttcttcagagcaagcacacgttccggtgaaagcttttggcttaagttcgattggttggtactgggagcaatagggggctaatagcaagcaagaacatgaaacaattgggtatgtactcactcgaggaaggctggccacggagatgttcttcgcggcggagttaagaacaagggagcaagggatttggaggctatgtaggttttccggtgatcttgagtcgggcgcttagtggctgagacgtgggatacggtgaagaagcaatgctcaccctcaatttatagtcaaccggccgcaatcggatgagcttcaccggctgtaatcgcgctggcgagctcacccgcacggcagagccacggcgcaagtccggtggccgccgtttaaccgggtagcgccacctcaacgctttgaagcca

SEQ ID NO: 195583 - DNA, 565 bp, Zea Mays
ggcctctggaaactgatccatttgctctacccatatggaagccagtatttgattcattcaggtcggtaacctgccggggtccaagattatttgtagtctgcaaacccgaggatgaactattatcactgaacttgcccaagccttctgcactaactaatgtaagctcagcatcattccggggttttgtatctgatgccaaaccaaggaaatctatgggcttgttatctgatgtgccatcgtcatctatataatgatcagctggaagttgaaggtcaaaagtgccttgtctgcttcttggaccaacatcacttgatataaatccatttggtgaggactgcacactgccttctctaaggaacttcatggaggactggtttgtatcattatgctctccaatagctttcctgtatgttgtggacattggaggaactggcatctgccacatcatctttgcaccgttttgtggcacttgtgatggtgaatttgtatgtgatgcaactgccaaagttgggtatgaatatacctctttgctttgatgttgtttcatcatatccttctgtatttt

SEQ ID NO: 195584 - DNA, 469 bp, Zea Mays
aaaaagctcgttggtagtagtgatttgtcaagtggctctgaaagaagtaaggaagttgatgatgtttctgtggacactggcagttcaagcactgggagccagtatctggatgagctgtctgatttcctaactcaagcagacatgtggttagggcgtgcagagcttcttcaaagcctgctgggatcaggtattattgcctcgctggatgatatagctgacaaagaatcttcaagtagactacgtgacagattggtcaacgatgaacggtacagcatggctgtatatacttgtagaaagtgcaaggtattgaacttacaatgtgtttgtgattcttaatgcttaataccggatagtaaggcaatttaatgttgtgatcgattttcagattgatgctgtaccagtatgggttgcatggggccatgcattagttcgaatggagcactatgctcaagctcgtgtgaagttcaag

SEQ ID NO: 195585 - DNA, 540 bp, Zea Mays
attgtagtgggcttcactacaggactaaaggtctcaacccttggacgttgagtgaaacccctcataactcatctggacttattcctattcaaagagtcgtctgccctcaacttgtttttgaagatccagttgccggtcacgacattggcaccgaaagagcgtggtactaggccctaggtgtggttggctagcaaggcctcgtactattccgtagcacgatgctaggaggattggacgagcgtgctacgggcagaggatggtagatgcgagagtggtgacgaggaggctgctgagagaaccagccggtccaccgggcggagggcctcgcttgcccgccaggtgaccatcgggtgcacatgacgaggatcgcactcgacgatgacaaggtggtacactgacggctcgtcgcgagagggagagaggtggtcctatgggtgagatcactaggtcaggctcaaaaagggtgtcaagctcggtggttgtggcggacggagtggaagtggtgaaggtgaaatcagactcatcaaatactacctgctg

SEQ ID NO: 195586 - DNA, 401 bp, Zea Mays
tgagggaccaaactctaaaccagctaattgccgaaatggatggttttgactcggacatgaaagttattgccatggctgctactaacaggccaaaagcactggatgttgctctttgtcggcctggtcacttctccaaaaaggtgcggtcttggagacttggtacttttactctaggagtaagtggtctgcaacttgggccatacatgaggagacaatgggatcctggtattacaaatgggcaattggtgatgagccgcgaggagctagctttacagatcgcagtgtttcttggggacaagcaacatttcgtcggggcggtaatgtaacacccggcaccggctcaccacgcgatgggcctcgatgtcccatggcccaactcggagcagcctaaaggcaggacc

SEQ ID NO: 195587 - DNA, 508 bp, Zea Mays
ggtgatcggtgtctgggcggctctgcctccacccatatccccggagatcttctgtcggaaacagcatcccctcctgtggtcaaccagattacgacgcacttggaccaggaggatctccagaacgcgacaccctcggatctccattcaagtaacctggggttggttccttccagaaccctgtggtgtatgcccccgaaggtttattccagaagatgccgggttttacagcagcatccccaagtttcgttggtcgactctcagttagttcagagctctgaaaacgtttcggtggatgtctccatttcgccttcggattcgcccatatcagatcagctcagatcttccttcagatgcagggttaccaagtctacagtgcatatcttgcctgctcctcagactggtagacctggggctgcgaactccactgttgttcctcctcgtcgcagccggcgtattgccggaattggtgtcgagaaccttgccacttccagcgatggtcagacaagat

SEQ ID NO: 195588 - DNA, 336 bp, Zea Mays
ttcagactggactgatagttgttattgtaagaaaactctgccaaagacagacacttgtcccaatccttcccataatgtagtgcacatgctcgcaacatgtcttccaaaatctgatttatcctttctgtctggccatctgtttgaggatggtaggctgagcttcgtatgacatgggtcccaagggattcctgcaattgctcccaaaatcgtgccacaaatggtgctcctctgtccgagactatagtccttggtatcccatgcagacgaactatttggtcaatgtagatctccgcatacttctctgtcctgtgggtggtgtgcactggtaagaaatgc

SEQ ID NO: 195589 - DNA, 519 bp, Zea Mays
gcgggccacccacccatgggacccaggtggaagaccagatgctgggtataagttccaagagtctgtatgggggaaggcaagaaagaaaatacaaaaaaatagtcgtcttcttcctcgtgaaggacggtctaggtgagattgtcctcttgtcgagatcctcacgtcccggtcctcaccacgggtggccacggggtgtgacatgatactaggagatgtaacggagcaaagaattctgagaggagccaaagatgaggataagggatactgaagatcctcgtcgagctggacaaggatctcaagtctgctctgtgcgatttggaagacgtcctggatgttattgaatatcgctgaatcgagaagaaagtcatcggtggtgacaaaaagttgatcagcactactatttgcatctgggcgctgcaagctattggcgattggatcacctactggaagcgtagctcgttcgggcaaaagctgttgcagtgcgcgcgcccagaaccagtatcagaagctcagggacct

SEQ ID NO: 195590 - DNA, 954 bp, Zea Mays
tctacagctcagacataagtcttgccagccagataccttgacatgtttttctcgacgatgcttcggtagtgggtggcgtcaactcctagtgtgtcgctattcttgctcagtcacagatgggcttccatgggcgtgcgacatggatttcacttgagcataccgacatgctctgaattttgttggcatatgctcctttggttgaccatgatgccttccttggactgatggaccttgatgccaatgtagtagctcaaacaatctaggtcacttatcttgaacacttgcttcatttctgccttgaacttagtcaccacttcacggttgctgccagtgactatcatatcattgctgttgacgccgacaaccagccaatcgtctccaacaccccgggtgtacatgccatgctccgccatgcaccgctggaagtcgagccttatcagtgcttggtccagctttatgttccaggaccgtggagcttgacgtagctcgtacaatgccttgtgtaagcgtagtaccttgtcaggatgcttggggtcgatgaagcctggtggttgatcgacgaagacaaactccttgatctccccattgagaaatgcggactttacatacatatgatgcatttcccaactgtaatgaccagcaagatatcaatagcaagtagaagtctcaccgattcaagatgtcaatttcccttgcagtcagactaggtggcgagccgtcgccaagtatgtccttcaatgtgcggtaccttggcactaggttgtcgtcgctggccgcgtcaatcacattgttggttgttggtgcgtcgcgtgttccactgcctgctagactaacggcgatgtcgatgcctcgatggagatcttgccactggcgttgatgcagcgttcgctgcaggtgttccgcgttgacgatcctgccggtgatagagacaccaatcgccctcctccagcgcca

SEQ ID NO: 195591 - DNA, 623 bp, Zea Mays
ctggcacatcagaagcaataacctcagcagtgagtttaaccatgtatatagctgcataacacaaatctgaagaatatctcaaaaaatgagctgttaaactatgcgtttgaaatatgtttataggctaatgttcctgacttgggcgaccaaaaagattttgaacatggagaaaaactgcaaagaataccaaaacagaaatatcaggtaggtaaatactgtttgttgagtttaactcttaattttattgttgtattgatagtttgtttttattatttttgaagccttctcatcaccagcagccccaggacgatcagcagtggctactcgcttgtattccacaacatcttggattttctgggagcaaaccagttgcagctctccttatataccaatgccttctccattggaaatcatttgaagccatgaagacaggtgtcttcgacagcattttgcatgctataaactcagccacagaggttcccgtcacttagtttgattctttattttttaactatttcatcataattctttttaagaaccattgttacggagcgctacttctacttttgtgaaaagaactacatagttttttatcgaatatttcagtaatctgaacatagacc

SEQ ID NO: 195592 - DNA, 473 bp, Zea Mays
gagtccgatggtgaatctgggagttcgtttccttggacggaggagtcctcggatgaaggcttggattattttgttgcgttggatgtggctgcggcagagacttcaccgcatgtggagggtgccggggatcttcctagtgcgagtactgggtgtaggcaacgaagggtggtgggaaaacatagtgtgagcgaattttcgcgaagtggcaggcgccatcgtatggggatggaccgtggccgtctccaagtagaccgggttggtaaacgagaattgttgtcctcaccgactggggcgagcataggcgagggggatctccggaagctttttgagggtgaggaattgaggataatgctgtttaattacagggagatgggtatcatcccgaaggttgagccgatgtagtatgtgatgccctcgtcgtgtgtatgtaattgtaatttgtacggtaatgtggcatgtttgccgtatttgca

SEQ ID NO: 195593 - DNA, 557 bp, Zea Mays
tggtcttcgttggcttgaagaggagagggagacaagccttcttgggaggagggagcgcaagaaggatgtagaccgggatgtggataaccgcaagatcgatcgccgatctgacaatgtttctgcaagggacaacactgatccgcgcacagctccttcatctgaaaggtggaatgatggttccacccgtagcctggggaatgagggtcgacgtgatgcaaaatggtcatcaagatggggccccgatgacaaggagaaggactccaggtcagacaagaaggttgatgcagagaaggatgaaactcatgctgataaacaggccttcacaggaaggctgctgtctgagtccgattcccgtgataaatggaggcctcgtcaccggcaggaaagtcattctgttggaacagctacgtaccgtgctgctccaggctttggatccgagaaaggacgtgttaaggactcgtctaatgttggttttgccgctggaagaggcaggggaaacccaaactcagttgcatccttcaaccggccatcatctgcaggatcaatcggtgctccag

SEQ ID NO: 195594 - DNA, 313 bp, Zea Mays
gagactggtaaggttgttttggcctcccgtgagctatagcacacgttttcatggccgagcgaccatttttatgtccgtgttcctccacacgtgttttgtccccggagcaccttaaagcggttcttggcctcccgcgagctatatcacacatttccgtggccaaacagccagttttatgtatccgacctgccaccttcgttttagaccggggaggccgttatagcaatttttttgccacccgtgagctatagcacacgattttatggaaacctagaccctaatccctatccctaaaccctaaacctaaacatcg

SEQ ID NO: 195595 - DNA, 386 bp, Zea Mays
cgaagtgatagttttagtcctttattcctagtgatgtttttaatcatgatgaatgcatcttcatcttgaattggcaccttggtcactggaggatctaattgtatgctttgcaaatccaagccattgacatgctatttcattgctcatatttgtatccccctatttttgttgtgctatgcaaatttgtgtaagggttggggaactcatggctcatggtggtatttgagccaactttggtgctttaatggcatgcccaccattagacttgtgtcactgtcatcattgatgaactacaactgatgcagctttaaacttgttaagaagttcaaagtaccaatttcattctttgtttggtggataaaaactagcttgaagccttaaatatc

SEQ ID NO: 195596 - DNA, 272 bp, Zea Mays
gcaactaaaagacaaatataaaatttagaaagatcataagacatggtgagtattcaatacaaaaggaggggctgtgccctggccatggcaggttaggatgccaagcatagtgaaccctggcttggccaggttttatgacattaagtgaggaatggtatctatttgatttggttgatatcttctaggttggattttgttaggctaaagattatattggacctgttaaggaccagcatatatatggaggcaaggctcattcagattcaggaaag

SEQ ID NO: 195597 - DNA, 315 bp, Zea Mays
cttctccagatggaaatgaggtagggaaggtacagtgcagagggagaagaatagagatgcttcgtcgtcatcacgaggccatcaaacttgaagagactgcgggtacggtccttcctccaccgcctgcctccctgcgccttcaatttttccataggtatcctgggttgcatgtgtgggtgggtgagggggtcaatttgttgtggtatgttgttttctcataaacaacatcatcgccatgttgtcttatatatttctttgtgtaacttcggtttggtaccacaacagaatagctttgcttattaattatggtggacc

SEQ ID NO: 195598 - DNA, 414 bp, Zea Mays
cttttaacgtgttctggggcacgccggtgaggtcgagatctgtgtggcatcgacaaggaggagttcaacgacattgcgcaggggcttggcgtgggaggtgtagctcgctgcgcacgatgtcgctgtagcagtccggcaacagggaagaagcccgcagtacagggcgcggcaaccaatgcgtaggagcacactcggccgcgaagcttaggttattcatggacaaaatcttaaccaggcggtggtgagtaggcagggacgactcatacttacagagacgacgcgcagcgacagatccacaacaaggctcgggtgtgagaccgatgcacaccgcggtgagcgatttctgttcaccccggagaccttcccgccaagcgatgctttgaagacttgcgacccagctgcggtcgagtcgtg

SEQ ID NO: 195599 - DNA, 326 bp, Zea Mays
tcggacgaagagttaagtgaagatcaataggcgtggcaacagtccgagtatcactaagaccagaacgatcaagaaggtcttgtatgtacttggcctgagaaagataaataccattttgagtctgcaaaacctcaatgcccaagaaataactgagtgcccccaagtcagacatttgaaattccttactcagatacgccttcacatgagcaatatggtctggatcatcgcctgtaatcaacatgtcatcaacatataataatagcaacgtgcgtcctcgtgaagtgacatgaatgaacaatgcaggatcatgatcactagaatagaaa

SEQ ID NO: 195600 - DNA, 431 bp, Zea Mays
ttatgagttgagcagatcttcggcaaatggaatgacagggaagatgcgttgagagtgggggtgggttgagaaaaactggtccatccttttaataggagtcacaacgatacccatggggaagatgttgggtggaaggttgggccgaattaggaatgcgcgcatggatgggggtgcggataggggcatggtgcatgcgcaagttacctactatggaagggggccgcctactatggaagctccacctgtggcacactaacgatgtgtaaggattgaaggtcgcctccatctatggaaggagacgctgaggttggaaggaggcgtgcttcggaggctgggtccatatgatgttgagggagtgagatataagcgagggcatggcaggggttgggtgcatgcacaggtgagatttgtgggcgtgggcggtggggctg

SEQ ID NO: 195601 - DNA, 440 bp, Zea Mays
acgattcgtaccaggggaagaagcagttctcgaacgaggtggtcttgctctcgaggatacaccataggaacctagtggcgtttctaggctactgccatgaggatgggagaaacattctggtctacgagttcatgcacaatggaacgctcaaagagcagctgcatagtaagatcgatcgatcgatctatctatccatccatccatccacgtcctccatcgcctgaatgtcatttgactgacttgcagggcgcgacaagcacatcagttggatcaagcggcttgagattgccgaggatgctgcgaaaggtcagctatagcttcttcatctgttccaagcagcttagctagaatcaatcgagatgcacacaaggaaaatgaaatgaaatgaaatgaaatgaaatggttgcaggcatcgagtatcttcacactggatgcacgcc

SEQ ID NO: 195602 - DNA, 334 bp, Zea Mays
gatttgatagtcaagagggaaaagggaaggagagcacgcattaggtgttggacctctgacctgtggctgcacaatgcaagcacaaggcagaacgcgagacacgcagcaacacagcaaggaacgccagcctctgacgtgcagtggcctatgaccgtggtgatgaacaattgaacatgtgtggtgctgaggtgaagggcgtgggacgcggcaggctggcaaggtgcgtgcaatgcaagcctgagtcagagtgtggagccagtggcaccatagcaggctgtaacgactgattgagcacaggcctccatcaaacgtgtatcccatttgccctggttcc

SEQ ID NO: 195603 - DNA, 351 bp, Zea Mays
aggcacggggtcctcatcctgaggttgggcaccaagcataaactgttgcacaatgtcacattgaaccgtccaagagacaccctgaaaaccatcagccacagagaagacaatgaactgtggtacttcctgcagagaagtcaccctagcgcggaccaacaacctagtagcattgttaggatcagggccccacatgagcacccttccaaaagcacccaccgcattctgaatgtgttcatgagtccagaaatccatagggaaaccaagcagaatcagccaacattcgtgattaaaggttagggcacgctgattccagccctcattgtggcgaataacagtaaaggaaaatcccag

SEQ ID NO: 195604 - DNA, 721 bp, Zea Mays
tttcagcttccaaaaaaggtgaagatgagacatctgatttgccagcagaaaaggatgataccatacttccagtcaccagagcttgtacaatgatcaggaccaatcaagatcatacagatgaaagtaaacagcatgggaaaatagaacaaataacaaataaggactacaatgatgctggatatgagttcttgatcaaatgggttggaaaatcaaatattcacaacagttgggtttctgaatccgaggtaaaaatattagcaaaaaggaaactagaaaactacaaagcgaagtatggaatgagtttgataaacatttgcaaggaacagtggtgccagccacagcgagttattggtcttcgtgcttctgtagatgaagtggaagaggttttaatcaaatggtgtggtcttccttatgatgaatgcacttgggaaagatcagatgaacctaccctgatgaaatatagccatttggtcactcagttcaagaattttgaatgccaggctttggataaagatgtggtaaaagattatgcaaatgcaaggaaccgacatgagcttaatgtgttagttgatcagccaaaagaacttcagggcggcatgctcttccctcatcaattggaagcgttgaactggctgcggaaatgctggtacaagtcaaaaaatgttatccttgctgatgagatgggtcttggaaagacagtgtcagcttgtgcttttctatc

SEQ ID NO: 195605 - DNA, 370 bp, Zea Mays
cttccatgcgggcgccccagccctcaacaagcccaccacatcgctctcctcctctgccgctgcgggtggtgctggggcagcaaagagcagattcgggcaggtcacccacgtgctgcatcatgccgcaaccgccctcgcccttggccacgatcttggcttccaacgaatgtgttagggaccgtaggtgacctcatcacgagtggagcattcaggcaggtctacctcgacatggacctcgagtccaatgagatcctcgctgtcaaacaggttagtcttccatctcgatgttggtgatttgatggatcttgtgttgttttctcgctgactcagtttatctatgtatctattcattcattccactctaaaatgc

SEQ ID NO: 195606 - DNA, 617 bp, Zea Mays
caacgtcggggggtggctggtcatcactcgagtgagatggagtgaccacgggtggcgaggaggaagtcccacctgcaacaacagtagagcaaggcaccgaaaccatatcgtcgtcaaggagaaagtcatgggaggcgtgggaggaggcatctgaggtggctgcaaagggaaaagtgggtctcgtcgaatatgacatggcgagagatgatgatgcgacgtgtcgataggtcgaggcagcggtaacctttgtgcgaggggggatatccgaggaagacgcatgccgtggagcgagggacgagcttatgtttggaggttgcttgcatgttggggtaacagaggcacccaaaaacacgcagatggttataggttggcggttgattatgcagacgagtgtatggaatgtcatgctgaatggaggaggatgggcgcctattatggaggtagcaggtcgtcaggagtccctcggcccaatatgcgaggggtagggaggcatggagaagcatggtgcgaatggaattgttgagtgtgtggatgatgcgttcggctttgccattttggggtgatgtgtagggacaggaggagcggaggtgagtgccttgagcagcgaagaatttggt

SEQ ID NO: 195607 - DNA, 895 bp, Zea Mays
ctcacacaacccagctaaagatctcagcgattaccgatgaacctgagactttctttgatactcgtgaagaacttgaatctgaaagttcttctggtgaaatttattcttctagtgttgttctgaaggtcggaaatgaattggatatgcttgtcagcactaaaccgagacatattccccaagattcaagttcagctaatgttcaatccaaatcacaaactacagtgcagtctccttcgcgaatgcggcgcacagcattgttatcaccttctaaggttaaggtttcaaagaccagtgcttcaccaatggaactgtcttcaagtacaatcatgccacaacaatcatcttcgccggttcagcctcggcgagtgatgtctgactctgcagtaaaatttttatcagagataacagaatcagcatcaggtgagatgtcttgttcacaaactccagttgaacatgaaccttcctctctgatggaaaacaatccagcaccaacagcatctctgttacctttgtgcacacctcctcctcttcctccccctccacccactgtctctttactccctgttcccactaagttacccataaatactagcacaagtaccatcaacatttcccttagagcaaccgtgcgttcctctccaccttcagaaccatcagtccctcctaaagatcttttgagaaccgaagagctgggtaaatcacaagaaccttcctatgaaactcgtgggaaattacaaactgatagtactacaggttccaatgatttcatactgtcaccagccgcttcatcttcactggatgaggaattgagcaacgcaagagcatctctcccgacagatttgccagcagtacctcaaaatccagacactaggccctttgcaattcaagcgacaag

SEQ ID NO: 195608 - DNA, 766 bp, Zea Mays
aggctaaagatatggtggaatttctcgtattggtaaaccaaataatctgcaaatttaaatcgtcagctagcgccatattggaggaaatatttcctactattgcaagtcgtttgtctgcgatattatcacaagatgcattttcagctggtcctgcaagcaatactgaggtaatgttgattgcctctgtaaacaagccactgtgtatattactttattttctagctgcttatacttaatatacttttttatgtttctgctgtctctatattgcaagaatgctgcttttaaatgtgctaaccttggggatatattacattatttgctattgtttatgtttgcctgcttatgatagtgcaactctagctataacatgtggcaaatgccatacagttcaacaaagcaaatatttcttgcacgactctctaacacactaaaggaacaaaagtgacatgataggctgttgcccaatatacgtccttacctatttacttatttgtttggcatcaattccattagcttaggttgataggtctgtacaggtacagccatacaggatatatttcttttcgtaatatatctccgactcaccactacaggaaatgcgagaactgcaagagctgcagaggacattatacacattcttgcatgctatggcaacacatgatctttctgcagttctccttactcctagctctagggagtatctggagaccataatgcagttgcttttatttacctcatacaaacatagagatatactactgcg

SEQ ID NO: 195609 - DNA, 329 bp, Zea Mays
attgaccttctgcagttggctggcatggccgagtgtcactttacatcatctctcgttgacacttgtgccaagctctcttccatcgatgacgcacctgctgctgatccaaccacgtaccggagtctcgttgctgactcggcatatgctgtaagcaggtctgtctctttatgcatgatcctcgtgagccccatctcgcattgattgagcgcatcctccagcatgtcaagggcacactgtgttatgacctttacactattattggtctggttcagtccttgactccttacacagatgttgactgggttggctatcctgattacccagcgttc

SEQ ID NO: 195610 - DNA, 1070 bp, Zea Mays
atcgtggagccggtgatccgctgcaggaaccttgaattcgccggcttcataggagataggcgtcagcgactcacagccatagaccaccttgaagggtgtcgtccgctgtgcggtctggtaggtgttgtagcagcatgcagcccatggcagccaacaaagccaactacgtggacgatcacctgcgaggcagtgaaggtggatgcccaaaatgtgatttttcagatcagattggtcgtcagtctgcgggtggaaggcaatattcattcgcaatttgacacccaagagacaaaagagctccgtctagaaggcgctggtgaagacggagacatcagtgtacgggtggtccaacgaaaggaaatgggcatacttggagaagcagacgaccaccatgaagatgacagacttgctcccacatgtggcaagccctcaacaaagtccatggaaatgtcggcccacatcgagctagggctaggcaactcgaggggctgcagtattctgccgggtggaggtgcacagacttgttacgctgacaaaaagcacaactcttgatgtctttgatgaacttggtgacgtggacattatagaatgaggcgcatagacggtgtgcggtcttctagatgccctcatatcccaccctgtgagtcatggcaaggatagtgggtcacagggcgggcacggatggcatgaagatgcaatcgacatatacagcgaggccatccactaccaaccacttaacggaggcctctcccttgctgagcagctccaacaggtccagagggtagacttgtgagtgcgcatgtccacaggacactgcggtgttctaattacctcattacacggtatattctagtaatgtagttggtaaccgagggtacgaatgtactttcggccacctacactcagattgccctataaatacccacgtcctgtagctgcatgggacacgcataacacgctacagtccctacctaacgttttgttgtgcattgtgcccccttttctatccctgagtgtttgggtccacctgccaggatccaacaccgaggtaggagttcgatggggcaccgaag

SEQ ID NO: 195611 - DNA, 330 bp, Zea Mays
atctcggggtgttacagccgaagtctgttgtaagatggcgaaaatgctgccctctctcgaagtggtcccgcgggggtttttgaaatgtgacggttgatgagatgttttactaggggactgttgagttcctgaggtgctgtccctggcctataaaaagctgggtgcgggctggaactattcacccatttgagcgcgcactgaagaaaccctagctatttcctctgcttgcttgccctcttctgctctcactctgccggagatctagcccacatcaagcagactgcccgccgccgccgacggtacgtgactgtgtcattttcttcctcatcg

SEQ ID NO: 195612 - DNA, 427 bp, Zea Mays
tgcgaatatgctgtcctacaaactgcactacctgtcctacaaaacgcactaaccactaggtgctgttgtactctagtcaaaagaaaactgcagcaagctgttgtcctccaaaagctagaaaagcggaaaaggagatgcctgcagcacgctgtccttgcagtcagcagactgacatgctgctgtcccacgttatccttgcagtcaaaaaattgagatgttgctgtccctgcagtcaaaaaccaccaaggactgctgctgtccttcccacagaccacgagacttattccaacagtctcccgctccagtgcagaggccgagtaccgcgctgtgggtaacgatgtggccgaggcctcctggatgcgccagctactccacgagctccacagcccccttcagcgcgccacccttgtctaatgtgaaagtgtta

SEQ ID NO: 195613 - DNA, 360 bp, Zea Mays
aaccccgcgagcgacgcgagtgcgcacagcacgttccggctcagggttgatggctccatgatgaacaacgggtaacggtggtggtgtcgcgggaggctcgcccacccatttcttgaggaggccgacatggaacacatcatgaagcttggcgcgtggaggcaactcgagacgtactgccacctcattgatgagctcggtgatgcggtacgacccaaagaaacggggctgaagcttgctcttcggcgcttgagaaatggaagccaccggccactgacggagtcggaggagcacccagtccccaacggcataggagacgtggcggtgagctttgtcgtagtagcgcttctggatcgcctgggc

SEQ ID NO: 195614 - DNA, 452 bp, Zea Mays
actcaggcgaaattccagtgaggcaaggctcgggcagggttttgggacacgtggggagtgtgactgaggattgaggctggtcttataggcgcaggcacgactcagacatggcggtggtcgaccgtcactcgagggcgcgcgggccacgctctggcctgccagtcggtgtcgaacacgtggcccgatcacttgtgccttagttcttgctcatgctgtcacaattccaagccagatctcggtgagattcctgtacatggcgttttctccactccctaagctagctcttttgtatgggtgttaagagatatggtccactgggttgtgagatatgggaggggaaaagtcggtctgtcctatagctcaaacctgaggcaaaacttgtgccttgtcatgtcaaacgatttggttttgttttcaaacttttctagggtgtgcccaggataattcagcgc

SEQ ID NO: 195615 - DNA, 1530 bp, Zea Mays
ccggagggagacttctgtctatgcgactgatatcatcagtggaatcacgatacactgcaaagtattcgtagacaagatctcccggatcagtattttccaccatgctgttaaaattgatctagatgaaattgctacattacgtatacatgccttcgatgatgaaggtaattcatatgaaccttttgtatctttcattcttacgttatgaaattgacatagtacatataaacagtgatactgctttttctatctagtacttgggttcattgtttgtagatcatcagtttacatcacattttgttcccttcttttctggttcttatttcttaatgccccgaagtcgttgttgacctaagagcttccttttggaacacttttagatttagtaagccttttttccagtcaggcatagccgtttagaaccaaaaaaagttggggtaggctagagatgaaaccatctatgaaccacaaacaaaaaggggaaaatttatatacaaaactactgtttccactgttcacaacttctaaatggtaaacaaaggcgaaccatgtcgtttaggccctaagcggtgaattatattgttaggccgtttaaacccttttaaaccgttaaaagccgttttagtcagaatcgattaaacatgattaaatgagctaaatggacatttaatttgccatttactcaatgagaggatcagaggattacaactaccacacttggtacccaactaattaacaccgtaagtacataggtgcagtgggatttagttttcttccaaaaaatcatttggtagaatacttatattttacatgcataaatatgcatactttctagcatgtttgaattctaaatacattaatatgtatattttagtgttgctatacaaaatcgtttaagccattagctccatttaaacaccataaaaaatggcctaaatgctaagcaaaggatgaccaactgtttaccatttagcgtttaggataactctgctattttcctggcattgctatattttcttattttagcatacttaatttggttccttttgggtttagaaaatgtgttctcgacattggtgggcttgcagtttttgtggcaccttaccccgaggttggttgataacagtagccatcatcttattcgtattccactgaaagaaacacatttgagtgactgtggtggcttctgcggtgatatgaatattcggtttgagctagaagacaaggtaaactgtttgtgtgcttgttttccaattacatttaccactcttcagtatggaagaatacatattttgaattttcttgctgtacttgtgcagaatcttggttcagatttctctgtggtgaagggtattgagattggccaagaggttgttaaagctcagttgtttgagcctcagtttgaacatgtgattgacacaatcacattaactgttgctgaatccatgtcactagagccatcatcaccagttctcgtgactgttggtgttttggtgaagtttaaactcaaggtattccgacagaaagttg

SEQ ID NO: 195616 - DNA, 399 bp, Zea Mays
gttattttgcgcactaaaagtaccatactcaattaacaatgcattatctataacaatcaatatcgaagcgcttttcaccaatagtttgcattttaatttagacatctcctgagcactactacttttcatccacgatcataaacatacgcatttagactacaacatcccaaacgggtgcgagaacactagtttctagtttaaccccatgattattcccttaatcaatttaactacttaatcgacatcgaccgacttaaccttcatctcgacggtctgagcaccacaattcgagaacgtctacctagacatctagcatcacatgcagagcctactacttcacgttgcaattcatacagatccacaaggtgacaataataacacacaagcaatcgatctttc

SEQ ID NO: 195617 - DNA, 468 bp, Zea Mays
cggggaaatggatcattgccgccggtgagctgggtaccaccccggccagccgtggtactcctctccttgttcaccgatcgcgcggatgaggtttcaccgctgttgagtcatccctgccgtccgccgcgtgtccaaacgccttaccacgtcgcagctaaccatcctatacctggccggtgatcgccggaggagccgccaccgtgaaagccatatcttccacgcgccagtaccattgttctctccgaccgccagcacatcccggtaaaattgggcgccaccgccgttagaggctataaattgccgccaccatccgctcctttaggtagttacgcaaccagtgaagcaactcgtgcttcgaatcaccccctagagctcgcaaatttcacgtttcccccaaattggttttccaccgccgcgaagaacaccttgccgcggccagcgcaaatcaggtccgatactatcgtcctc

SEQ ID NO: 195618 - DNA, 303 bp, Zea Mays
cttaatcttgacctttgatttctttttgttcatttctctggtggaagttattaatctattagatcaacacccaccgaccaatgaacaattgttttgatcacatcagatgtcgctaaggcctttggcagtgtcatacaccataggttgggatcatctcaaatatcctgcaaggattcatttgtcatttgcccaaattgttatccatgtatgcacagtgatgatgtgcgtcagccactgttacaattgcatttttctttggattgaactatcaccagcactctatgtaaataggataggtttcat

SEQ ID NO: 195619 - DNA, 443 bp, Zea Mays
cacataccattagttgttgttccctacatgtaatgagagcataaaaactatatgcagttacgcatttaacataatgtaggcattacctgttcacatttcccaagattttgtttgtctccggtgtaattctgtcaaaaacagagtaagggaaatttagaaaataaggtcaccatgccagtaaagcaacaatctcgtgttgtgcaccttgagaagttccatttcttcttttgtaggacagaactttatgagattctccacttgatcaacatccaaggtagattgatcaagcgccagagctgcactctgaagaaatcaatcattggcaacatgtcagaaattattaaagagtgagacaccttatcttgtgcactgtcctgattcttaccaccaaatccgagagtggcatcttaacttttgttagcatgatctctgtgttattcgcc

SEQ ID NO: 195620 - DNA, 319 bp, Zea Mays
ttgtcgccctcctaattcttgcaattaccgcgtgtgctgctgactcctgcaccgccatagtgcacccagattgctgtgtatcatccccctcactctgtgcctcatcttgattcccatctagtcctttttttattgttgggcgacctctttttcttggagtccaacctacagtttttgcacttctctttttgtccttgttctcggccgctctgcttctgtttgggttctgagggcatgttgtgctatagtgccccctaacatggcaggtttggcactctcttatgccctgaccaccactatatgtgttgtatggattagc

SEQ ID NO: 195621 - DNA, 330 bp, Zea Mays
attggtgccgcggccgtgtggattttgctcactctgaaaagatctcaccgtggataaacttgtagcacagtggtcgtccggtcactcctccacttaccggcgacgtgtccgcacggccatcaccggcgtgccgccgttctttgctgttacgccacgccgtcggtcatcttaccacgtcgcagttgattaccatacaccgtccttctattacctaaggccttgccacgacgttcgccacctatcgcacgcaccagtaaactctctcccctccggccgccagctcgccgtgagcaaattgtgagccaccgcccccggagtctataaattgag

SEQ ID NO: 195622 - DNA, 381 bp, Zea Mays
ctgaactacttgatgtaacaaactgggaaccactgttgaagttgccactagattcagttgaagatgtggtgcatcccgttccagccccggtcggcgtgacaaagcatcggctacccggttgttggtcccttgatgatagataatcttgtattgcaaaccaagaagctttgtcaaagctttctattgccagcttgtagacaactgttgatcatcaaggtgaataaggccttgctgatatgttttaatgataaattccccgtgctgaagatacgaacgccagtggtcgaccgcaaataaaatggcgagacattccttctcatagatctataaacccaaatttcttggtccaagtgccttgctaatatatgcaattggatgtcc

SEQ ID NO: 195623 - DNA, 812 bp, Zea Mays
gcgttttggaatctactaatcacctcttctttaattgcctgtggctatctttgtctggagggtggtgcaagtggccctggatctgaaaagatgtcctcagggctttgactccctttttggtgattggctgagtaattttggtcatgatgttaaaaatttaatcacgctcagggtgggggatgttctctgggctatttggaagcttagaaatgaagtttgttttaacaacaggagcattattgaacctgctgatgtgatttttgcttgttgcttctgattggattcttgggctattctgcagaaaagaaggccaaaaaaaatggtggaacttggaagtcaggaaatccaaaatatggcaagtgaagtcttcagctgagatttttggtggggtcaaaagactcttgttagctgaagttttcagttctcatattttgtctgcaattcagtgtgatgtccaaaaaacctgtctgttacatggtgtcttctggcccatgtctatgcttgtatcgccttgttaaagacgatgtctccttcgctttgattctggtatagtgctttgggctatgttgggtggggtcattctctcacctctactaagcatgctcgattaggaaggtttgtcctgcctcttccctgacatttatgagttactgatagaagttgaatgcataactgcatataaatttgtgtgatccaggaacaaattggtaaatatgtgcccaggtttgtgcatgtgtgccaaccaggtacagctcctgcagctgtggtaagaaactgtagaaggttcaggtagtggagaagcattccactta

SEQ ID NO: 195624 - DNA, 553 bp, Zea Mays
acccaagaacatgccctacaggccaccgaccagaagatcaacctgcaggacaccaagaagatgccctacaggccgctcaagtgccagtcctgctgcccaggattcttctgcccaggaccactaaattcttggcaattttaaatcgcctaatctatcgcacagcggcatccaagaacaataaagaacacggaatgagctactgggcttcagatctgatgatccattagtacggaacagtccgaggtaaggattctgtgtcattagaaatgtaactcagcagattgtgaatgcaagaagcagactcaaagtcccagatcatctgtttagatgcgcctcagccatgcaaaaacttagatgagttgggcagattgttgggcagattgtttagatgcgcctcatccattagtacggaacagtccgagttgggcagattgtttagatgcacctcatccattagtacggaacagtccgagttgagcagattgtaactcagcagattgttatccgtgcaagcaagaatttcccagactaaatggctagcttggatgagttg

SEQ ID NO: 195625 - DNA, 338 bp, Zea Mays
caagcctacggattgatagaggaatccccaagtaagtgcagggaaaaatttttgtagcacatggtaataaggcagaaatggtggtcagctcattcgctccacattgaatgggtgtaacagaacttttggagatgttcgtttttagccctgtagcatgaccaaatatgtctaaaatgctgataattgctgagatatcctgatgagagggccgcatgaacaaaacaacatcatcagcatagaaggagatacaatgtttggcatgttgatttgcaatcggctggaggatatgttccctgaaagcataactgaccatcacatatatcatcgtttcatactcg

SEQ ID NO: 195626 - DNA, 506 bp, Zea Mays
caggtacttgctgaccgagttaacctaccatgtaagcttctgaaaggaatatgttataccgggacagatgaaggagctgttaacttggtcaaagttgattttgacaggtatatacgtgtttctttaccatctttcaaataattaatcttacacagtttaagattgacaacaacaatgaaaacaccaaagccttttagtcccaagcaagttggtaggctaccagtcatttcaaaaacatgagtgaccaacaaaaagggaaaagaaagagaaataaactgttgcagcactgaatattttgatattgttcacaactattaaccttatgtactgtaattcttgcagcatggaatatattattgatttgatgggagctccaggcaccttaatcccttcagacatttctgggagtcagtttcaggactccaacaatagccaattgagcagtgatgccattgaagagagtgtagcagaattgtgcttagcccttgagcagattaatggtggat

SEQ ID NO: 195627 - DNA, 380 bp, Zea Mays
atggaatcactcgagcaatcccattctttgtttatctgacttatgaccaccatagaatccccatataccatcagtctcttgatgctcaattatatggcaatgtatagtccgtggatcagagcttcgtattctgctgcgttgttggacgctgggaatagcaattgaagagcatatttgagttgttcgcctccgggtgcaataaagaggatccctgcacctgccccctgcagctttaacgagctatcgaaatacattcaccatacttctgcagtttctgggttatctggcacttgttgttcggtccactctgatacgaagtcaaccagtgcttgagtcttgattgcggtgcgaggtcgaaactcaatgtcatgagatcccag

SEQ ID NO: 195628 - DNA, 498 bp, Zea Mays
tgattcgtgcgccgtggacatcagataagcatcacccagtaaaaatcttcaccgctgtgagctaggctccactccggtgacccccctgccttcccctctgctttgcggctggcacgataagctcaccgtcgaccgccgcctctcggccgtgtgccgcgtggctcaactctttcaccgtgtcgccgtgacctcctccgaactctccgtggctcaccggaattactgccacactataggacacgtattcgccgcgccaggcttcttccttatctccggccgccaccgcgccatcgtcaattcaagcgccaccgcccgtcctccctataaattgagcccatgactagctccgtgaggtcgtcagctaactagccaccgctaatcggccacaatcatccaccagtgaccgcgaattcggagtttcccccaaatccgatttccgccaccgtgaaacaagcttcgccgtggtcagccatactccggttagctcctcccctctgc

SEQ ID NO: 195629 - DNA, 583 bp, Zea Mays
cctgggacaaggcggtggatgacggcacgactccgacgtacgacgacttcaccatcgagtacgtccacattgtgggagctgggggagtaagcaactcttcttcgagcaggtctaccccagcccccaagtctccaccgactctaccgccacgctctccagctccagctacaacaagctcttcgccaccacgcaatccagccacgactccggctacagcgagctcttcgtcaccacatactccagcactgacggtaacctctccaggaacgtcctctctgacgccaactcatgtcgagcacgacccgatggagcttgtgtcctcgctttcccacgacaaggagcgtgtcaacatgtgcttcgatggcgagccgttgcggtatcatacggtggagggacttctcatcgacccgtcggtggcgagcctggcgtctcgcattttggcgggagagttgcatcttgcatgcaatgatggtgagcctcggtctttcgtggaggccaagaaacacgtggtttggtgtgccacgatgcagtcggagatggacgcggttgagacgaaccgcacctgggagctcgctgatctccc

SEQ ID NO: 195630 - DNA, 742 bp, Zea Mays
gagatagtgacactacgagtaagttgcatcaaggcatcgcatccggggtgaccaaggcgacgatgccaggtggtagaagacgtggtggcagaaaaaacagtagctgtggcaggtgacgaagacgaagaagaggtggcgtgcggaagccgaagggtgtagaggggtccggtgctgtcacatatgaggagggggcgccgagttgctgagtccttcacagtaagaccagaagagtcaaactcgacagaacaagaattatcaacggtaaaacgacgaatagaaagaagattgtggaccaaagaaggagcgacaagaacatcgggaatgcgaaaagagccgggagggccggcggcacccacagatgtgacaggaagacacgagccatttgccaccatgatggacgaagggagagaggaaggagggcgaacagaggtgagtataccagggtcgggagtggtgtggtaggtagcaccggtgtccgtgatccactcgggacccatcagtagagtcagagtgggagtctggaaggcagccagggcgatcgtgtcccaaccaaccagcccgaacggtggagcagccagcggcgtgggccacgacgaggcggcaggtgtcgaggtctagggcgacggagaggcgaaggcgaaccccggcggcgaggtgaaccccggctgcgcaccagcgaacatggccgccgggggacgagccttagaacctggcccttggaacgaccacatggaattgtgcc

SEQ ID NO: 195631 - DNA, 418 bp, Zea Mays
atcagtttagctgaaaatagagtacttttaaaggcataaatactcctatttctgtacttgagatcacatttatcctgatataggttgccattcatgatatttctaggttgcacatatgttccaagcgctaggactgaaaggatgccacttgctattttgctgaattataacctatgcttaatatagatgattcttcattaagtgaacaggtagctgacccacattcttgctgaattataacctatgcttaatcttggatccaatcaacaaacaaataagtgccacaagcaaacccaccctgagaaaaatacagtgcttttctttggttccacattcttggtttccaatgcatgtttctcttcttttgatatactgttttcttttaccgacacatctctatctttatatgtgtccaaag

SEQ ID NO: 195632 - DNA, 388 bp, Zea Mays
gtccgggtgccttcaactgggggcagttattcttgaagtgactggggtctccgcagtgccaacaggcatttgctggcggttggttgcttgcaaccgagggggcctgaaaggaactctgactctgctggctgtaacatgacagagtgggtccaactggtctattgaagcttggtcccttgggtggatgtccgaaggatcgagctctctagtgacggtcttgctgctgagctcggagaacctggaatttcctcttgaggtgccctttttcttcctcttttgccctttccacttggatggctttgttggagaggtgcgagaagctgaggaaatcttggctggcgaggatagtcttgagttctggtcttagccctttcagaaaacgggccat

SEQ ID NO: 195633 - DNA, 571 bp, Zea Mays
gcggaccagctgggtgtgggacccacctgccattgaccatgtcacgatgtggagttatgtcaggggtaccatttccccaaacagatgtcattctggtaacgacttttttcttctttccagccactctaaaggatcatcagatgggcacaaattatcaaaaggtgggataccattggctaatggagatgtgcaactaccaaaaccacctccatgggcctatcctttgtggagcagacacgaaacacaaaactatgaaacagacagaatgctgaagtctacttctcaggttattgaccaagcaatggctcaactctgggagactaaagtaaaatttgtaaatgttagtttctctattgagaaacttggtcgctcaaggagcattgtactttctgaaacgggtcgtaggctgcgacatgatgctacggattctcatgatccacctggagattcgcaaacagttgctgatcagcctattgaatgggtgaaggttacgttgtctgcagttccaggagttaacatggaagatgtagatgataatgaaccaacacgaaagaaggaccatcgccgtgtt

SEQ ID NO: 195634 - DNA, 542 bp, Zea Mays
tccttggaggtataggaggacaaggattgtcgtcactagaactatcctccccgctcccttcaccggagctgcttgttgtatgccattcaagtttggtcgcgtcttcatcaactctgttagacgcaccagtgcagaccacatccatcctagtaggtacctagtgcacagctggttccatcaataagggaacttggagaaaaggtgattcaaaagaaatcgagcccaaacccgcctccgtgtccctcctttcctccccaaacaggaaggcagaatgtctagtaactgtgaggtcctagagtctttactgcctacgaaggacgaaattccggagcaggatcggaccgggaagcacagagcagatagaagtgcactttccaatgcagttagacagagaaggcatggatgtgatgttataatgctgaaggaccccaagaagagattatggcctatcatttaccaccactacccgttatttgtgggtttcaccgagggctggaaacatttggtggcagcaaacgatcttcggactggggacgtctgcg

SEQ ID NO: 195635 - DNA, 278 bp, Zea Mays
ctgggcaaagcccattacatgtggataggaaccctttggtgaagatgtcgatgaactacgagtggtcgagacacggaggacgccgacatcgccaacggtgacacgcttgctgacaaagtggtcaatctccatgtgctttgtgctggtgctgcacgggattggtagagaggtagacccatgctaacgttgtcgaagtagaccagtgtggcgcaagcgagggggtgtagagctcctagagcagctgacagagccaggacgtctcggccacaccgttggcc

SEQ ID NO: 195636 - DNA, 642 bp, Zea Mays
ctcccccacccacccctctcttccctcttccatcattgtcggaaacgggtccgcccttcccgtcacctcagtaggtgacgcggtccttcccggtcctttccgtttaaccaacgtccttgttgccccccacatcattcaaaatcttctttccgtccgtcagttcactactaacaactcttgttccatggagtttgacccgtttggtctttctgtgaaggatcttgccaccaggacccttctcgctcggtgtgacagcctcgggcccctctacacgcttcgcctgcctgctcccactacttcgacctctgccccacatgttcttgcagcggtcgcctcttctgcgatttggcatcgtcgtctcggccaccccgggtgtgatgtgatgtccaagctctccagtagtacttctgtttctggttgtaggggatcttttgagcacctctgtcatgcttgtcagttaggtcgccatgttaggctcccattccccacctcctctagagcaacagacatttttgatctgatacactgtgatgtatggacatcccctgtaatcagtatttctggctataagtattatttactcattctcgatgacttctcgcattatttgtggacttttcctttacgtcagaagtcggacac

SEQ ID NO: 195637 - DNA, 499 bp, Zea Mays
gcatgggttgctgggcagtatgcccatatcaacttttcagacccgaacaattttcgtcaggctatgcactgtatagtttcaggaatgcatgatccagatcttcctgtgagggttgattcggtctttgcacttcgttcttttgttgaagcctgcaaaggttatattatctgatattttctagttctaaattgtggacaccagttaagataactgattataattttatctctgcatttctgcagatttaaatgagattcgacctatacttcctcagctccttgatggtatgaaaatagttaccttggtctattaaattgatgataaattaatcttttggattaacatatctgtttagtctagtaactgattataaattattttctggctcatcatataatgttaaacagaattttttaagctgatgaatgaggttgagaatgaggatcttgtgttcaccctagaaaccattgttgacaaatttggtgaagagatggcacct

SEQ ID NO: 195638 - DNA, 324 bp, Zea Mays
gttcatccgggctgtggacacacaaccgagccagaagtgactgcgcagccgagtcagtcacataggaattcataacttcctggacccagagaggttgaacctcacttactgctgtcaatgccatcacacaacccacacgagatagagcatcagctactttgttctctttaccctgcttgtaaacgactttgaactgcagccccataagctttgccatggctttacgttgcaactccgagtgaagctcctgactacccaagaagatgagagccttgtgatcagtctggatttcaaactcgcgccgttgcagataatgacgccaaa

SEQ ID NO: 195639 - DNA, 351 bp, Zea Mays
atctttgcggatcaagttattgaattcgtcgccgtattatgcgcaagctaatgggcaggccgaatctagcaacaaggtgttgatcaggttgataaagaagaagattacagaacagccgaagaggtggcatgaagtgttgtcagaggcgttatgggctcatcgggtatctcgacatggagcaactaaagtaacaccatttgaattggtttatggacaagaggcggtgcttcctattgaggtgaatttacaggcttgcagagtagcttgtcagaattcgttatcggctgaggtatatggtgagctaatgctagacaaaattgatgggaataatgaaagtcgattaacagcttt

SEQ ID NO: 195640 - DNA, 976 bp, Zea Mays
gtggttattatccccgtgtgcttcattttccgtttctgcccacatgcttgactccgcaattacacattctgttctgcggttccagttcatgcctatcccatcgctggactcctcatcgattcataatccttcgcaagttgggcttactgattggctttccagctctgcacgatgaggaggcttgccagctctgcaagaagacgactcatgagtcatgatgtatccagttttgcatcaaatgcttccagatctacaagagtaagtactgtatgtatgtgttagtttgtcatcatacatgacaattgattgggtcttggcaactagaggaagatggcagatgttgaccgtatacggctgggcttggaacgaggcccgttccacatggatcggcgggactcggattcaatcctggtccaactgggaatggttgttcggttaatttggggatgaattgcagctggttcattccggccgtttttcctgtctcatcatcccattggatcgacgcccggcctcctaccgtctggcctctgggagggaccaagcctacgacgacgacgtgaacactagaccagaggtgaggcaaccatgactccatgagcattgagcaccccccgcgcgtgaggcgatggcggcgacgacacgatcgggttttaggatcttggatcgggtttttggatcttggacggttagcaactgagcacgatggtctagttctagttgacatccgtgatgcggatagtcgagatgtggaatgattttgcactcgtgagttcttctcttccttcccccttttttctgcccggtgctgcctagggttcatagttcttaaaatcaagatccttgttcttgtcccttcttgttcgttcatgttcaaggtgatacttgcatattgttttagtttagttcagtttcgtttgaaaggtaggcttacagagaggttagaaaataggacaaacagataaaagacacctga

SEQ ID NO: 195641 - DNA, 330 bp, Zea Mays
cggaaagcggaagagtgcggatgcagaggggcgcagagagctcgaaggcgaaagggcacaacgattggagagaatgcaaaagcgtaaccactacgcgtggggtgaatcccttttcaaggcagactctcccgctcgtgccctgagatgccacagaaaatctcacccaacacgcaccaaagcaacccagcctatgacacgggggcccgggcccacaagtcatacagctggtgtgcgggtctctgagtgcgaagaaggcgaaccgccacgcaaggagcaaaccaccgcctgcggtagtgcgcctcttcatctccgtcgaaaacaacggtccag

SEQ ID NO: 195642 - DNA, 435 bp, Zea Mays
tctctactcagctgcagcatatggtaaagatgatttattccctgaattcgctgaacctcagattaagaaaattccagttgaaggtgttgtcctgatgctcaagttcatgtctattgataaggtgctgcagcatatggttaataatttctctatcagataataatatttttcttagcctttatttttagctcatacaaaacatatgctgaatttcaggttgagaactttcctttcccaacaccaccaaacaaggaaagtttggttgaagctgagcgttgcttaaagacattggaagcacttcatagtgatggaaaacttacacctatgggcaaggcaatggcacagtaccccatgagcccaagacattctcgtcttcttcttacagtgattaagaatttgaagaataagcagcaaggctttgctagatctaacttc

SEQ ID NO: 195643 - DNA, 528 bp, Zea Mays
aactgtgtctttcgaagaagtgtgtttctccctgacaaagacacttgattgtgttcgcttgaaaaattcaaatccaaattccctggctgccacaagaaaagccccctcatcaggtgattctgcttcataggcaatagaaccagttgcttcatttatctctggtatcgctgtgtgacacagagcaagtatcctgaagaagagtagaattgtggaagaatttggctccttggtccagttcccttgcatgagacggtcatccacaaaactgaagccttttatggagggctttatgttggtcccaacactaaagttgactcctaccaactcgatttcatcatcattgttctcctcccatatatcttgtaaagggatatcatggtcatcagcacctgatgccatatgctttgcagcagcacgttcaacttcacttgaacccacgccatatgatactccagcaattgaacacttcaggaaatccatttgattgcaggtcagagtgccagttttatccgataagatagtatgaac

SEQ ID NO: 195644 - DNA, 966 bp, Zea Mays
ctactgttcttgcttgagctgcgatcctcttcctgaggcgcgggcgttggatgtgatacgtggttggctccgcgccatctcctccggtggcgatgagctccaagtccacctgctgctgcttatgaggtatggtgcttgcgagacttgtccatggttgcttgcttcgttttgcttagagatgctctcgccggggcagccagttgggctggtatccaagcaacctaggattggtagaattcgagcagtttctaccagtttccaagctatgtgattaaatcattaaagtgccttttcaaaattatcttctccatgtagagatagagatgtattttcagttcatgagttgtacagttcctactgaagggagacctacaacgtgctgaaattctgtgttcaagaccatgttttttttattttattatatcaactataataaatttgaaattactttcatggaagtgatttagtggagtaatctagcatgagggttagttccagtggaaattcatcaggagtgtatcttgttgggatcaagtctgtatttcctttcggtgagcgtttttttccggtccatcatctataacaacctacgatcttgtttcagatcttgctgaatgaattttgtggtttttgagccatcctggtaaaccttggcatggccagtggagagacaaacgcagggaacacccagaggtgtgcttatctcatctttaccttgaaacacactgtttgttttttctagttctagttactactggaaggctcttcagtgtttttttaaaaaactacccactgatgtgctaactgcgagacttcaagatttttgtttacagaaatcttttgctatttaagtagctgtcagaaatcttgggagcactactatatagacattttaatataaattgtgagtgctggtagccttatcttgtctttctgtttagggggaatacccttccaaatggtgac

SEQ ID NO: 195645 - DNA, 913 bp, Zea Mays
atctctctctctctctcctccctgcctgccaagtcccaacacaaaaccctctcgtcgtccccaacaccgcttcgcctcgaccgcgatgatcacctcccacgcgcggaggtagccgccgagcagctcgccgccgtccatccagaggctcccgccgagggtttcctcgacgcggctcttgcgcgtctaccgtacgtaagtacgttggtcgcgtggttttcactcgagttcctgcggattggtgcgcgcgctacccgtgtggccgtgtccccgactccacatgagcgaggtgcggaaaccgctcctttctcgccttctccctcattactgctatcgcggaaggttctagctagctcgcgcccctctcatcctatgccttactgcgttgcgaggaactgacggtattgtccttcgtttgatccaacgtatatgagcccgtagcgtacgtctcaatttagtctgactgacgcatggctcacgtggttgtgttgtgctcggcgagagccgggcgtggacgcgtggttgccgccctaaaccatgggattgggacggggcttccgaatgttctcatctgataggtgcgcgattgtgctcgtaggttggtttgggtcgcgtactcgtgttattatgttatgcgaacgacgaggttcaagttgtagaagattctaccaacctggtagcgcctttttgttttttttttggtcggcagatgactgctgtgtacagttgctttattggtgtctcactgtctctgaccatgttgccagctttcccatgcgcgcgccaccaaaagctcggtgctggatttctgaatcttcaagcttgggctagctgcctagcttcaaaacggggcctctatttccgttggttggttgaattgcctgacgtgattcgtctcagcatcatcaaattgttg

SEQ ID NO: 195646 - DNA, 576 bp, Zea Mays
ggtccggactatgactttcaagcattgctgcaaacttcgaatcaccaacatcagaagccagaagattatacagccgatgtgtattacggaagtagatctctcgaaaaggctgatgtctggtaatatcgtttattgcatttgaaaaagactgataaagttgtggatcttcacagttaaaaatatatcgtctccaaagaaccatggcaaaaattgagtaggctggaggaaaaattacagttagaggaagcatccgctgcaaccttgagagtgcaataatgtatggatctccaagaatatctgcaataagcccatcatagacagttctgcagttccccaataaaatcctaaaccaatgtaccgaaacttccgtggaattttcaatcctaaaacctccagtaggatgggatacaccattcgtatttgatttcaaacctctcaaaagctgcataatatccagaccatcttttatttttagagtagcaaccatccgctcaaggctaacagctccatgaacaacagcccccacaacaagagcagaaatagcagcagatacttttgcagttctcccaacaaaac

SEQ ID NO: 195647 - DNA, 365 bp, Zea Mays
gggtaggacatgcgccagtgtatgccgtgggagaggaagaacatgcgagcgctggggttatcaaactcgcgggttgtcacattgaacccccttgatggtgacaccgaaccaggtacaaacataggcaaaaaagttagaaagagtggagaaagtgtcatacttaagtcgtagcggaaacacctaaaggtaatgcgagcagtcatcaaggaccaaataatacttgtgatcatagacactagtaatgtgtgaggtccaaagatcacaatgtattaacttgaaaattatgagtggcatgtgatgatggcacatgaaagtgaagttgtgtatgatgaccgagccaacatgcatgacaaagagtgtcacta

SEQ ID NO: 195648 - DNA, 334 bp, Zea Mays
ctttgctggcggctcctccgatgacgaaggagttcgagtagaggaaggggcgtgcgacaccaccgcagtaccggaccaagcggcacgggagcaggacgatggatcgcattttcggccgagctatctgcttgggagccacccattctctgcgccatggattcacagggaggaatcgaccaatgataggggggtttccggtccggtggccgaagaggaggaaaggttggacattcgtgatgcttctgatgatgaactgggcttggtggatgaggataaggaagagacggataatggtgaggagcttcttactgggggtttagaagatgaattttat

SEQ ID NO: 195649 - DNA, 342 bp, Zea Mays
gctggatgccctcagtaaaagaaaatgggatcttatttttgtgaatcagttccttcgtgatgtcagagaagctaagaaacgtgggagaaaagaaaagagacataaggaagcccaagctgtactagctgcagctgcagctgctattgcatcctcctcacggaactcaaccgtgagaaaagatgcaaaggaggatgcaccaaaggtttgtttctgagttttgatttggcagttgtgaaattagtacttgtagatattagggatcttactttttattgcgtgtagagttctcccaaacttgctgctggatcttcaagggttgggcaacggacttcattgccacag

SEQ ID NO: 195650 - DNA, 393 bp, Zea Mays
aagatattaaagcagaagacctaaggcagatgtttcttgccatgacagaagaggtatcctttttatctcatatggaacatcttatcaggagaaaaaagattcaactctgtacgttttacttaataaaaaaattaaaatcaattcttaggttcgtgtgattattgtcaaactggcagacaggttgcataacatgcgcactctcacacatatgcctcagcacaagcaggtgaattcttattccagatttaagatatgctgcatcttacttccaccctaagtactaagcatgactatttgcagtatgccatcgccgtggagacactgcaggtctttgcccctttagcaaaactccttgggatgtaccggataaaggtatctgctgagccttaggac

SEQ ID NO: 195651 - DNA, 460 bp, Zea Mays
aaataaaatgccatgtcaatgactcatgtgttagtgacacatgattaagggattttcgtaaggatggcaaatagttaaatccccattatccacactacaaacaatgtcattcgctccttccttttccagaccagtgttcctcctacgttttggctgcaacacttagcactcccacctacctttgaattgccttgattgtcacacaaatcgtcttatcatctcttgtcatgtggtcttcgatgaattcttctctcattcgagcgacttttgatttccggaaggatttcactaatcttgtgtcagttccctttgcaccatcaccatgtttgttgcttgtaggggcattccttaccgcacgccatgtgcagcttttggcgccacagacacgtgcaacacctagtgccctggactcaccacccctaatgcatatgttggtcagattgcaaccgccttggctccc

SEQ ID NO: 195652 - DNA, 322 bp, Zea Mays
gaaaaacaaaaacaaaacaaacaaagaacgcaagcatcctacccaacacggaccggcacttggcccagcagccccagctgtttccacgatgcgttcgatccctcctccctcatcagctgtttccacgatgcgttcccctcccccctcatctcacttacgtgtgggcctcccagctctgcttgtcttccagccccttgcccgcatgcacgaatcggatgacgacgacgccgccatgagaaagctgaagcgccgaccgccacttcgtgtctgctgctctgctcctcgactccccgcgcctgcgccgtagagaagtcgaccgtcc

SEQ ID NO: 195653 - DNA, 410 bp, Zea Mays
caaagaaacaactaaccagtatcatcatcgtttgcattccttgtcctatgttgatcacgatatgcgtctacttcggccatggaaacattggacttaggaatatttgcatgccatccaagttcacctttaggaaaaaacaatgggtatgatagtgcatcataacatccatggtatgaacggatcccgtggcttgacctatctttcccatgcagcataacactattactgaattgacctctacgttcactcccctcaatccaaactacagcgacctccgaagtgatgggtacaatatataacttctggttcagcgtttggtcaaggttcaaggcgatatggtagttttcaacgttatcaacgtgccccatactcctaaggtgctcagagtatgggtttcccttaaatatttc

SEQ ID NO: 195654 - DNA, 372 bp, Zea Mays
gtttttgacctcagaattaggttgttgaacgcaaacactgtcatattatagttggacactcttttgattgcttcttttgttccttctcatttctaggttagcaagtgtcctagtgaagttctattggtactcctagctagatcaccttagagtttttggatccatgtgctatgttttgcttgcacctcatgagcgggctaagctaactgcttagctgagcagggttttcaagggtatagccccggcacaaggcttatcgtcattgttagccttcttgccgcatttgtatttattgtaatggcacctttgttgaggaccatcctttcttttataactcttctgctctggcctcatcttttacgaagtccacgt

SEQ ID NO: 195655 - DNA, 285 bp, Zea Mays
aaagtaagacgcgcatagtgatcccgtcggaaccaggcggagctaggaaggagggggtgctagcagccaatacgaaggtggggccgaaggggccaggtgcaacgggagaagtggaaggtacgagtgctgcagtcagaggagtaggggcaaggacggatgggggcaggtcgtacgtggtggcgccgtaggagtaggggatgggtaccgccatggagggagcagtgacgcgccgagcgcacggaggcgagaggcaaggagtggacgaccgaggcacgagtgaggctg

SEQ ID NO: 195656 - DNA, 300 bp, Zea Mays
tttattgattcccctcatgtcaacttcggtgttcctctgcctctcctcacattattatcttaacttagaacttcacaatggtagcaataaacatattgaggattaaattgtgtgcttctcactttagggttcttactttgtttctgaaacaagtacctcgggagcatctacctcattcatgaagccaaattctaaatggattacaccacatggtgtcggattatattcagactgcagcctgacacagttgtgttcgggacccgatgcagctcttttggtatgcttagcattaaccataaa

SEQ ID NO: 195657 - DNA, 673 bp, Zea Mays
ctactttgctttgattttgtggcatccacatttggatcagccaatgcattaccaatgcctttgtttccattgttctgttgatcttcatcaccaacctccagatccaagtcttccatatccatcggttccggattatcattgtccatattctcttccactctgaactgaagctcatacaagttatcacctatcactacatccacaaactgaggtaacaaactcgcatccaaaactaacacctgtaaacgacaaatttcatacttatttgtgaacttcatgtccaccgcctttgtcaccccgaggatggaacccaccgcccaaataagcagaaaatccatcatctccttggggatgccagtgaactgaacccaaactttgcccaaagttgatttcacttccactggcaacaccttctcctctattgacattgacgcattgaattttgtttggaccacaccccattctatcatatgctctagatcggcacgagatggaaattgagtcttgaacacattggtaccaacagactccacctcccatttccacctaaccggcaccagacgctcaagttctgatgacacctgtgctgtggacagagcaccccctgaaaccttaattatagcattttttgaatcccctctatgcttctgcgaaggagtgtaagggatgtgaa

SEQ ID NO: 195658 - DNA, 324 bp, Zea Mays
ctgaatctgactcattgccatccctggatgcgtccctcttctaaggtaccttctccataatcatcttccaccaagtcagaatcaattatcatccactaatccttttctcctccttttcctccaacttatattgctcatatgaactatacatgtacatctggattggcccgcacgggaaggccagacacattaaatcacgacccactaaaagcacaaccctaattatagactatgatgtgtcatcctgtgtgccaagccgacgggccacgacatggcccacaaatacttaagtgtgtcaggtcagtctaaataacccaaaatgcc

SEQ ID NO: 195659 - DNA, 476 bp, Zea Mays
cttcgttcctccgatgaggtcctaggcccattcgtcggcggtgatgtagaggtccgcctccctaaacagctattcgaaagtggtcggcaccttttgtagtatggctcggatgaaggccgagtcattagatccccggtagaagtcctcgatcactgctgcttcagcgacctcgagaatacgatttcttatggtctgaaacctcttgaggtatgaccgaagagtctcatcccctcggtgcctggtggatttgaggtcccatggctgcgctggtttgtcggagagggattggaagttggcgataaaacgccgactgaagtcgctccaatcatcgatgcagtgttggggtaggtgtcgtagccattgcagtgcatcttgcccgaggacgatgggtaagtacgcagtcatcacatcttcagttgccccagcggcccgggcggcagtggtatagacggccaaccagcctctcgggtcctggt

SEQ ID NO: 195660 - DNA, 4146 bp, Zea Mays
ggaagatggtaattctattgggattcaaggtgcatgcacttcaaggaatactgaagctatccaatgtgatgaaacatggtatgatgacaacatttgtgttgtttgcagaagtagggaaatctcagatatcctgaagtaagttactctgcagtctaattaagttatctctttttgatgggaacatatcttgtgctcaaaggggtactgtgctcatgtgcacattttaaatttgggactttcatcttgaatctaacagcagcaccacttttatgaaaatcccctcccaccatgggagcgaggtgaaagggtttctttataaaattgctgctgctgtgagatgcaagatgaatgtcccaaatttaaaatgtgcatgtgagcacagcaactctttgagcaccggatacgtcgccctttttgatccatgttattttcttaataccgaaatcacacaaatatgaacctatagaatcgaaagatggaacatgatcatgctaaaactaagcagcttctgtgatagaccccccttctaccagttgacttgatcacagttgcaatcttgtttattctttacgcaggcaaatggtactccgcattgtttcagttatctgtgtttcactagcactatctggttattttactcccatcattggctgacattataagcgataaaacatgctctagtcactatgcccgtccatcatatttatctgttcattccagatgtcatgcctttcataatatactgttgaaaatactgtgcatataaaatcagaagtgttaaaagttcgtgttagaatacaagtgagttgcccacctctctctatcagctaaagcttttgagttgaaatggttggtgtatgcaactcaatgtggtatcaaagccagaggtctcaaatttatatcctgattagcgcaattaaataaaaataatcgttattagttcatattccacatttgaggtatgagaggcttgatgtgagggggagtgttagaatacaagtgaattgcccacttctctttactagtttaagcttttaggttgaaatggttggtgcatgcaattcaatagtttgattaccagatttaaaactatatatgaataagtgttatttgtcttcaaagtatgactttgacaacaaaacttttgttgtatatttttggacatgatgcaatttgtgttatggatgtgtttttttttttgaatcacatttgttcattttcatgtgatagattcaaaatgataaagacgcctttagtcaaacttaaaatggtttgatgccttgatggatcttgcagtggtacttatttgtaactgtatggagtgaagttgtaggttattactgtcctgaattctgggagactacgtagctaggtttagagatattgtaggctaaagtttgagtttgataattataatattcagatttatgatgatagaatgtaggaaaaagtaaatgtaggcgaacctaacaaatccagaaacaagtggtacaaaagaatgcagtaaagctttcctaaaattgcctacttcttgctacaacaattttagaataaatacattctcaaacgagtgatatgattcatgggtgaacagtgaactctgtttcaaggttattgaacagtttttaggtgactgaaagattcgatatcaggtgaaagataaacatgtgtttttttatctcccatttcggttgtgcttctagaatttaacaccttatagtctttgtggttgatgcatctttcaaacatgttttgtggaacagttcatctctaataccatgctgtaaatgtgaaaattgtgttccatggttcatacttgatttgcagggatcttaataaaactaaaccccttaatataatgatacacagaaaaaaataatatgaagctctcccctgtcttcgaaaagaaaaaaaaactaaccccattttttaatttggtaataggtcttgtggtggaaaaggatgtaaacgacattaccatctttcgtgtatggatccttccttggacgtgtccctaggaatatggctttgcataatgtgtatgaaaaagaggattcagtttggtgtatattcagtcagcgagggaattgaatctttatgggatgtcaaggaaggtaattatatcttataaagcgtatgccagtttttctttgattgttatcattcatttattaattctatcgcctctccattttaggagtggtgaacagcaagcaatatttcgttaagtataaaaatcttgctcatgtacataaccagtgggtttcagaaagtgatatagttgatagcaccccgcaaggttctgatcttatctccaaagttagcaagaagattcataaagaaaaggtgattactcgtgtgatgaattccattgcttatctttttcacaggattttaggctctgcaaaagtatgcatgctgatggattcttttctgattttgatttcttagacaataaggtggaagcaggaatgggctgaaccacaccgtctgttgaagagaagattgcttatgcctcaaaaagaagccgaagttttttttaattcactaggtgataaatttgtatactgtaatgtcgagtggctagtgaaatggaaggatctgggctatgaacatgctacatgggaactcgagtcctcatcctttttatgtactcctgaggccgaggagcttaaaaggagctatgaggaccgctttaaaactgcaagaaaagcatctgatccttcaaaagtagacaaggtatgctatagaaaacatttatttgtattaactggcacactgcaacttcatttgagaagaaagtgattataatctgtgcattttcatcatctagggtatatgctcatccctttgctagtccacaacaatcaacaagctctattagttccaagcaagtttgtatttttctgcaattgtctgtcagtctgtcacattgctttgctaagctgccacacaaataatgagctctattagttccaaacagtccttagattgcttaaagagttcacatttcacaattttcagtgatgctaaactatctatgtgctatacaggctaagggggggatatttcagcaactcgagagactgccagatggttgccctcctggtttagacgatgaccatttgagatcacttaaccagcttcgtgagttctggcacaattcttgtggtgctattttcatcgatgatcaggtagaatagaactatctaaatatttagccatcatgcatgaaaaaggtatatggatttgttttattggcaccttccacttaagttcttggattctgtagatttagttgtgcttccagtttttgcttgtctttttatcagttgaggtctatggttactgtcatgacaactctgctggcgcccttgtattttggcagattttaatcgactatggctgaagctttgattattacatcagtgtattttacatgtttaactaattaacttatctattgtacaggagcgagtaattaagaccattctttttgtggcatccatactgcctcacatctgtcaaccactcctcattgtgtctactactactactctctccttgtgggagactaaattcaatcgcttggcagcatccatcaatgttgttgtgtacaatggagagaaagatgtacgcaaatcaatacaagatctggagttttatcaggatggttctgtgatgttgcaagttctcttgtcccaccctgatgccatcttagaggtactattattctcttggactcagcttgtctaagtttatccaataaaagagcaccattgcttgctttagatgcattttgcattactgttatgaaaccatgaagtttacttatcaagtaatatgtacccttttgcttcctgtttgtttccataattacacaggacatcgaagtgattgaacgaattaactgggaagcagttatagtcgatgattgccaaaactctagagtttcaaaatggcttgaacaacttaggagacttcctaccaattttaggatggttctattgagttcctcactaaaggtgctaccaccatccttatatataattctttttgtactgcaagtgggtcatatttgggtcatattttcttattttatcttccaggaaagtattgctgagcacatcagtctgctgtcttttc

SEQ ID NO: 195661 - DNA, 383 bp, Zea Mays
aatggcgcacatgaccgctcgcacagaaacattcttcctaggctttggaggccttggtgcaatggtggcgcacatgaccacttgtgcgcttcgaaggccttggcgcaccgatgccacattggacctcttacacataaagatgtttttcatgcattggaggcttggcgcaccagtggcacaccggacttgtcaaaaggcaatggctatttcctgacaagtcataacagctactaactgagaactctaacaggggctcggtgcaccaccgaaccgacactattcaaggttcgatgcgtcacctatgttgcggaattggcccacttctttcaatgctattttggtggttgtgggctataaatactcccaaccagcacattgaagac

SEQ ID NO: 195662 - DNA, 1670 bp, Zea Mays
cgcatcccataatcacagaaaggaatgtaagaccatccatatcaatgccctcaacttccatctgtcgaaatacatcaagggccttttggctgtaaccatgttgtgcgtaccctgatagcattgagttccatgacagcaaatctctatctgtttgcctctcaaagacacactgagcattctcgatgcttccttttcttgcatacatactaacaagtgcactgctcacacagagtgcatcatggcatctgtgcttgatagaaatagcatggaactgcctacccaggtcaactccagctgccggactagcacaagcatcaatagcactagagattgtaaactcatttggcttcaagccatgcatggtcatcttgatgaatgcatttgtggcaccattgcaatcaccagcttgcgcatagcaagtcaacattgcagaccatgaaacaacatctttctggtcaatcattttgaatatagaaagagcttcttcagtgctgcaaagcttagagtaagagaccataagtgcagttccaacagttggtgtacactcatagtttgtcttgatcacctgggcatgaatttggggaggaaagctggcctctgacactgtcagaattgtcgagtaggttaaatcattcggagcaacaccatcttctctcattctgctaaaaagagcagcagcaagaggtatatcaccgttctgaatgcacccatcaatcatagcagtccatgaaacaacattctgagatcctgacatcaacaaaaatacatccagagccttatccagttgacctgctttgttgtaggcatccatgagggctgtcattacattgccatacgaatgaaaaccatgtttaagaacactactgtggagttgacgtgccaggccaaggtgtttaagatttgcgcataagttgatcactgttgagtatgttgactctgtaagcattgtaatactggatcgtgaatcatggaacagttgtagggcttcaagatcacgcccgttcaacacaaggcccgccatcaatgtgttccacgacaccatgtccctggtctccatcctacaaaacacgaccctggcctcttcaaccagtccacactttgcatacatgttcatcagagaattgcacacaaacacagtggagcagcaaccaaacttaattgattgagcatgcacgtgctgcccaagatcaaccataccctggctcgccaccattgagagaacactcgaaaatgtgaacggattgggccagaccccctcagcacgcatcctgaagaagagtgacataacatccaataacactccagcctggatgtacccagtgagcaacgatgtccaggtgacaacattcctcttgagcattccctcaaacaccttcctgccgtccagaacactgtgccagttcatgtacatgtcaacaagagacgtgccgaccctgatgtcgccatgatcatgtccacacctgacgcacagggcatgcagctgcttccccagtactctgtctggcactgacccacagattttgatgatgcctaacagtgccccaccgccaacacacctgccctggcggcggtgcgcatccaagaagtggtctagcgcctggtggacgaaaccctgccatgtcgtcgagaagggcatagtccagggtgtccttgtggggaatttcgtcgaa

SEQ ID NO: 195663 - DNA, 791 bp, Zea Mays
caccctagggagcagctgcagaggcagccagagaacataggcccttcgccccagctgcctcccaacgacttctctcctcatctgcccaagcaaggatataggtgaggcatggagacaatccatcgaagacacatttgttccgatggatccaaatagtccaagcacccaggatgataagggagttaagaccctttctcgtgacacatgagaccacctctaaaacctcctcccaccaattcaagaaggaggtgatcgtcggctggggggcaagggagtgaagcccaaatttccggaaaaactggtaccaaaagactctcaagaaggagcaagtcaccagaagatgatcaagagtttcttcagcttggtcacatagcagacatttctcagggtggtttaggcctttattagctaatcgatcggctgtccagcatctattatgggcagcaagccaaatgaaaaaacgacactttggcggggcccaggtcttccaaacccttgtgtagtgtccaaaggaaactgaacccatgaacagtccattataagcagattttgcagaatacattccatctgggacaatactgaaaatatgtctgtcttcaactccaggctgcaactcaatggctgaaagcatctcccatagctggaggtaatcaatcaacacacccactgagagagccccttttatgtcagcaatccacttcctgttagtcaaagcttcattcacagttctgttgttcacaatccgcttaggaattgtagctaggagtctaggtgccaggtctacaattctt

SEQ ID NO: 195664 - DNA, 448 bp, Zea Mays
cagccaagacttcatcagcttctcgcatctctcaaacaaggccatacaagtagaaagggctaaagaagaagaaaagggtcacctcaagagaaagttccaggtcctccgagctcagcagcaggacaggcagcagagaattcgatcctttgggtttccacccaagggaccaagcttcaacaagccagctggacccactccgtcacgtttcaatcagcagggtcaaagctcccttcaggccccctccattgcaagcaaccaacctctagccaatgcctgttggcactacggagaccccagtcactacaagaataattgtcctcagttgaaggcatccgtgcccacccgcctccaaggcaccctcctccaacagctagcagagcaagacccagtatcatggtacgacacgcgtaaaccacgtcgacgcgcaagaagctcagcaagccccggg

SEQ ID NO: 195665 - DNA, 532 bp, Zea Mays
cacgcgcgcagtactaccgtggctaccaccgacgtgtggacccctcttgtcatggttgttcctcccgtgcggccatgccgttgcaacggcatcgtgcgtgaccgggggaatcgaggttggccgttacgggagttcaggataaagctctggtgcctccacggttttcccatcttccctgtcttccctcgcgcatgacctaaaacagtcgtcgcagccatgagatgaaggaaagcataaaccaccaccgccttcgatgccgaggtcgacatagcaggatagcacaccgttggcagtaagctatggtcaggagcggacttctggtcctcgtggatctaaccgtgcggactgcagactgtgggacgttggtttggagcggccgattcctcgttggagttccctgctagcagacagcaccaactctcgtcgtggaccgccttgtcactgccgtgaaccaaggtaaaatcgtcttctgcgtcttcgtgaggttcccttcagggtttagcatgagtcaatttagagtttgggactgatt

SEQ ID NO: 195666 - DNA, 693 bp, Zea Mays
tttagaaagcgacaaggccatggttcgtgaaaacatacttggttttattgttcaagtgccccctttgttaaggtaaatacttagtagtaccctaaatttccacctaactggtggaatgtctacaaagtgttattgatcaggctttgacatttttttagtgccaactttgttctgataattagcacagccacttagccactgtttatttcatcccccctttatgataatggctgtgctgaatgagatatggagaattgctgttttgagtattatttgtttgtctatttgattgcaagtgaagcagtaggtataaaagtcttgacatatcatttgcttcatacctgtttgttgcagcctctttaggctttatgggttataattatttagtagaaatatcaattcaaataattttggacactataatattgtaatgccatgcttaacatctctctttggatgaagttgaaagtctgccatctcgcggtggaaatgttataattctgtgttgtcatttacgaaagcatccctttaacattttctggttatttgtagagcccagcttggagaaagtatcaaaacaatagttcattctgattatcctgagcagtggccaagtctccttcattgggtttcacacaatttagacttgcagaaccaaatttttggtgctttatatgtcctgagggttcttgc

SEQ ID NO: 195667 - DNA, 431 bp, Zea Mays
aaagctgcgtggtaatccaaagtgatcggaccacaccttcaacttcaaataaaattaggaatagcgtttaagtcggaggaagaagccgccagcacattatacacacgcacagcttccaagacaaacaccatcgtaatgactaatcagcaattcactggcacttgagacgccaaatccgctcatagaagtacacatatcaagaggtgactacatcatcactctactgcttctcggcatagccctcatagtggagctagtgcatacggcattttatctggcatcggactgggcccaggtagcactagccaccatgtatgtcaagaaacaatggtacgaaatcagtacatccatctttggagcagtcaccactttccttagcagtcaccactacatccatcgttttcgccgttgtcggacgtctcgttcatctt

SEQ ID NO: 195668 - DNA, 505 bp, Zea Mays
tactaagctatttatcttaacaatgtgccctaagcccagatggtgaaaaccaggacaggaggaggaattgatcaacctgcacgcatacgtcaaggaagatcatggaacagttcggaatcacaaatgaatcctccacctgctgggttggaagcgttcctcgtcgcttagacccagttgttgcagaatatggcgaacattatggccaacatgcaggctcagctcaacaacaatcagcagcaccaacaacagcaacctcccatggacaagcacagagagtacatgagtcataagcctccaactttttccaactccccagatgcattgcaggctgatgactagttgaaagctatggaaaagatgcttaatatcgcacaatacattgatcgggataaagtcttttatgcatcaggtcgcctctctggcctcgctgctgattcgtgggatgcctattgtgcagcacagacaccatcacttgggccgaattctcaacaaacttcataaatta

SEQ ID NO: 195669 - DNA, 363 bp, Zea Mays
aagggggttgaactcgctggtgcgccaagattctgtgcgtgaaatggtggactcctctagggtggatgtggtctgttttcaggaaactaaaatgcagtccttctcaattcacaccattctttccctgctcggatcagacttcagttcatacatttttctaccttctgctggggctagtggaggtatccttgtggcttggagaagacatattggggtttcaggccagaaaagacaggacactcacagtgtttcagttcagttttgcagtgaagatagaagtgcgtggtggcttacttgtgtgtatggccctccaagaaatagtgaaaaggatagttttttacaagagctcagagatattagaat

SEQ ID NO: 195670 - DNA, 549 bp, Zea Mays
atttacttggtccaaccatcaagagacacctgttctagtcaagcttgaccgagttctttgttcagttgactgggaactgctcttccccaatgttttacttcaaagtgctgcttcccaggattctgaccattgccccttgcttctggggcttagggataataaatctggaaaacgaaggtttcacttcgaatccttttggaccaagttggatggctttcaggaagttgttcattctggatggaatgctgtgataccggtcccttgcccgtttaaaactgtagatctgaagctcaaagaaaccgccaaaaggttgcaggcttggagcgaaaagaaggttggtcacgtgcattctcagcttgctttgaccaaagaagttctccacagacttgaaatggctcaggacattagagtgctcagtcaggctgagctttggctcaaaaaccggctgaagaagcaagctcttctgctttcctctctcaagcgcaccatggctaggctcagatctagaatctcctggttaaaggagggagatgctaatacaaaactgtt

SEQ ID NO: 195671 - DNA, 406 bp, Zea Mays
gtcgggaacaccttataggccagatattcttggactagatctctggtgctgatctgctcggctaccacccggaattctgccatagcttcttggcacggtgaccccgtcgacatgcggcacaggggcctagtcaactcgaagcttaagctcaacgggctcagtactagcgtcttgagcttctccctcttcttctctttggccctaacataaaaccactcatttttccaaccggttggccacttggtgcgatagctaaccaccggagacttcatatctttgcggtaagcaaagttgtaacaaccaaaactttcatgaagtccatcttctctggccttcgtctgataatgaagctcatgcactcggcaaaaagcttcggcattcgggtctattccttggctttggagtg

SEQ ID NO: 195672 - DNA, 807 bp, Zea Mays
acgccgttttgttgaggactgtacggcgcagtgtgttgtcggtgaataccactggccatacaatactccgcaaattcacccgaggtgaactccccacctcgatcagttcgaagtgtcttcaacttgagtccagattccctttcagcttgcatctgaattcttttcactgcatcaatagcttggtctttcgacgagattgcatccatccacatatatctactcaagtcatccaccaacaacaagaaatatttgttacctcttggtgtcattggggcaataggaccacacagatcaccatgtaccaactccaagcgctgttttgcccggtattctgcctgtgctggaaaagaggtgcgtttctgtttgcctgtctggcatgcctcacacaccctttcaacctgtccgagcttgggcaagcctcagaccagttcttctttctccagtttccgcagtgcagccatattaacatgaccaaacctctcatgccaccgccaggctacttcatcttcgcgcccacgcactgctaggcacacagactgttgtatcttcaaatgaaggaggtacaacctgttttcagctcgcactattcttgccagtaatcttccatcaggttccctaatatgcatcaccccatcatcaacatgaatcttgtactttgcttcatcaagttgcccaatactgatgatatttgttgtcaggcgaggaataaaataaggcccaacaaacgaccgggtctcgccattcttgcacataaacttgatggttcctcgtccctcaatctgagccaccgagttgtcaccgaacctg

SEQ ID NO: 195673 - DNA, 366 bp, Zea Mays
tagtgtactgtgtcttctcaaggcaattttggttcctttggttcaagcaagttggtcttcattctctagccccaaccaaccatgtttagtttcttggattggtggcgcagagtcaatgatttggtgggtgaacaattgacagggggattaaacatcttgattattttgggggcatggaccatctggaatcatagaaacaaatgtgtgtttgatggtatctcacatagtatcgcgactacgatgatccaagttggtgaggaaagacatctctgggaggcagcaggagcaaaagggatatctttcctaacaactcctctggatgttcattagtttcttttgggtcttttggttattgcttcatgtttc

SEQ ID NO: 195674 - DNA, 833 bp, Zea Mays
tatgcccaaccatggtcagtttgcggcaacacgggcaactacacggcggccagcacctaccaggacaacctcagccagctcgcggcaagccttcccaagaaagcctcttcgaacacgagtcccctcttcgccacgggtaccgcgggtgcagtgccggacctggtgtacgctcttgcactctgccgtggggacatcaacgcctccgcctgcaaggactgcgtcaccataggcttcgaggacgcgcagcagctctgcgcgttcaacaaggaagccaccgtgtactacgatagctgcctcgtcagcttctccaacgaagacttcctgtcgactaccgtcaacggcaacgagaacgaggtcaccgtcctcatggacgcccagaacttcacggagagcgcggactacatcaggctcctcttgttcactctgctgaacgacacgtccgagtccgcgatcaacagcatcaggaggttcacgaccgcgcggatggacattagctccctgccgacgatttactgcgctgtgcagtgcacgcctgacctcaccgccgacgagtgcgccgcctgtttgcaagacttcccgcaggtgacgctccagtacctcgacgggcagcgaggaggtcgacttctcggggtgcggtgtaacatgaggtacgagatctacaaattttaccaaggggaccccatgcttcgtattatctctttggcttcggcagtgccaacgatcggtaaaacccctcccggaacaccagtcacggtgtatccgcagcctccacctgcagcgccaccagcgccgcagatgataaccacgcctatcgcagcacaagaagagacagg

SEQ ID NO: 195675 - DNA, 762 bp, Zea Mays
aaaatcattacttatcatgataaatccagtcctagctacttctgttaatggggattcctttcaagtactattagatcaactgatgcatgctatatgccacaaaaatcatgatatatcatcaagtacaggaggaatgccccatgctgcattgagtaaaacacaactgaaaaagagtgtgaattcaaatcttttagcagatgagaagtggcatttgataggcgcttctgtgtgggttcggttgatatctgtgcttgaacatcgtctaagggaattctttgagaaagagggacttgaacatgaagctggtgttagtggttcagaattcaggggtcttatcacttctgttgctgcaaagtttgttatggattccattcattttgtgtcatcttcattagtaccactgcatgcatcgttcttgaggaagaatttaccgatgaattcaagttcaagtttgctcttctggttagagtccaagttgcctcagcaactcccagtcagtgatagctatgatcacctctcgaggatttcacagctttcaaacagtgagaatatggaggcattgtttaatattttgtgggaaatatctgttaatcctgtggatgtttgtaatgcctttgtgagtgaaggagttaattgtttttccttaagcaacacgaatgtcactagatcttggaaggacataagatgtcctgtggttgagtgtgataaaattattactgaaagaagtggagaggaacatgaacacagacttggctccaagag

SEQ ID NO: 195676 - DNA, 291 bp, Zea Mays
acatagcccggagtggaccggtgtgtgtccggacaacccgtgcagttaccgttggtgtagggacgaggtaggaggctgaagagcgtagaagaagcaagtcgtagttgagtgtgccccaaaggtacagaagaatctgttgcacaacagtgagatgcgactcccgttaatcatgcatgtagaggcatacttgctgaacggtgtagatgtcgggcttggtgaaggtcaggtgttggagagccccaactaggctcctgcaagcggtgggatcgctaattggagcgccgtcgtcag

SEQ ID NO: 195677 - DNA, 344 bp, Zea Mays
tgtgaatccaatctgtgcctaagataatactataatttccctctacttcgttgacgaagaaggcaacaacgagggtctttgtctcgatggttaactcaacagatatgaaacccttcgcctcgattggattgttgcacccaacaccactaagtatcatgttggtcctgatcaggtcgctatcttgcttacctagctttctgtacaatgagtaaggcattaaatttacggttcctcctccatcaatcagaatcctagaaatcagtgtcccatcaatgtggctgcgcacatagagcgttttcaaatgattgaacaattctttgggtttgggaagatcatgtctttag

SEQ ID NO: 195678 - DNA, 327 bp, Zea Mays
tccgtctttgctcctgtcggaaacctcaactatcttcattttttcctcgtggtgctctcttcctctctgcccagcgtagcagccgatccaattacccagcagcatgtctctgaccatcatctgcttccggctgctgaagtccgtcactgcatcagcccagctctaggttgtgcacatcacatggctgtttgtgcgctcgtccatggtcgccatcgtcggcacccctggtcgtccgtggtgcttcgttttaggcgctgctgtcatggccatagggtgccgtgtattccctactcatctcttcgacattcatggctcgtccttgccact

SEQ ID NO: 195679 - DNA, 690 bp, Zea Mays
cgaagattcatcaaacatacagaataggctatcttaaggtcagtgtctcttcataattgttagctaacttttgtaccgccttggtatatgttaatactccttttacttagctgttaatcttttttatttagcctcctctatggcatgacgttttttggggggcatttgcaggatgttattctgccacgaatattggatgatgccactctaggaagttttaacacaatgatacattcaaataatgcttctgttagtgtttcagtctcacccttggtatccttaaattgtttcccatttgttacttattacgatataataatctgcctttaggttatttccatgctaaaggatgacacaccctttataagacaactatttgctaggatgaggtcatcagatatttctatggaatcaaaacgagaattggtgagaaggctgtattgttcttgttaatgacgacttggtgtctttgttttttttaacagttcttgggcgaagtcactaactcactattgtaaattaattagcatcattacaatggaattgagttagatagttaatgctaatgaggcgagactgccccatcgctgctggcactgatgcaaatttgattattatctgagtctaattgttctttataggaagttggacgtctagtttctgattgcctttagggaatttgggttaatg

SEQ ID NO: 195680 - DNA, 555 bp, Zea Mays
gacagaccaccggtcgtcgacgcaatggcctactggagcctcaccgccacgcttcagtatcgaggactgagcccgcgcaggtggttaagaaccatagtctcatctgtgaccagggagccgagattgcggagggtgtctgccatggtcttcatccgccgatagtattcggttacggagaggtccctctggacaagctggcgaaaggcggtgtctagatggagaattcggatctggtggtttgcgaggaactgagcctcgataacaaccgaggcctggcgagcggtgcccttccacttgtggacgatgtcctacgtctagaccgtgagagtgtcgaggatctaggagagtaccatgctgtccttccgacacaggcctgcgtcgacacgatcgtgtcagtgaggacgtggtcgtcgaggccgtatctgtgaagtgtcaacaagacctgatcacgccagcaagtgtactaggtcgagtccggggcaaggacgacagagacaagggcccatatgctggggagccctgccgcttgagcatggaggctgactatgactggca

SEQ ID NO: 195681 - DNA, 421 bp, Zea Mays
actccgcaatccagcagaacttgggtccggtcggcgcagtccgactccggcagggacaatcgcaaccagcaacaggtgcacaccatcgccaaccaacatcccaccggagacacatttcgccgtcaggagtacccctctcaacaaaaccgcggcaacagcacaagaggaagaggcagaggccgagcccagcagccgcgaagattttcttacctgtttcacggtgaagactgcgcacaccccaccagggactgtccggagaccgatgccaccaaggacagaatggctagagcccagccaaatgacaaccaacgagtcgtcgcgcacacctatcacccccaacaatagcaccagcaaccatacgacaccgggcaaatccatcaccaacccaaccacgtgtaccatcaccatcaagaggtacaag

SEQ ID NO: 195682 - DNA, 541 bp, Zea Mays
actgccgactgtttttccgagtcaaaggagcttcattctcttcctcctcatcttccacagtgacaacacaagcagcacccccattgggatcagcaacagataaggcacctacattgggatcagtagcagtttgggtacacccattggggtcagcgtcagtaggtccagtcgcaggcacttcttcagcggcaggaactaaggtaccaacgtcttcatcaaaactggatactcgtcggaggcgtcttctcttcttcttttgctcatcagcagaaggctcaggctgattggttcggctagggcgcctcgggcgagtactgacaggtttctgaacatccaaagttgtatcaacctctggaaggggcacaactgccaaagtaccagcaggagcagcgtcagaagaatcctcagctagcagatcaagcatggcatttatatctgcatcactagggttcaggggcacctcaaaatggacttgccgttcgtcatcaggaatctccccaagcgaagcaaccaaagcactgacttcttcagcagagggtcg

SEQ ID NO: 195683 - DNA, 585 bp, Zea Mays
gcgacacaagggtggcggcggtggcacaagaaatggaagcgcgggaagcttttctggctgacgttcgcttccgtctcgagcaggctcaggcggtccaaaagctgtagtacgataagcaccaccgggaggtcacatgaggttggggactgggcattccttcgccttcgccaacgtgtggcggcgtccctaccatgaaccatcactgggaagctcaagcctcgctacgtgggaccctaccgcgtcaccgagctcatcaatgacgtgcaggttgttcggctagaattgtcgcccggcgcgcgcctgcacgacgtgtttcatgtcggcatgctccggaagtacatgggtcaccacccaccacaccgccacctctaccacctctgctcaatggtgtggtagcgcctgagcctgcaaaatagcgagggctcgcttgtcgcgtggcgtgcggcaagtcctcgttcactggagcggtgaaccggcttcatcagccacctgggaggagttcgacgacttccgcgcccgattcccagccttccagctcgaggatgagctaatcttcgacgaggggagagatgtcatgtatgagcg

SEQ ID NO: 195684 - DNA, 1244 bp, Zea Mays
cagcactcggggtaagcttgctgttggagaaggtgataaagttgctataaaggatgtgggacaaatcattggacagcctactgcagcacctattacagcagacaaaaccaatatgaagcccctttccaggaatattgtccgctttgaaattgtccatttagtttacaatccattggtggaccattaccttgctgttgctggatatgaggattgccaagtgttaacattaaatagtcgtggtgaagtaactgatcgccttgccatagaacttgctctgcaaggaccatatattcgtcgtttggaatgggttcagggttctcaggtacaactcatggtagtaacaaacctgtttgtgaagatatatgatctctcacaggataatattagccccatgcattattttaccgtagctgatgatgtgatagttgatgcaaccctcgtcccctcctcaatggggaaattggtgctacttgttctttctgaaagcggtgttttatataggctgaatgttacattggagggtgatattggtgccaagatattgactgaaacagtcttggtcgaagatgtcatatccatgcatagagggttatcattgtacttctcatcaacctacaggcttctttttgtatctcaccaagatggtacaaccttcatgggacgtttgaatgctgattcttcatcaataacggaattgtcatatataaatgaggatcatgatggtaaatctaagccagctggactctactgttggagagagctagtagctggcagtggtatccttacttgcctatcgaaatctaaatcaaatgctcctcttgtggcgttgttgagtcctcatcaattggttgcacaaaacatgaggcacaatactggtgcaaattcctcagtggttggtgttgctgcctataagcctttatccaaagataaaacacattgtcttcttttgtatgatgatggaagccttcatatttactctcatacacctagtggaggtgacggttcgatgaaccttacagcagagcaaacaaagaagctgggcagcagcatactcagcagtagagcttacactggcacaaaaccagaatttccacttgatttctttgagaagacaacttgccttacatgcgatgttaagttcaatagtgaaacaacaaagagtggcgattctgaaagcattaagcaaagattgacatcagatgatgggtatttagagagtttgacacctgctggcttcaaggtag

SEQ ID NO: 195685 - DNA, 426 bp, Zea Mays
ccatcaatatcagctcgtggaattctcgtctacgctcgacatcttttcccgatagtttcgctacgctttgcggaacctccgctttgctccacacaattatcttgtccaccccaaccatcgctcgataattccccaagacattcctactcgcgtctacacggtctaaccccgtcgtgtacctctcggtggctacctttgtctacccccaccttttcttgtctcgtcccgccacgcccatgggttgtgtgcataaccgccattcccacccacccattcctctcattgttgtcctggcccatgtgtgagctccgtctaactttatctaatcccatttgtttctgtctaacctcgtcttaccccatcacgcgcaactcaccgcacaaccgtcttcccataacatcccctctatgtaaacacatgcctcag

SEQ ID NO: 195686 - DNA, 408 bp, Zea Mays
gtgttcggaggcttcaatctcgaaagttgcctggtgagcgtgacggaaggatatggatgtggcacaggtgcctcaagtgcaaacctaaggatggtgttccacctgccacacggaggataatcatgtcagatgctgcctggggtctgtcgcttgggaaattcctagagctaagtttctcaaaccatgcttctgccaaccgagttgcaagctgtggacattcactccagagggactgccttcgtttttatgggtacgtgtctgctatattctttacagtatcatattgttctgtgctccagtgagatctcaacaattcaaatacaactccaggtatggaaacatggtggcattcttcagatattctcctgttgacattctctcagttaaccttcctccaccagtactgga

SEQ ID NO: 195687 - DNA, 271 bp, Zea Mays
aacatttactgccttggtaaacttgttagtcatgttagcctgttcgctgcggctttaatccaccggcttgtttttgttgctacttaaagatgactgattgttgcacaatgttgctttttatgaaagaatgcactgattgctgtttggccaattggttgaaataacaaattagtttagagcaactttgttcttcaccttgcatcattcttatatttatttttattatgcatagtgacattttctgttatacttcaggccgtcagaagttgtt

SEQ ID NO: 195688 - DNA, 394 bp, Zea Mays
tgcagaatgcgcgtgagctgtttgacaaaatgcctacaaaggatctcgtggcccggacggccatgattaatggttatgcacagactgggcggccaaaggtggcactcgctttatttagggatctggaggctgctgggattgagcctgatggagccacaatggttggggttatctctgcagtttcacagataggcagcacggagttggctgggtgggttggagcttacgtcgacaggaagaagatcgaaaggaatgagaaggttcttacagcactagtagatatgcacgcaaagtgtggcaacattgagcaggcactgagtgctttcagggagatcccacgacctgatgcctatccatacacagcactgattagcggcctggcaacacatggaca

SEQ ID NO: 195689 - DNA, 832 bp, Zea Mays
ctgaactactcgagctctgactagagggagtcacccaacctggatctggtgcaacactagatgcaggggtgaatgaggcaccaccagatgagggtgcaagtggagtattgggttctgcaggctgaccacctccacttccctgtccaactggagtctgttcccctgctgtttgggctgaaggttcacccatttcagtatcttcatctactatcggctctctgtcagagatttcatgatcaaccacaaaagtgtctgttgtttgcatgtcagtttcacacaagaagttgtcccagtcccaatgcttactctcctcaaaaatgacatccctgctgaccacaagccttctggagattggatcaaacagtctgtacccttttgtacccgattcatatccaatcaagaccattttacttgacctgtcagataatttattcatgcctggaccaagttgcttcacatgtgctacacacccaaacactttcagatgactgaccttgggctttctaccatgccaaacttcaaaaggagttctactgtccagggccttggtaggtgacctgttcagtaaatacactgcagtcctgattgcctcaccccaaaatattgttggaaccaccattgcttttaacaaacacctggccatttcaaccactgtttgatttcttctttccaccactccattctgctgaggggaatatggagtggtagtgtagtgtttgatgccatcttgactgcagaaagtttcaaacagaatagaggtaaattctcctcccctgtctgtcctgagagccttcaacttatcaccagtttcagtttctgctctttgtttaat

SEQ ID NO: 195690 - DNA, 681 bp, Zea Mays
taaatatagagacaatataactatttgaaggtatgcaagacaattatcttgcttggccacaagggccatctcccatgcttctttcttgcttgtctgttccttgtgcgcgaccatagctcctgtgtgccgtcgggggttcacgccccggccatcgatctcctactcctatacatacaacttacgagtcatagtaggatttcaaattctatcaatctggtatcagagatgtcgggtgacgatgacttcgagaagcagctgccaattccaccaccaccggccattgatgctaccacgaatgccttggcagacatagcgttgttagtggccaatctccccatccgcatattgtcactagatcaccaacatgtttcctccactgtaggagccttgtctcaagattttccttacgatatgttggggtacggggcaacaatgttcccttccttctccaccataaccactatgctgccctccacaccctgctcgtcgtgctgcttgccacccttttgcacatcgcaatagccacccctaccctgtccgtaccccttcccatccgctagaacccgcaccaatgtttctgcagtggctgcttttctcatctgtgtgggcaccctcaactatagacgttgcccgagcatctgctggtttgggcgttctctatttcagcaagcttgatttcta

SEQ ID NO: 195691 - DNA, 415 bp, Zea Mays
ctctacttgtctgccagcttgcagaagcagcaggatcttcattggtgtccattatcgtagatcacatattcctctatattaaagatactggttagtagtagtgccaaacaatttcagatatcaacctttttgtcctgctacggtgacttgtttattaaatcattggtgcaaacagagtttcaacttgaacttctcatgcggtctttgttcttctcacgggtaattttctccaagacttcaactgctgttatactttacagtttgatttgttcactgttagtactgtccgctgatgatatgcttgatttagaatgcatgacctcgtagaggatttaattacaagtttttctttatcttaaaggcaagcatttcagacggcgaatgctcaaagaacttatcttgcatcaaggtcggc

SEQ ID NO: 195692 - DNA, 572 bp, Zea Mays
gctgtggcaaagcagctaccgcgacacaatccggagtgtctccatcggcgcgggcaggtcggcacgcttctacccgcggagcgacggggatgctgagagagcgagtagcttttcgtcgagcgccagctcgacctccttacttgctgcatcgtactctggctcggggctctcctccaccgacggcatgtcgtcctttcgcggctgggggactgcaggcttcaatggcgtccacgagctccgggggatcgcgctccagatgctcaacgacggttacatccgaggcatcatccaagcgtttagtggcggctcgtcagtggaggcgaacggcggaggccctgaccacgaaaagctcatcgtggagaggtggttatcggagctagacgtggaatggatcctccatttaggagcgaattcagcagtgggccaggggtggtcggagtccccatccatttttatggaagaaggggcggaaagaagaaggggagctataatggcaagagagatggaggacgaggagcctcttctaggctctccgacgacttcgtccaccctccacacgggggaagggaaag

SEQ ID NO: 195693 - DNA, 483 bp, Zea Mays
caaaaaccgactacaggtgcagccggaccgacataataaacgcgctagatcaagtgcacaagtcccccacgggcacggccggatcaacgaacgcacacagcctcatcatacaaatcatcataccaattaaagttacacacatacagtgagggcatcacaccttacattggttcaaccatcgggatgatacccatctccctgtagttaaacaacattatcctcagctcctcgccctcaaagagacttcgcaactccccctcacctacactcaccccaactggcgaggacaacaattcccacttgccagccctatccacacgaagacgcccaccctccacctcactcactctacgcttcgccaccgcccttcgccgcctgcgcccagcactcggaccaggaaaaacttcagcatccatcacacgctgagaagcctccgtcgcaaccgcatccaaggccacaaaataatccaagtcctcatccgaa

SEQ ID NO: 195694 - DNA, 1383 bp, Zea Mays
ctctgttcctcataagcatataagtcctcccaggttgacctgaggagcccactccacgaattttcactagtaaccatatgaggaacttcactccagagactgaatcacagcatgtatccagtacatagagaactgacagcagttcttcatcacctagcctccatttggatgcagttttatcatcaggctgcaaaggaaggatgcttatagaattggtagctttagaagctgtcattccgtttccatcaacaagctgtcttattgatttcaacaaccatgaagagacagatcgtctttcgagcaatctaagtctttttagtgacttccctattgcagtcacgtttgctgcccttgtgtgatcaaaatctttgacgttgtcaccatcgttattaggttcatggtggggacagctcatcttgctttcacaaacatgactagtagatgccccctggctaccttcgattctagcagctgcaagctgtgcaagactttgtgttttacgaacaacttttgccctacctctagaagtttgcttaacagacttctgtacaggttcaacgttgaaagattcttgtaactttgtccctttcttcacccaccaaatatcctcctcgcctgattgaatcaatggaaacccttggaaaggagtggcgctgtcatccaatttctgccccttggacctcatacaatcctcgcatccacttttggcttccccagtctcaacttgtgtgagcgttgacgttactgattcttgaaagcttgttttgatttcacaaagttttgattccactaggggaggatatgtaaaacccaacagacttgacaaaagagctttaacatcttctacttgttctagcactcttccatgcttatcaccttctgatgcaactggaagatcactctgcttccgaatgcaggaacttgaagtgtactcacctctgccacttgcataaaatgaatgaccacatgaaagttctgagagaacaaggcgtcgctcactagagtatgttgacatcatctcatatagctgttgctcttctgcagtcctagtttcctcaagaacatcaaataaagaagacccaggaagctgcttcaaagttctgtgatgcctcctttttctttcaacatccagcattgtatcgttcttatcagtaattccactaataattagctgcctgacataaacctgagggaaaaatataccattgcggataagctccgcgataagaacatccacccgggtaaaacctgcaacgttgctaacttcatgctgatccaaccaacacacaataatatcatgcagtggaccagggctttcaaagatatcatttgtatccttcttctcatcaacattttttgcattacttctcagtccagaagaat

SEQ ID NO: 195695 - DNA, 544 bp, Zea Mays
caatttccccctgatctgcttgatctttgcatcaaccctcgcagtgaaaccaatctttgtcttctgcctggccttcgaccgctccctcttccacatcgtctggtcttcaacatctttctttaggtacttgatctcttgaatcacatggtgatcaagtggattgcacgatctctggtaggatatgtgtatcaggtaggggatgttgcaggcagcagtcaccagaagcgtcgctgcccagtatatgggagctggcccaaggacttctaataggatctggtagttgtcgccagacctcaatgtcatcccataggcgaggatgaagagataccaagttgttatgctgccccatacaaagagatgttgaatccatgtgaaatggctcattgttagggcaatctgcatgttgacagcccagatgatgcaggtgaacatggtagttcccaccgcagcaatgtctgcagtctgccccccaacacggattgcctgatcatagaatatgcagagattgaggaagaatatggccagagaggagtagaggccattc

SEQ ID NO: 195696 - DNA, 407 bp, Zea Mays
ggtcgtgggggccgttcaagcggccaggcagacctggtgggtcgcgggggctatcgccggccgtcccacgggcaaggtgggcacaggggtcgatctgtacgtggccgtcatgggagctatggcctgggtgctggcgtcgctggtgggcaccgaagcaactttgggtatgcaggttccaatcctggaagtcgagatcagttcagaggaggcttccaggggaacagaggctctcgtactccggttaacctgtcagcggcggctgtgccggacccatctgcatcttctactggtatgattgcacaagctgttgcattgctaagccatgcgatcgggcagaagtcagctccggtgactaactgtgctgctcttcagctgggtgctggtccttcaaattttgcatcggacaa

SEQ ID NO: 195697 - DNA, 550 bp, Zea Mays
acgggaggcatggagattatcgattgtatcatgcgcgctaattcgtcttgggatcaaactcaacaccatgtctacacacgctactcttactcgtagcaaccacaggggtggcacgccatgcaaatgtaacatcttccaatttgtctttagattaaactcttcactgtgtctatgacacgagggagtgaaggagcatggaaatgttctatactttgatattaggtatagacatgcacaagggatacaactccctcatcattctagaattgatcagcatgatgggaagaaacatattgcaacggccatgcataaggaaatttgagtggttcttggtgtctcaacaatttggaaccatcagaccaatgtcatcttcaagaatggctcctcccttacagaggatgtaagatgttcacctacaaagcattgctagtaccatgggttgtagtcattttttgtcatcttcaagaatgactccccctcattacagatgtaggctaactcgcctctgatgccttgatagtgtcatgggttgtggtcttttttattaaac

SEQ ID NO: 195698 - DNA, 1010 bp, Zea Mays
aacacctccctcccctgcgccggggctcctctcctctccggactcctttcctgctggacgttccaaggcccagcgctggagtgatgatggtggcggccctgctgggaggcaaccttcatatagggatgtgttgatctcctcctccatccctcccgtccagcccccccttgatgacgttcctgctgatggttgggttacggtcgtgaatcgtcatgctcgctggcgccgttctcgtcctccgaagcctccccccaggcctatccctgccgacttgcgtggcaaatgtttcaactgtttctcgccttcccaccgtgcggctgtctgtcgccgtctggtgagatgtttcctctgcaggctgtctgggcaccatgctagcgtgtgcccgcgccggcggacgatctcaggattaccacgacgttccctggtgtggcgtcctgtctctcactcttcgtcttccaccatggccccggtttgcgtggagggtggtcaggatggtgacgccgttgcgggctccggtggaggcggtggtctgagctccggcggcggcggtcaccgtcgaactcgacgggggcacaggaggcggagggcgagcggtgggctcggtggtggggaccgtgctgaggcctctggtgggacgccccaggcggccctggaggttgatcgcgtccttcccggtgtcgcttcccggccttcgcgcttctttaggcgcacccagaggatcactcaagctgaagacgatctccggcgtgccctgctcgtctctgttgtgggtcgggaggtctctggctacgccgcggaagtctctgatgcgctcatctcgagatatgatcttgaggcggatgcgctcgatcttcgtcgtgttgcgccgagcacctttgttgccctccttcccaacgtcgagctggctgatcgggtgttcaatggtggtcagtccctctacgcacctcccctcctgcacatcagaagatggtctcgtcatttcatggcctctggtggtagcgctttgccgc

SEQ ID NO: 195699 - DNA, 628 bp, Zea Mays
tgtgtatgctccaccccacttccttgttcggttatgcttgcactcccatttgttggcaaggtagcgccttggcatggaaccctacattgtactgatggaaacacacgtttagtctgactacatgctatcgccgtcgtgcaagatccatttaagattggatagtaattaccattgttgttgatctcagcgtcaccgatagtatccccagtcgaagtagccacgttccttgcaatggatgcttcaaattgctagtttcgacgggctaagatagcttgtcttccccacgcggcacatgatgtttacgtcttcgtggttcagtagacatatcgaatgaaccgacatcctcggtctatgttgaagctggcaggaaaggtgtcctgacgaattcagggataacccagtcgcaggcggtaactgaggatccatcaggttccgttgcatccgctgtagggtgtacaacctcaggggtatatgttgggtcctccatggcgatggacgcatgattcaaagtgtcagcctgcagtgctctacgttttctcatgtactctatctttgcatctttccgtcttggtgtctgattatacaacctaaggcgttcacgcctagactccctcacgcctatacccgg

SEQ ID NO: 195700 - DNA, 360 bp, Zea Mays
gtttttgttcattgaactcctggatttggtctcatgtgtgtagacgaacaggcatttggacggatttagaactcaagtatgtgctctctagcagaaccaacaagagcttttacgcggccatggtttgaaaccacctgaagatttggctatcaccacaccaatcttatgggctgtttcctagaagccagtagcaaaaaatgtgttagtaacaaatcgtagcatatctacaagagcagatctcatcgtgttattttgaatccaagcataaccaaactttaaccaacgcaaatatcgacctagtcatgtgaacaattacacaacttcaaactgtattgattatgttggccatgtctggttttc

SEQ ID NO: 195701 - DNA, 1093 bp, Zea Mays
ggaagctgaaggaaggtatatagggccagctgacatttgcttattgccaatgcgtcttctattggattttgttgaggcattgaaaaaatatgcttacaatgcatatgaaggttcctttgttctatcacccccaccaaaagcaagttccgtgtttttccatgcaaacaaacgagtttgtgaagagtggttttcacgaatttgtgatccaatgttgaatgcaggattagctatgcattgcagtgatgcagtcattcactattgttcactgcggctggtagatctcagaaacctggctgcatcatctctcagaggcaatagtcacatgggtggggctactgaaagtcatgcctttagagagaggttagaagcagatgttatgaaagtcctccggcatgcttccctggcactctgcagatgtcatgaaacagatgccttagttggacttcagaagtgggctgcatcaacattctattcttactttgagcaagataatcaactagttcggggcgtatctgatcgcgacaatcgcttctcctggatatcaggattgatctatcaatcccaggggcagtatgaaaaggctgctgcacattattcacatctactgcagtcggaggaagcccttatctccatgaaatctgatggcattcagtacatcatagagcgtgttattgagtgctacacatccctttcagattggaaatgcttagagagttggcttgctgagttacaagtgctccgtgctgtacacgccggcaaacctttttcaggagctctaacaagtgctggcaacgaacttaatgctatccatgcaatggcgtgctttgatgagggggactttcattcagcttggggttatcttgacctgactccaaaaagcagcaatgagctcacccttgatcccaaggttgcacttgagagaagtgaacttatgcttttgcgtggaatgctgcgatgtaatagcaagttagagggcataacagaggagcttcataaggctaaattgatgttggatgaagcactcactgttgtcccactcaatggattgcctcaagctgctgcttgcgctggccagcttcattgcatatttgca

SEQ ID NO: 195702 - DNA, 546 bp, Zea Mays
tagggaccaatccctgtttctgcatttcttgccagaacacaaaagccttattgtacttctgtacgcggcaaagtccatttataagaatactatatgtgtaagtgtttggggaacatttcatttccttcattgactggaaacaaataagtgcttcattgatttcttcagctttcactaaagcatccataaggctgttccatgtgtaaacatttggtgccaaacccttcttcatcatctcttctaatatcaaataagcttcatctatcctaccaacctttccaaacccatcgatgagagagctatacacaataacattcaattctattccttttgattttgcttcctcaaaaagcatgtaagcttcatctaacctatcaatcttagctaaaccatcaataattgacccatatgtagcaaccgtaggaggtacatgtttcaccttcatctcttcaagagcttcataggccttgtccacctttccagatttgcagaacccatcaacaacagcattataagcccgagcatcaagagcaaaacctcgctgct

SEQ ID NO: 195703 - DNA, 929 bp, Zea Mays
catccttctccttccagttgtttgcccgattcgcggcatatgctgccaacatctgctggacctgtgctgacacgagtgcagccacctgctcccggtagttcgctgcaaggcctcgcagcaaccggcacgctgcccgtctgagcgtatctgcatcgctaccctcagagtcacgcctaacatattccacccaattgcactcaaacaactcctcatcctcatcccgcaggcgcaagttaggcacaacaacactatcacatatctgcttcattgcttcaggactcccaaataaggcatggtgcacactctcagcaactgtagtcaagaaccttatcgcagtaacagcaagctgtgcacgggatggagaggtggtctgcgccatgaggagcccccacacggcctcaacaaactccttcaggtatcccctaaactcctcctcgtacttctccatataaagctgcaggttatcacagacagcagcacggagcgcatcaggggcaccatctgcctcaacaggcggtgagtaggatgtggtaacgaaagttcggaactctgtcatccactggcgcatgttatcctcgaagaattcaggcaggtcgatggagttaagcgagtagaagatctcgcagcagaggcggaggcactcaaacacggggcggagctcgagcgggttggccgtggtggcggtggcctgaaggcggcgggaggcgaagaggaagacctcgaggagtggggcggcaaagatgtcaaggcagtacttgaggtcgaggcggagggcattgttgtcgaatgcgttgcggaagcgggagaagagcgacaccacggcggtgaggagggagttggtggcggcgatgtcccccgcgttgacggcactgcctagggaggacacaatagacgggaggagcgactcccacctggcggggaaatcggag

SEQ ID NO: 195704 - DNA, 323 bp, Zea Mays
ccactgcggaggctgaacatagagcgatggatttagctttgcgtgagttgatgtggttgtaacttgtaagatcttccaaaggagcttcggtgttgaagaatgagactatgttgcttaattgtgataatgcatcagcaatcaacatagcaaataatccagttcaatttgaccgcatgaaacatgtggagattgataagtttatttttatcaaggaaatattgatattggggctttgaagttggagtatatcaagtcttgtaaccaattagcagatagtctcacaaaaggtctaggtcttaaggataatgagttggcatgtaaca

SEQ ID NO: 195705 - DNA, 636 bp, Zea Mays
atggcatggaggttgcagatggcgtgaagactggcgactggcgtggaggtcatggtttgctggcggaggaagttcgttgtgagagccaatcggcgcgaacgcgagaagcgagaggctggctggggcttgtcgtgcagagggtgcgggaggcgacacgggtgttggcgagcgtgcgcgggcctgggggtggagtcatggtctgcttgtgtacgatagaggtgagttggtgtgcattttggtgcgggtggagaagcgggctggagtatgttgtggagtgggcaggtgggacgtgacaactaacatgtcatggatgttgcagatggcgtgaagacatgcgactgacgtggaggtcatggtttgcaggcggaggcagttcgttgcgagagccaatcgacgtgaatgcgagaagcgagaggttggctggggcgtctcgtgcggagggtgcgggaggcgacacgggtgttggcgagcgtgcacaggcctgggggagagtggagtcatggtctgcttgtgtacggtaggggagagttggtgtgcgttttggtgtgagtgtgtgcgtacatgaacagatactacaactgtacttgtaagtgagaggcaataaaaaatccattgcactgctcgggagacttgccg

SEQ ID NO: 195706 - DNA, 437 bp, Zea Mays
caaggatttgccaaccctctccttcaacatacaaggcgagttctgcatcgacttcatcatcgcgcttgcaagctacgaggtcgtactcgggtgcaactggctatgcaccctcggccccatcgagtggaacttcgacctcctctccatggcgttttgggggcacgatcgccgtgtcaagtggacaggcatgggagtagtccctgccccacatgcgctagcactctcctccgacaacctgctgcagctactcctttcagaattcgttgatgtcttcgccgagccgacgggtctcccaccacctcgccccttcgaccactgcatccacctgctaccatcaacaccacctgtcgttgtcaggccatatcagtacccacaactactaaaagacgacattgaaaggcaatgtgctgaaatgttgcagcagggcatcattcgcc

SEQ ID NO: 195707 - DNA, 500 bp, Zea Mays
cacacattcttgcctctatctgcacaaatctattgcattgtccaatgaggtcacaggttgatggattgataaaaaaagaacatgtatgtccatgtcctccggcctttcaacgggaatgaaacatacagatcacaaggtagcacattgttttcgaacaacatacattgtcaatgccacaattaaacatttcaaagggtcagacaggtaggcccaagtcctacccagctacctcatgcctcaatgaacacaagagacagctgcactcaacggtatggcctcaaaggggtggtcctgtctgtcaaaagcgtgtccccaaaactaaatcacagccacattgtcaatgcacatccacctagcgcctccagctaatgctccggccacttggtgtccccgatcacaatacatgacattaactcgttgcatttctgtcaaaggtctcctgttaccggaaacctagttgctagtggcaacggggacttggaacttttgtcgagaaaatc

SEQ ID NO: 195708 - DNA, 412 bp, Zea Mays
gttcaaaggagggtaggagaactacttttgatccgggagatgagtataacaaggatgaaacatcgaatggccatggtgttgagcaaggcaactggagtgcattccaaaatttcttgttgagagcagaagaaaaaacaagatctagtgatgcagacctgtttgctggtgagaaagaacccccatcacggagaaaacagaatgtaaacacagcagatcctattattttagttgagagagatggtggcaacgtctgtgagcagaacaaaataggttttgattcagccaatgggaggactagagttatccgggtcatgtccaatgatgaacttgttatgtctggagaagggagaatctatatggattgtgaaatgaaggagattgaagctggtggaggaaggtacaggagagggac

SEQ ID NO: 195709 - DNA, 559 bp, Zea Mays
cacggagtcgtcacaaccaaatagattatgacaaacaaatccctatctgtgacgtaatgagaatgtcatagaaggccacatgtgttgtagtgtctaatggggaaggtatctaggtgtcagcagtggtgaagcctaggtgtgaagattcagttatggttggctggcactttggatcttgaggtcgcacacccaaggaaggggtaggcagagcagcatacaagatactttaggacttaatggacccttttcctcgagagattgctaccgtcatacctaggatctttcctaggggtgatcctttcaaccctaagtgggaccagcctgagggtagagctctgatagggggtgatagtgagcagcagtacagtgacactgtagcctccagtgctatgtttgcagttatgcaactgtataacagctctgagcgcaacttggagatggtcaatggctctcttgccatggcttagaatgagttgcaccggactcgagaggcacatgctgtagagatagctcaagtctagatagagttagcccaggttaccttagacaaggatgaggc

SEQ ID NO: 195710 - DNA, 1116 bp, Zea Mays
atcagcagcagttggtaacagaacatgcatctgacacagtttttcatgctccacctcaagtttgttcacttaatctcggttcatcacctgatagtccattggatatggcttctgctagttgtgcaaatccatctagctctgctagtagggaatccaatattgctgaaaggaatgtaagcacagaatgtaatggcagcagtattggtgatgcaaatataattcacaggaagtgtgaagatcaaaatgggccttgtgctggtcctgacaagtcattttcctccaaccttagtgttatttgctcttcacagaagtctgcagagagtcgtctttccataaatattgacaaagcaaatgataaacctcttgacaacgatgaaaaagaaaagcaacctatatctaacttggttcaggaattgaatgaacatccaattggctgtgttacacctactgcccctagaactacttcccataggaaccggtttacatctatatcacgtgcttttggagatggttcaaaattactgccagaagaccacgtgttgactggctttgctggtggttctaagaaaccacgaagtcaagtttcatactcagtttctcctaaaagtgaggaacttggcataaaaaacaaaggtcatttccgcaagatacaatctcatgttagtgcaaagataaatgatgcaaagaaacttcctgatagttctagaagtgggcatagcagcccggagtcattgacttgcgttgcaaatgttcttgttacagtgggtgatagaggttggagggagtatgatacccagatcacaatggattccgatggtcagagtgaaaggaggatatgcgtgaaacttgctgaagggaccaagtatgctcacaaggtctgtcaagttttgcagcctggggccacaaaccgctatacacatgccatgatgtggaaaggtggtgctgaatggtgcctggaatttcctgacagaagccagtggttgattttcaagcaaatgcacgatgagtgctatagccataacatcagagctgcttctgtgagaaacattccaatccctggtgtccatttggttgaaatccatgatgataatgatgtggtatcctttgtgcaatctg

SEQ ID NO: 195711 - DNA, 643 bp, Zea Mays
gtggaggaaacccgatcacatgcaccaggcaagttatgctggtggagcaagagtagatagaaggcatgacgagcacgggatgaccatccactaagatgacgaatgcattggcgagtgtcgaagaagagagtaggcaagaagacggtcatgccatcagtgatggctagatgggtgatgacgtttgcaccatgtaggggaaggggtgacctagtcaatggcaggatgacatgtgccccgcgtgcagagaagagatctagccagcaacggccatgtgcgccacgtgcggggggagcagacatgggtagcacgcctttgggaagataggtcatcgccatgaaggcattcatttggggaggggtggccagggggaactagcaatgatgaccaaccaccgatgggggcaagccatgggtggctagtggcaccttagtgcaggtaggggggagggaagagagaagagaatggaatatttggctagataccatgttggagcaaatgaaacccacggtttgaggagctatattaacagatggaaaacatatatgggttgtacctgtcccattacaactgtaacacacgtgtctaacaatatcatatgctaactttggtctgtgcattttgtgccactaggtaccagtataca

SEQ ID NO: 195712 - DNA, 291 bp, Zea Mays
gtcttgttactatgtgtaatttggagataatagtgttacaaaactccctgtcagactgggtgcagagctgtttcagacctctgaaagtggacatttcaatattttgcccaactttggggtaccacaacttgtgatctgtgtattaccagtcttggtgtgctataccaaagtgaaagagctatggatgagtaaacttggtcaagatggatgggtctgtagtcgaggggatttgggtgatagaggggcttaaacagggaggtatgcagaggaagcagcagtgttagtgaattg

SEQ ID NO: 195713 - DNA, 1163 bp, Zea Mays
atggaaaggccagtcttacctgcattgtcaatggaagacattatcagagcttcaaagtgtaagtacttatgtagactatatatatatatatatatatataatgttatctgtatgtcagttaggtgtatgtgcttaatcctttgtctttgttctttctaaatctgctttcactcatgtaacctctacatgacaggttagtggattcaagaaggtaataaattacacgaaaagagttgctgaggaacagaggtacaagagggcactatcacgtgaagaggtaaaccagtagataacaatttcaagtttaacatgaattgaagcatgtcaccttttatatctcagcatccagatatgaaaatccactgtgataaaacttcaaaatgtaaaggaaatgttggcgcctctttctgtatggaaggtccctgtttttttacacagtagttctttttatgatgttcaaaattaagtcattgttaggttaaattcgctgctattaattagtggttatggtgtgatattggcttgcgtccgtaggcttctttacttggcaacatattggcattaatttgatatgtttctctggttatgctaacatattcatatatcaggttgaggtgcatgatgtgggcaaggagatggagctggatcttattaaacaatatagtcaggttgactgttgatctacactgttcattgtcgctttgcatatcttctgacattaaatcttcaggttgaacggatatttgctgatagggtcagcaaagctgatggagatgatctggttcctgaatatttagtcaaatggcaaggacttccttatgcagaatctacctggtaattttcatggcatggtatccagttttatggttatgattattgttttgcacatgaatgagctttgatcatatacacaatatctctacctctgttgattcagagtatgattatatgtgatgatctttcatacattttatattctatctggtggatgttaattttttattgtaggaaataggaatatgcctttactgtttaattagtatgcattagtctgactgaccttgctgttggtgcgttgtttcagggaaaaagatacagatatcgattttgctcaagatgcaattgatgaatataaggtaagtactcagtactctataatagct

SEQ ID NO: 195714 - DNA, 314 bp, Zea Mays
taatcatatagttttgcaagatctctattatgtccatcattttctagacaaagcagtacaccattgctgatatttcactatgctttcttgtaaatactttgttgatgactgttctcaggggaatcaaggttaagtccactttaggtcttcttgaggtggttgttggttgttccataatcgagtctgaattgagctcttcagttgagagtagtcactctggagcagagcaaaagagaattcacttgcacctcaacagatttttcagtggcgcacgtttttcttcccaacattttcttaacttaatgtcagcaaag

SEQ ID NO: 195715 - DNA, 293 bp, Zea Mays
ccgggtggaggtgcaacatcactggaatcctccgaaggtgcaacgggggcggtcttaggccttcgaccccgcgtacgatggcggcgtttcttcgtgccacccaaggtaggatcagccacaccggacctctggatggccgggatcggcgaagagaccctgcgccactccatggcgcgtctaggaatgtccaaaggtttgtgaaccagcagagggccaagacgatcccacaccgatactgaagctttgatcaccggcgcagcacgaaccttgcacttaactgcacgatgtccgag

SEQ ID NO: 195716 - DNA, 429 bp, Zea Mays
agagcatcaatctctaataatcaaagtgttagcaacattaatggttttttgggagtgtctatgtttagtgatcagccaggaagtaaccatgttatcagacctactgtctttggaacaaataatacggtggaaggaagagatgtcaacctcaattcatgtgtaaatacaatatcttttcctattgctaatgcaaataatgaaacatcagctggcctgaatgaagctaatcggttatctactactgcaaaatgttttagtggcagttctaataacaatgatggtgcatctagtgcatcttcccattgcggatcgaccaataaaatctatagttcgtatggcacaacaagcaaaacccaagctgttggctccagatgcatcagtggaagctatgagccttatggtgaagattgtggtgctcttaaagttaac

SEQ ID NO: 195717 - DNA, 423 bp, Zea Mays
tccatcatctaaaataactaactctatcacaagtctttacaccgtgaagtgtttgggttgtttctgtatatcgtggagtgcttggattgtttttttgggtttgatgtttctgcaagacgtaaacagtatggtgattgttattttgacagacaagcctggttcgagctattgttcgagaatgcaacgcgcacctgacaacgatcaagtactgaatttactttgttgtgtttctgttagtgctgacatgtacattgtatttttcgatatgatttggaatattgcttctggccaccttgacagcccatattctgtacacaaagcccatgtgggagagggagaaaagttcctgcgtgaagctttttctgaagcatattctcaggctttgcggggtaaaccagctgtgatatttattgacgaacttga

SEQ ID NO: 195718 - DNA, 331 bp, Zea Mays
gttcgtataagacctctaatcgatcaacaagacatttatttatccaaaggggcatggaatgtgataattgacaaagcaaagcatcacattgccatacaaccaaaaatcatgacaacaccgatagatactatacactaatcatttgaaaaattaaactcacttctcgcttgccactacatcactccttaatcacacaaccatcacgagcatccttcacacgattatataatagcgacctaagcgtcatgtcacaatacatacatctttcctcattgcgagtataaccatattacggcatatacccgcacatagttaaacacccatgtactcc

SEQ ID NO: 195719 - DNA, 304 bp, Zea Mays
gctactctcgctccatcaaaccaaccctcccaccatcaccaaagatatatactattactacatagttaacaaactttatctgcctcctgtcctgctaatctatatatcccctctccactactgctaccttctctcgcgcgtctctgctcaaagaataatgtcagcgtagcctagctagctcatagggattcctctttcatccctcctgagatcgacgatctcaccaattaagaacacacacgcacacagcagctacgtacgtacctagctagctagcatgatggaccatcagctgttcgacgac

SEQ ID NO: 195720 - DNA, 356 bp, Zea Mays
cgactgaggacatcatcggcactttagagataaatgccgagcgactggggacattgtcggcactttagagataaatgccgagcgactgaggacatcatcagcattttagagataaatgccaagcgactggtgacaacatcggtgttttagaaatagcagccgagttagaacgggccgtgtcagccattttgagggtaagaaccgagtgatgatgtggcacaccggggttttagaagtaaccgccgagtgacgacgtggcacgctggtgttttgggagcaactgccgggtgctgactgggcgcttttggaaacggtatctgactcgggaatatcccataagtattgcgctttcagcc

SEQ ID NO: 195721 - DNA, 411 bp, Zea Mays
ggaggtgaggcggagataggtcacgtcggtgatggagggtgatcccgcatggggagggaacacacggaggtggggcggttgcgcacggggagtgtgggcgggacggttgcgcatggggaggccgacgcacggagtgaacgcgggggtagctcgcgtgggggatgtggggaggcagcggctgcagacggacgagcgagagctacctgctcccactggcaagaggacgcgagatggacggatgatacacgaaaatggaggcgtgggcaaaacgaacggtgcagattgagagtaggcagaaccagatagaggtatgctacccttacaaccttaataagtagtagagaatagggtgattctgagtgattctctactggaaatgaatctatttgccgaaaatcgtttggcaaatag

SEQ ID NO: 195722 - DNA, 288 bp, Zea Mays
gctagatcaagtgcacaagtcccccacgggcacgaccggatcagcgtacgcacacagcctcatcatacaaatcatcataccaattaaagttacacacatacagcgagggcatcacaccttacattggttcaaccttcgggatgatacccatctctctgtagttaaacagcatcatcctcagctcctcaccctcaaagagacttcgcaactccccctcacttacactcaccccagctggcgaggacaacaattcctgcttgccagccctatccacacgaagacgcccac

SEQ ID NO: 195723 - DNA, 373 bp, Zea Mays
gctcgaagtagtggtgcaagtgaacatggcaatgggtgtggcatcaacacatgtaggcatggggtggtagagcgatcatggtgcagtgcgacttaggtgaggtgtgcatatgtgtggcgacgatgcagggggagagggtggactgggatggcatacgagtatgggaatgagaactcataacatgtttagggagctgagtgcacaacttaaaggtaatggtatcgggatgagaattcggaacaagggagttaagtttaatttgcatgtaatcggactagaatgagaactcgggacaaatttaagaacgttaggtgaaatttactctttctatagcctgatagagagagaaaaatagagcattgtattgagggta

SEQ ID NO: 195724 - DNA, 368 bp, Zea Mays
gggatcagttttcataaaccataaccagcggatacacaatgcccaactcatcctttccagataatgtactccaagactgccaaacatgtaaggtctttgcaccttggcccatgagactaaacaatttcctcccttggcctgttcttgccctttccaaaggaatccccttctccttttatgaacagccttaaagaaccatttgggcagattcaagacgagcatttggtgaatgggtgttgctgacattacagatttgacaacaaccaacctgccaaccttgcttaggaggggggctttccatcctggcaatttattggcaatcttgtcaatcagaggtgttagaacagcctttgaaggtttatgaatag

SEQ ID NO: 195725 - DNA, 565 bp, Zea Mays
ggcggcgatcgacggcctggaaacctagatccgagcaccttctgcaaagcaaggcgcataaacttcacaacttttgtcgccccacctcgtagcgcctgcccgcaccaaatgcctcgcagtccagtcgatattgtaccccgcgtcgcggagcgaggaaaaagaaggcgaatcgatgtgtggccggatctccgtggcgaagaataccagcaccgatgaccgaaccgggaggaggaaaggaacactgacacaaacaataacttgaacaccacgaacaccgccgcgacggatgggtgggtaaaaggcgacgaagaagaagagggcaaggatagggatgtggaggagagattggggaagccgcaagccaggaacagcaacgggaagggcaactgctcgaactgggacgattattacccacgcgctgcggcgctggggattgggtttggatcgctgctgccattgtgtgcagctaataaaaaccaaaccccgccttcccttttcgctcaggctttgtatttcttttgttttcttccgtggcagagtggagtgtgttttgtgtttgtgcggc

SEQ ID NO: 195726 - DNA, 805 bp, Zea Mays
gcgagatatagcactctatatatacgtggtgcatggtacatatgcgtgtttgtttgtttttcttatcagggttggaggttttctaataggattgcgttgtattatttgatcgttttttattttttaagagtgtgctgaatcggtgaggagtgagggagattttaagtcttttaggctaacaattttggtcttcttttgcgagcagctggagttgttatatggtggtgtgtgtgaccttggtcctaccctcgaaagagccgaaaaccggattttgttccattatctaaaaaaataatgacagagagatgataggtaacacgaggagccggagaggctcccgagctaacgacactttggaacctagccccattcacgtctagaggatccaaaccactatggttaaagctctcaccgcataatcagaacatcctacatgtagctgggcccagcgagcgcgacagatggtagaccgctagttagattagaggcacaaaagatagtgggagccgactcctagaacaatccctgttcaaaccagcgcaaggcatcagacaagtcaccggaacatccgactcgtgtgcagggcctaaccatgcatatgttaaacaggtccttaacggataaggactaaccatgatagatcatatctaccagacggaatggagcaaggcgccaccattgtgcatgagaacatgcacaaggatgacaagatgcttataatcggcaagcaatagttgttcatgaaggaactgccgatactactccatgaacattacggtaactagtgcttctcgccataaaaaat

SEQ ID NO: 195727 - DNA, 606 bp, Zea Mays
gggcaaggaattattggacaacttgctgcaatcatacgaagatctgtttgaagaacctcgtggcctaccaccagcccgacgccatgatcaccacatcagactactacccggcacagcgccaatagcagtgcggccataccgctacccccagctcttaaaggatgagatcgagaagcaatgtgaggacatgttgcagcaaggaattataagggaatgcacctccgcattctcttcccagtgctgctagtaaagaaatcagatggaacatggcgattctgtgtggactaccgggagctcaatgggaagactgtgaaggatcgttaccccataccagtagtggatgagttgctagatgagctccaaggttccagattcttcaccaagctggaccttcggagtgggtaccaccaagtgagaatgcaccccgaagatgttgacaaaacagcgttccgaacacaccgaggccactttgagttcctcgtcatgccattcggtctcaccaatgccccgtcaacattccagagattgatgaatgatatcctcaacccattcatacgcaagtttgtgctggtattttttgatgacatcctaatttatagcaagacg

SEQ ID NO: 195728 - DNA, 358 bp, Zea Mays
agcgccatcgccagagagattggcctgcatgtcgatcagggtcacgcagggcttgcagtccagcatgctagcccgcacgaggacgtccaaggtgtattaccgttgctggaggaagaggccctcggagcgaggctcaacgacaatccccagaaaatgaaggggcccaaatctttcatggtgaactcatgctgaagagcggtgatgatctggtgcagtagagccgaagaggatgaagaggagtttatgagcacgatgtcatcaacatagaggagcaggtacacagtgtcaatgcgcctcaccggtaaatggacagagatgtgtccggcttggcctcaacaaaaccagggagagcagatat

SEQ ID NO: 195729 - DNA, 1281 bp, Zea Mays
tgagttttacaacattatgttagaaaggccaaaggttgtgttcagtctctgattttaatgagatgtaacttgtaactggtcatttcaattcatggtctttttatcctattaacattttagttctgtcatgatggaagggagaccgacatggatatgacttggtttttgttgatgcgatgcacaaggccaactacgcgagtagaatctgccactcctgcaaccctaactgcgaagcaaagtaagctccttttaaggttcaggttccaaccttgtgaatgttaactgtttcattgcttctgtggttatataatatcattctttgattattggtcagaatttatgtgtatgatgtgcatgaggtatttttttggagggagtaaccctcctctgtgtactacgtaataactatgtattaatgaaatgacacacaactcttctgtgttgttcaagaaaaaaaagaatttatacgtatgattatgcaaaagctgacatgagagctatgtaagcttgtctgttaacaattgtcgatagatgtaacattcagctttacttacaaaatttgctctgctctgttgttcctctaataaatccttttttgtggaattttgctgttggttgttagattattatgtactctttcaagatacttggcattccttaataatatttactatatttcgtcgatctggaaatcagtatgtctgagcattgagcaatataatgtagctagtctattttgcccccctttttttcttcttaatataatgaatgcgcagttctcaagaaaaaaataatgtagctgttctcacatatccagcttcatttaatggagtgcggtggtattcaacttgggatttacttatcaagttgctttgacaaacttcagtacacgtttgcttggttatggttatgcatttctatgctaattaaattgatactcaaccattgataatttgaatatatgtatgtgctaccatgtttgcatgtctcaaaatgcttggacttttttttctcttcctaaggctaatgtcgagtaatttatgctcctttattaaaaaaacagagtgacagcagtggatggtaaataccagattggagtttacacacttcgaccaattgcagaaggcgaggaaatcacttttgattacaattctgtaactgaggtgagcacatttcttgttcctttatgaaattatgtattacattgcaacgtttgatgtctgcatacttattttgctagagcaaagaagaacatgaagcatcagtctgcctctgtggaag

SEQ ID NO: 195730 - DNA, 685 bp, Zea Mays
agttgcaaagtcgtatgtggagcatgccttggtcgtgctagtgttgagcatgtcgtgctgcagtggtcggtaggtgtgtccatgccattgagtacaacatagttggtagacagtataacaacttgtactttataatacctttgggtacacccaccaccataggcgtgattacaatgacacctgcacctgcacatctaatatagtggtattggttcgcttgcgccacgagcattgatgccttttgaccataacatcgaccataacattgctttaaatatgatgtacaagagccttctctcaacagctaggagtcacgtgattgatcgggtcagagtcgcacgaggcaccggtgtcgtcacacgacactgggctgtacaacatgtggccttcctgcctcgtgggtgtcttggagagttggaggatcctggcgtgagggcctccggtcctgcagggctccaggatctgccgcttctagggcttggcctaatggtttccaagctacatgtccaatgatgttgagctagcactagtcggacccactacaggtcttccttcatgtggcaaaatttctcggaggacgttttgccagtattaggggattgaaggaccggtgaggcgactagagggggggggtggtgaatgggagcccctaaaaatttctcaatcaagagcttgtggcttgatt

SEQ ID NO: 195731 - DNA, 280 bp, Zea Mays
acatcttagtagcagctctgcctccaaagtccagaccttgctgaacaaagaggaatgaagaacagaggggggaagatagcagagaacaaagagtaaagaacaggcaaaagcagcacaacatccataccttcagaagagctgctcatctttggttggactgctcagctgctgtttttcgcgactaaaatggcggagaaggctgctgctgactgctcacgtctaaaatgggggagaaggctggtgctgctgactgctcacgtctaaaatggcttttggcctc

SEQ ID NO: 195732 - DNA, 972 bp, Zea Mays
ggctgatcaggcttttcaagcgctgaagaaggctatgcttactactcctgtgttggccctacccaggtttgatgagttatttgttgtggagactgatgcttgtgatgatgggataggtgctgttttgatgcaatgtgatagaccagtggcatatctaagtaaagcattgggtgctaagaataagatgctatccatttatgaaaaagagtttttggctctaatcattgcagtggacaggtggaggcaatatttgcagagggctgaatttgtgattaaaactgatcatcaggctttgagttttctggatgatcagcttttgcaatctgatatgcagaggaaggctatggctaagttgatggggcttcatttcaaaattgtttacaaaaaaggcaaggacaatgtggctgccgatgctctatccaggattggtcatgtgatgcagattcacacggtgactgaggtgaaaccagcttgggtgcaagaactcctgaatgcttatgtgacagataaagaggctcaagatctattggctcaattggccctggccagtcctaatgagcaaggtttttctttacatcaaggtattattagaaaaggggatcaaatctggatagctaacaattctgcccttcaaactaagttgatttcagccctgcatgatagtgtggtgggaggacattctggtggtgaggccacttaccaaaggatcaagaggttgttctggtggaaagggctcaagtcagccgtgtttcagtttgtgcagcaatgtgaggtgtgtcagcatgctaagcatgaaagggtgcattatccgggtctcctacaacctttaccagtgcctcaaggggcttggcaggatcttacattggatttcattgaaggtctacctagatctgagggatatgatactattttggtcgtggtggatagatattccaaatatgctcatttttttcccctcaagcatcctttcac

SEQ ID NO: 195733 - DNA, 505 bp, Zea Mays
tgatggcgttcgggctttgcaacgcaccggcaacattccaggcgcttatgaacgatgttctccgtcccttcctgcgccggtttgtccttgttttctttgatgacatcttgatatatagcaagaattgggaggagcacctgcaccacctcaggatggtcctcgaggaactgcaacgccaccaactcttcgtcaagcgctccaaatgcgccttcggagccccgtccgtcgcctacctcggtcatgtcatctcggcggcgggcgtggccatggacctggcaaaggtgcaggccatcttcgactggccggtgccgcgctcggctcgggcggtgcgcgggtttcttggcctggcgggctactaccgcaagtttgtgcccaactacggcacggtcgccgcaccgctcacggccctcctcaagaaagacggcttcgcctgggatgacaaggcagcggcggcttttggcgccctcaaggccgccgtcaccacggcaccagtcctcaccatgcc

SEQ ID NO: 195734 - DNA, 703 bp, Zea Mays
cgatcattgctagtgtattatgattttatgaaagatgatggtactatgtgaggtcaaatgaaagttatgatatgccttccttctgatggccagaatatgttaattgatcagtttggataccattgcgataagtagctgtctagatacaccagtacccacaaattctctcacacccaatatgccgacatggtggggtaaatcatcgtcaaaagatgttaagaaaaccaccaaggaaaacctgatcgatacatttcatcgcttgataagtccaaatgagcaaaagggaagcacaaaatcaaaacggaattgcaggcgtggcaataatacagctgctgagaaagtttgcaaatcaacaacagtgtcacgtccaacttctccatcgaaagaagtttctcgctgccaaagtttttcggctgataggctgcatgcccagccacttcctattcctggagtacgccctcgagtaactcgtgcagttgctgatgtcaatgtttcaaagcccatattggaaaaacgtggcaaacctccactgcttttgccacttcctaaacccaatccacttcaccggggacctggaagcagtgatattccttcagaaatagtggttgcttctgtctctagcaattgttctgctgatagtgaggatcgtgcagattctcagcttcagagccctgttgggaatgatactaacaatgtaaaaaag

SEQ ID NO: 195735 - DNA, 318 bp, Zea Mays
cccacatagggctatggagttcgagccaatccataccaataatcagatcataagtttgaagaggcagcaccctcaatgtagaatggaaatcataatctcccaatgaccaaagagctcccaccaactcttgattacagcgaagctatgcaccatcagctatttgaactgacaactgacttgctaccggcgacaacccttggaggttgacagctacttgtgaactgacaaaagaatgcgaactccccgagtctatcaacaccaacagttcaaggccctgaatatgccccaccatctgaatggtcttaggcgctgtattac

SEQ ID NO: 195736 - DNA, 490 bp, Zea Mays
agcttaagtcggcgacgacttaagacggtgcaacatgctcgcgcttgcttaactcagggtgaccactataccctactaacggagcaatcgacttaagcggcgatgacttaagacggtgcaacatgctcacgcttacttaactcggggtgaccactatgccctgtcaacggagcaatcggcttaagtcggcgatgacttaagacggtgcaacatgctcgcgcttgcttaactcggggtggccactaaaccacactaacggagcgatcggtctgagttaattctagcttaaactggcgcagcacactcggcgcgcatacagttactcatccaggggcggcctctatgtcccatgaagaagtctcgaaaccatcacgctgcattttacttctacaaatttagaaactgctgaattctaaacaataggagaataatagtagcattcaatactaagaaggtgtcctctaacaaaatatccgagcacgttaaccgc

SEQ ID NO: 195737 - DNA, 689 bp, Zea Mays
cgtctctctatgtgaagattctgagaggttggctgtgagtcaagattttcggctcggcggtggcgaatcctctgctcctgactccgatttgggtattctcgttcttgattcctgactcttggcccgaaacttctgttctgttcttgccgaaatcgaagggaaacagctccattctggttgcaagttctttgtaaagattcgaggtggcattcagatttcggttacctgtgcttgtgctgttggttttgcttcgaaaatttgctgtttgggtagaccaaggttactgacggcctccgccgccgcagatgtgcggatttgagatggaatcgcagtgagagggttgaagagttgttcctgtccctgattctggtggcttagtttctggtgctctgtttggcaacttaagcgcttccattttcggttcatgcaagggtcgctttcggccatcggggagctctcagccgtgaggttttgaggtgggattgtgtcattgtgacctcaaggttgaaggagatgcttatggcgtcgatgtcagatagcgagacgaccaaccgaggcagcatgtgggaactggatcagaaccttgatcagcccatggacgaggaggccagtcaactgaagaacatgtacaaagaaaaggtatcgttttcatccttgctatcatcgcatttagattattagtctctgta

SEQ ID NO: 195738 - DNA, 397 bp, Zea Mays
ctccccaacacctcatgtttgtgcccactccgggcccgatggtcacctcccgagggatcgccgccgccctccacccttcaccttcccctccactgcaggcgtctccgtcaacttccgcgtccatttcccttccatcaccttctgcttagcgtgcggttccggccatgtcgagagggaggtccaagtttgaacgttgacgaggtgacagccccgctggtggcagctcgcttggtcccgccggtggtgttacatccaggccctccttccgcgatgtggtgcagctgctaggccttaatcgccggacggtttggctatcactctatcaggtctaggactcagacgcggctgtccagtgtcatttcggcaagattccattcgtcgaccgtgggtcagagtc

SEQ ID NO: 195739 - DNA, 315 bp, Zea Mays
gaaggcatcggaaaaggaaagtttctcaagtatggagctggtggtggtgctgggcatggaggccgaggtggcacagggatttacaatggaatgagaagtgaaggaggcctagaatatggcaatgctgatcttccatgtgagctaggaagtggtagtggcggttctgctttgtcagcagataacactgccggtgggggattaattggttcgttccatcttatcccataaatctatgttctggaatcttgtatattacatttggctccctttgtctttttatctttccctctcctgaattcagtgcatttggtatca

SEQ ID NO: 195740 - DNA, 457 bp, Zea Mays
tctgcctagcttggatccatatccgggttataccccgatcaggaatgaagtgttggttgataatactgattatgaacctcttcccggcggtgagcagatttgccctgagagacatgccaacatatttgccagtaagtgaatagaatttgtatacggacagaattaaatttctaccactgttcaaataatgacaggttttgctatcttgtgactttgctaggaatattcttttcatggatgactcctttaatgcaacaaggatttagaaggcccattacagataaggatatctggaaattggatagctgggatgagactgaaactttgtatagccagtatgttttctcattttccttgttgaaatgctaaatacttgagcttgcaaaccttaacgtggcaatcctatctcaggttccagaaacgctggaatgatgagcttcaaaaaccaaacccttgg

SEQ ID NO: 195741 - DNA, 598 bp, Zea Mays
gttgaatctcatgaagaggatgcttcaaggagattgacaactgatgagatgaagaaccaagaggatggtcggaatcagtttgagagagccaaagctcataagtcgacaatggaggctgcaatctctgaggtgggggtgtctgcaggtttcataaccacttcggaactgaaatatcagattatttcttgaatgttttagtttgtaaatgtcacttctcctaaaccttttgcagtttaatcgtaaaccaagtaaagggattgaatatttgttgtcaaataaattggtagaaaataaggcatcatctgtagctcagtttctcaagagcaatcccagcttggataaggtgatttcaagattccattgagcgtcttgctgtaacaatataactattatttaatgttatttgtcaaaaaggtgtacatacatctaacttttgttagctgtatgcaggttatgattggtgaatacttgggacagcatgaggagttccctcttgctgtgatgcattcctatgttgactccatgaagtttatagggttgaaatttgatgctgcaattcgtgcgttcctgaaaggatttcgccttcctggtgaggcgc

SEQ ID NO: 195742 - DNA, 846 bp, Zea Mays
aggaagaggggagtggctccgaaggctccaaggagttccttcccactgggagcttggaagcagaggtagaagagaagggtgattcggaagcggttgctgatgcgaccaagcaaactgcaggtgggaatgtgggtgcggaactgggagaggataaacaggcagaagtgggaggtgaagagaatgctgaggctataaagctggtggaggcaagtcctctggatgctctagctgcggaggattccagtgggcatgagcaaggtaatgatgccaatttggcggaaactgaccaagttgggaatcagattgaggctgtctatgaggaaaatgaggatgaccaaactggaggtgataatcatgttcaatcaggtcagggtatggatcttattgcgattgctttagaggaaagttctgatgatgaacatgaatttgaaagatctgacagtatcttgcaagaacaagtggaatctgggagcttaattgataaagtgattgaagatagggtagagcagctggaggccagcaggaaggctgagaacacagagaagaagctgaaggtgtcaatgaaaccgttggagtgggcagaggagcttgagaagaggcaggcctcgtctggtcaacattgggaggaaggagcagctgcgcagcccatgcaactagagggaatcggaaagggcccaccagctatcggttacatgcaaattgagatggacaatccagtaacccgtgtcatgtcctcaccgtcatttaggtcagaccatggctctccccaggtgctggctgttcataggagctatatagcaatgggcacatctaaaggtgctgtcatcgtcattccaagcaaatact

SEQ ID NO: 195743 - DNA, 457 bp, Zea Mays
cgatgaatggaaatgtggaaatgtgcttgttttttctgagtgatattcccgtagctctactgccggcttgcaccgattgtacaaccgtcccaagctctattgcgtcaacgggaaataaggtctattatccaattgatgacataacaaggccagtgacgtgcacactggttataagatatggtattaacaataatcgcacgaagaaagtaggaacaggcattgcgatcccacgacgtaagtttcatgaaagtgacataccagatgattattgcagggtagaagtgacgatggtcgtccaaggatctgaggacgacatgctagacatccttgggcccgaaggaatcgagacactcggacaagccatcaaaaatttcgtcctttggcctcgaagggatgtcgaattggttgatccaccaatgtcgtcgtcatctcatccccaaccatctccgcctcttca

SEQ ID NO: 195744 - DNA, 433 bp, Zea Mays
gtttgattcgagcaacgttttcacccggttcgttcggtccggtgtcgttgatgctccaccgcccggtggcacactcgtccgtcctgacagggtgagcagccttcacacaaacaagattatggcgttaaatggtacgagcaatgcagtctcgcgtaccaaccacgccgacaggccatgctttgatggaagggattcccgtctttcaaatgtggcgagttcatccgggactaagaggatggatccttgctttcttgctgatgacggtgagttgcagtcacctgatggcactcatgttaacaaggggcaaaagagtgtcagtgaaaaggatgtttattgcatgtctccctcacaggaaaactgggatacctgctttgatgatccatcacatgctaaggaagaagatttggatgcctgctttgatgatccatctggt

SEQ ID NO: 195745 - DNA, 1025 bp, Zea Mays
tcacctattcacccccccccctctaggtgctctcagaagtcattcttgacgtcgagttgatgtaccagccagcctcaagagagaactagcgagaggaccatgtgggcaatcaccggtatgaccactggagtgaaagtgccatcgtaggccattccaggccgctaggtgaagcgacaaagaatacaacaagccttgtagcactccaggaacccatcggcatgaaacttgtgcttgaagatccactttccggtgataacattggaactaggtggaaaaggcactaagtctaagatgtcgttcgtcataccaacgcaaatgaggatcgacaagggcattgtggatggacatcaggacaggagacaagggcgatgaggacgtcgcaatgggaatcaaccggttcatgagctctcgaaagtcgtgatggccggtgtggccatagggtggtgattgacaggcggggtgacgagctcaacaccgacgagggaggtagttgtccgagccagcatgggcgacacgtgtagatgatggtctctgaggccgcgtatggcacgagagagggtggtgccatggctatgtgtggcgcaggagagcatggcatcatggccgcacaaagctagaagtcaggcaggaccaggggcataggcatcaagggtgccgacagagatgaacctgcaaagggtggggtcccaatggtgccaaagaacctgacttaaataaaaaaacaaggttagttgccttgtcaaacacatgacaggagacaatgatgcaatggaaagagagatcaaggcaccaacatcccccttatggtcagaagagtatccaaggaagacaattagtggaacgacgtgcaagtttgtggggaacaacagcggaaaggttgggatagcaggcacaaccaaaaatgtgaaggtgtttgtaggaagggggagtgccgaacaaggcaccgtgggagcaaaaggcgttgatggtctttgtgggggagacaattcaacaagtatgtcacaatgtcaatgccttcaacccag

SEQ ID NO: 195746 - DNA, 334 bp, Zea Mays
attggcttagtccatactctatcgatatatataccctaccctgatttagggttggggtttctaatatggtatctagcttggttctccccttccttctctcccctagttgccaccaacagggccgctatcgctgcaccgttccccctcggctgtgcacccaccatggctgcgtgccctccctctttgtcagcaattgtcaccgacacgacaacaggactggagcagaacaagatcgcagaaactgatcaaggcactcttcatgttccggcaacagacaccgcttcatgttccgacactcttcatgttccggcaacaggcactcttcatgttccga

SEQ ID NO: 195747 - DNA, 672 bp, Zea Mays
ggaacgcattggcgccgtcacatacaagctcgagctccctgttggggctcgcatccatgacgtgttccacgtcggagtcctgaagccattccgtggaacgcctcctgcaaacacaccacatcttccaccgctccaggatggccgcctgcttcctcaaccggaacgtgtgctgcgtgctagtcttcgccgcggagcatggcacgttctggtccagtgggctggcatgaactcaggcgaagcaacttgggaaccagtcgactcttttcgttctgagtatcctacattccagctcgaggacgagctgttttccgaggaggcgagagatgttatggtcggcaaggtgtatcagcgacggcaacgtggctagatcgcgtgcgacgtaaacatgggagcgtcgagtcagtttgtatcagtttgtagtgcgtcggttgtcattagttcaaactctaggaagttatcctttcctttgtccagtatatgtactgatgtatcaaatggaaataggggggagctggagattgaattaatctcttcaggccttggcaactgctctcgttttcccgtgcttccgtgctcgacgccggccgccaggatggcgtcgcgccctcgtcgccgccgctcaccttcgccccgccctcctgctgctcacggctacaacctgagaaggacaag

SEQ ID NO: 195748 - DNA, 318 bp, Zea Mays
caagccgtgcgacgactgtcaccggcgagcttatctgcagtggccgtggcaagtacggtacggtggccggagttgtttaatggccggagtctatccacagcgaggactcttattcgatcccagacgctatccacacgattcaagcacgaatcacggcgggatgagcgcgaatctgggcgcggctcgtcggcggcgagctgagttgttgatctgatctatttcagttgcagtactgtaccatgggacttcctcattcagttggactgaccgagcaagtttggcgctaattttcttccgattttcaatggcaaccagtgg

SEQ ID NO: 195749 - DNA, 612 bp, Zea Mays
ctttggtttaggaaagcattgcatctattcaatctgtatacaagtttcatggcactgcctttgttgtgggctcctctaattccatttataatttaagtaatttggagtactggacctgtaacacatttgcttagtccatgctaattaaaccttgagttttgttatgtattggctggcagatgtagtgatgctctcccatgacaaaataaaacaagaaagcatgtagttttgatgtcctgtactcctatgacatatatagaacttgacaatggatgataatctgtacatttataaaaacacttagtagactcgttctcatatgaacactggtggagctacattgggaccatagagggccctgccccctcctcccttgccatgcgtcaagttctaaggatcgccacaagtgcatgcatatttccatgcagtctgctcgcatagcttcatgcatagctgttttgtctgttcctgcttatcattagaccttaactgactagatgccagctgcatgcaagcttgctagctatctggcagctcatgatgccatgcttgcccacagcagtaagttcttgtgatccgtttggccccttcttgctttcagcattagctttg

SEQ ID NO: 195750 - DNA, 1896 bp, Zea Mays
attgtccggaatttcttaatcatgccggagtaggtttaaactagggtttagtgcagcccacgctgtttagatggcttaccatttcgtgaactctagatgagaggaatagtggagtttgatcacctgatggggtttttcatcttatgtaggggcttgaaatgggccttaaaggctctaagggagctccagtaccaggaatggaagggggtgtggcaaaggctcctgcttccttggaggaaaacaagtcctctgctgatgaggatcttggcagagggcctgccttgactgggaagaaaaggagggactgcaggggttctgcggatgaggacagaaacgtgacaaaaagggtgttgagatccgacgcaatgaagctgcgggctgaggctgaggcagcttgtgtggtagctgtggaggttagtaaaactgacagtttggagaggaaacgctgtgaggctattgtggaggctgagccttgtaatagcaggctgctgatggaagttacttgcaatggtgaggaagccaacgaattggttaacttggactccagtgacgtctcggaagagtcagctaggtgttctgagaataatatgggaatgcctagtgttcctgcaacagattcttctcaagataacggtttaggcacgcaaagtagccttgcagaatcagatattaagacaatgaagtcagatgagaagatgtctactgcaactctttcagagtgcaatgactccagagctggaatgaacagtttgagtgttgatgaggctcaagatgacaaagtgagacatgggccttgtcagggtgaggtcatagactcagcaatggctaatgatgctggcacaagtacaaatttaatcaaaatcagccctaccagcggatcagaatctgttaagcaggagaataatgtggttggtaccgaggaagtgatactccacagtagcgatacgaaagttgagaagcattctcacattgacgatgtttgtacagaaactgagatttctttgactgataatggaatatgcgcagtagataaccacaccgatctaactgggtgcactaagcaggaggagaggggcagccccatgaatgaagccaatgatgtttcatcacatgacattgtatttacaaggagaggtagaaaatcatgtgaggcaaagcagaggacatgtgaagaggaggcacggtttgagaagcgaatcacaaggtcagctacagttaggcagagagaagtttctgcgagctcacacaaaacttccacaaatgaggctgcactagaaggcagagggaggaagggagatattgttgctcactatacaaggaaagtaagcagtgcagtatctccaaaaggtcaccatgctgagctgggagactgtaataccagtatgccgaaacaaacagtgaaagaaacggtggttgatcgaagagactcaggtgtccctgagaatgataatcatgcgaatgtcacagagaataaggagtcagaaaatggaaaggagatcaatttgaagacccaaccacctgtgggaattgttaagaaaacatccggaggaggtgtttctgcggtggatcagaatgtctctggttcagccatcactgagagaaatgatacggagcatactgattctgatggagttaaatcggaaaataaaactcctgtgcagaaaccactactgtctgttggtgcgaagattgttgccagcaagaagaggatattggaagcagagcttgataaatccactgggagatcaccaattgctttgccatccatgaaaaagacaagaaatatgtcttctggtcctgagataaaccaacctgataagtctactggagataaacttattgagaataattgtgattcgggcaataagcgtgttctgagggaacggcagcatcgca

SEQ ID NO: 195751 - DNA, 685 bp, Zea Mays
cttggaacagctgctacttaacaaaacatgctatattgcgatctaattaaacatagatcaaacaagaggcacaagaattcctcaaaccttggcagcgccggcttttgccttgcccacaccagccctctgggacagcgacctggtcagctgcggcgaggtcctggaccccgcttcgccgcccgtgttagccccggcatgaaaagcaaccccagggacgacgctctcaaggaacgagaaagactgcagctgctcgtccagccgctttgccggcgcagctgactctcgggacaccggtggcttctccaactccaacgacgcccctggctcatgatcggcgacctggttccggccaagcgcggtgtcgctcggtgacttgtctacagctgagaccttcgagcagagaccccccatcccctttcccaagacgaataccctgatccccacgccgtccttttccaatttcttgccgccgtcgcagcccgtgatccccacctcgtcctattccaattccttgccgccgtcgcagcaagtgacagagtccatccaataatgtttgggctctatgggcaagaaataaaagaaggaaccgatcaagtccggatggatctgcgaaccagctttagtgtacgggggtaggagaggagggcaacgactccgggagaaaattcggggtggcgtgctccag

SEQ ID NO: 195752 - DNA, 478 bp, Zea Mays
ggaataatacacccgaacccatcgatgacattctcaacagtaatgagcactatcttcctaaggccctggatgttgcatgtggttctgatcatccagaaagtgccactagacagattgaaacaagggtgcctaatgataagcactcaaagttggcctcagccattgttcatacgaaaaggagatcagagggcatttctctttcagtggcttcttctggatataatcctcaagatgcatcccatgctaatagtcaggaacacttgattcatggtgattccttgtcacatttgctgcctagtcaacctaacaccggaatctcgaaaatttctgcaagggtttcatgtcatgcaaattgcatgagctgcattcacgtgggtaataaatcccatcaggttgcacatggtgagattggggttccctgtttctatgataaaatggtaagttgaccttgttgcacatagcagaagcaacaacaagc

SEQ ID NO: 195753 - DNA, 465 bp, Zea Mays
agcggccgatgccaccgcataaggccctaatggacattgtcatgtagttggctaatctctccacccgcatgtcgctagtagagcaccattaggcgttcgcctttgtggtcgccatgcactaaggttttccctatgcgatatcgtggcatgggcaacagtgcccaccctgatccaccaccctatacatcgcaacaagatattgaccccgcagccaacgagtctatgcattcttagctatgggccgacatctcgatagacttcatccagggcctccctaaggtccacgagaagtccgccattctcaccatatgaccatcgtcgaccacttctccaaatagacacacttcattgcccattagccgcccatacatggctgcttcggttgcccgtgccttctttgagggcgttgttcgtctacacgacttccccaccttcatcgtcagcgctcatgatccaatcttcacc

SEQ ID NO: 195754 - DNA, 412 bp, Zea Mays
atatcaggcaactctgagtaatgctgcatcacaaaatataatattttagttaaacaggaaagtgaagcggggatatcagctgcaccaatgcaaatgcactgacctggagggctcgcaagtacaaaccggccttttcacatagctgagcaatacgagggcggtcgtaatgactgaacataccattagcaagaatggcatcagcaacatttgggtaagtcactaagtttatctccaaaacctacaattcatacagaaatgctcctgagaaacaaataatgtacacatccaagcacaaccaattcatgttcaaagaggaaagatgataaccttggtttgaagaaaagcatgctctggcaagtttggcttcagaacatccaacagaaaggctgttgcctcccgtatcatatttctc

SEQ ID NO: 195755 - DNA, 363 bp, Zea Mays
ggtgcttggtcaatttggtatcattgcagcttgtgtgtgttttatggcattcttaatctagctggagttttgtcactcgctagagaagaacagcattgtggggtctggacaggttcaaggtatttcttatctcgctgcatttgcaccagatggtggctagttttctcctaggttgcagtcatgttttcatccttgtaataggcgtgttagtgtaagtgcttcgaagtgggttggtccggtgctgtacgagttttaaacccctttcttcttcttaatataatgatatatgcagctctcctgtagagtgtagagaaaaaaagcatgacaaacaaacttttagaaagttctattgcagtttagtac

SEQ ID NO: 195756 - DNA, 486 bp, Zea Mays
tatttttgtaccattatttcagaaaatccctggaggtgagatacattctaatattgtttgtgcacggcatagttcagcagcatctgtagttttttgcattattttggtcactcaagcaagtttgcaattgaactaaacggttcccccttctagtctcatcaacttttagtgttttagtcacaactgccaactgtggaccatgcttttcctgaattgaaatgcatggacttctgaagttaggagttagaatgcatgaactcatgtgcatacaaaagttgagaaacatctgtgattaagatcatcagttttcatggaagtttttgtgaccttctgcaaataaattttaccttgatatcttaggcagtcctgttcttggatatcttgctgctggtgtcctcattggtccatatgggctctccatcatccgtaatgtgcatgggacaaaggcaattgcggaattcggagtcgtgttcttactgtttaaca

SEQ ID NO: 195757 - DNA, 284 bp, Zea Mays
aaacactgtaatgtcgccatgctagcactgtgtgcgcagcaagtgaaacagtgatggcgtcgtaggcacccgcaacccaaaggagagagaggtgttgcatatgcattcatgtaatcatgtcaaacttgttaccagcatgtagtttcattagtggatctactgtttgctgcacaagcatagttgtttggtgtggaatcgcggacgagctggagactgcacagttcatgccgtgaccgcgtcccaagggtgttgttttcgccacggtttgcaagtcgtgcacgtcg

SEQ ID NO: 195758 - DNA, 380 bp, Zea Mays
cttagacactggttgtactggtcagtttgtgagaaaacaagagccaactatccttgaaaagaaactacgtgacttaagtactgatcttcaagtttggttggaaaaaaatgtgctgttgcagggggagcttgagagaagatttttattgatatgcaacatacaagaggagatatctaaggtcacaacattgaatcgaaccaatgaagctcactttactcctttacaggctgcaaagttccatggtgaggtgagtaatatgaagcaagagaataacaaggtcaccaaagagctacaagctgggctcgagcatgtaaggggcctccaagtggaaattgggaggactgttctgaagctcagagacaatattgaactatcttttg

SEQ ID NO: 195759 - DNA, 518 bp, Zea Mays
ccgcccgatctaacccagacggtccagattagatcgcgttttaatcgaaccggtatacgattcaagcccactgatcaagatccaaaggccaggattttattaaggcgcgatccgatccctgccctccaaccaggatctaacgcccccaaagcgtcccagccgaatgggtatacacgctctaatcctagccgcacgctaccggatcaacggatcccggttgtcttcttcaccccggccgacggacgcaagggatgagagcgcccagggcagcggtgccattgccggccaaccccgcccggcggccggatgcgtatttccaatcgtagactagcgcaggattaagcggaaactaaaacgaactcgagaggggtgcctcaccgagggttgggatgaagacggggccgatcgatggtgccctatgcgcacgacggcgccccaaatgctccggctagcaattatctatcaacgagacccacaacgggccccaggaagctccgcccagattcctcgtgcgccga

SEQ ID NO: 195760 - DNA, 347 bp, Zea Mays
acaccactgcgccgttgagtgtggccgggagcgcaggtggttccgttggtggcgccccaacgaacttcttaaggatgcccacatggaagacgtcgtggattttggcgtcggatggaagctgtaggcgtacggccgcctcgttgatgatctccttgacacggtaggggccgacataacggggcttcaacttgcctgtggtggaacgtggcagggatgccgatggtcgttgacggagacgaagaagggcccagtcaccgacgttgtagacgacctgcctgtgatgttgatcgtaggcgcgtttctgggatacttgcgcctgatggagacggtagcgaacgtcgtcgagg

SEQ ID NO: 195761 - DNA, 618 bp, Zea Mays
ctctgctgagggcctggggagtctcttggttcagtccctctccctctgcagtttatttgctttttttaggtaggtggagtgtggagttgttgggtgggagagggcctggaatttatttcgagctgcttctttggagaccattgtttctcgaatctgagttcctcttcttcggagggagttgtcaattgcgttctgattgatttggacaagatcggaaggaactggcactctcggtgggcgtacaaaaactctgagcttgtggccttatcgacttcttgggggcatctgggagtagcttcagcgattcacttgagtctggaggaatggcgccgaccaagaggatggagaagctcaagctcagcacattgttgactttcatgcgttgccacaggggctctagtgatgaccactcacggattgggacagtggggttctcccgagtcgtttacgtcaacgagcctgatatgcttgaagaggagggattcaactaccccttgaatgaagtgtcgacgacaaagtacactctggccaccttccttcccaagtccctcttcgagcagttcaggagggtggccaatttctacttccttgtctctggtatccttgccttgactccac

SEQ ID NO: 195762 - DNA, 448 bp, Zea Mays
aagatcagaaaaggttttctctggcgtggaaggaaagaggtcagaggaggacattgtttagtagcttggggaagagtctgtagacctctggaaattggtggacttgggatttctagtcttaaagaactaggatgggccttaagaatgagatggttgtggctgcgcaaaacagatccggataggccttgggcctcattgcccttgcagatatccaacaaaaataaaggcctttttctacactgccctgctcactaacattgggaatgggtcttcaaccttattttggcaagatcgttgggtccacggaaagaatattgaagacattgctcctcggctgcttgcagcggtgccaaaaaggattaggaacaacagaactgtgcttgaggccttgacagacagaaaatggttaactgatattaaaggggccttgacagtaggtgtctttgcc

SEQ ID NO: 195763 - DNA, 437 bp, Zea Mays
cacctccacgacgcttcgacggcatcgtctactcccgccgacttcctgcaccggcggtggctgctcctccaccgacagccacctcttcatcaccggctcctcctcagctgccacctggggcgatcccggtatccccggtggtcaatcatcaccgtatgaccacccgtgctaagctgggatttcgccaacccgctctgtttcatgttgcagcattgtctccagtgccacggacttatcgcactgctcttgctgatcctcattggcgtcaggctatggaggacgaattctctgctctacagagtaacaacacctgggaccttgttcctcgtcctccctcctgcaatgttgtttctggcaagtggatattcaaacataagttcaatgctgatggctctcttgagcgctacaaggcgcgctgggttctccgtggtttttca

SEQ ID NO: 195764 - DNA, 282 bp, Zea Mays
ttgtgacttgtgagtggtcgtggtgtgataactcttatctagagagatttgtgattgtcttggttctcagttgaggatgtgtggtttggtgtgtctgagccctcttgaacctgatcatccatgtttaggtccatgacttcgtgtttgtgcgtagtcgtggtcgtggtgtggtaactattatctagagacatttggattgtgttggttctcagttggagatttgtggtttggtgtgcttgagccctcctggacctgatcatccatgttttaggtacctgagcc

SEQ ID NO: 195765 - DNA, 339 bp, Zea Mays
gttatctgtttcttacccgcccggattattacccggtcccgtcctatatctgtcctgaatcttaactacccgtatctggtcccgtatccgagataaatacattagggtaggatatgggatgacctgtatccggctgtattcgtcccgttttcatccctattttaaaatacacgcgaccgcccaaacggtaatccctgatcagatctcggtcgcataccagcaaatctacggtcagcagtcgtcgtctctcacctgccgcaccagcacgacggcgctgaccacccacgacggtcgccacgctggtgatccccttgcctaagccccgatacgcgattcttg

SEQ ID NO: 195766 - DNA, 338 bp, Zea Mays
ctgtgtgcaagtgcaacactggaagtctacaatcggtgctggcgtgctacactgctgcctgtgtcgactgtgtctttgtctgtgtgtgcatgagccatatccctgtctctatttggcgttggcgtcttgggctcttggatcttggcgaattgagattggcgatgtccctgtctccctgtgagtgtgtgcaaccggtaatagcagtagcactactgcagagaacctgaatgtatttttctgctgccagcctaccagtctatgaactatgatcaatgtgaatcaaaactttgtattcaaatttgtgagttagaactttgtatggctaagtgagattcttc

SEQ ID NO: 195767 - DNA, 502 bp, Zea Mays
gtttggaggtggtcggcgctttctgcggtatggcttggacgaaggccgagtcattagatccctggtataagtcctcaatcactgctgcctcagtgacctcggggatacgatttctcatggtctgaaacctcttgaggtacgaccgaagtgtttcatcgccccaacacctgatggatttgaggtcccatggctgcgccggcttgtcggagagggactggaagtgggcgatgaaacaccgactgaagtcgctccaatcatcgatgcagtgtcatggcagatgtcgtagctactgcaatgcatcctgtccgaggatgatgggcaaatatgcggtcatcacgtcttcggttaccccaacgggccaggcagcggtcgtatagacagccaaccagcctcccgggtccttcttaggctcatacttgtcgacgttggagatcttaaagtttgggggccactggatggccctgagacgcggagtaagcgcggatactccacatgtgtcttc

SEQ ID NO: 195768 - DNA, 276 bp, Zea Mays
ggctttgcccggagataggtggtccaaagttcgatcctaccccggtcaccaactatatccggggaatattccgtgtatcagggtaacaacggtaacaacagcagtgcacgcgcagcgaccaatgcacaccgaataacacacccgctaactaagctgacaggtggagcccctagaggtgcctcatggtgggctaatgacgtaacggtgtgacatgtagcttccgccggccttagagccttcgtgctatggtacacttcgctgcgcttggacggaagg

SEQ ID NO: 195769 - DNA, 702 bp, Zea Mays
aggatgatatcaatgctgaccatgcaaacacagttgaggacgaatgccagaacctctctgtttcaacagaatcagctccgctaagtacatttttaagtgtcagtcccttctgtgcgcttttaccttcagtattgagccttgcatgttcttcgccagatgaaatcatggaagcacataaggatgcacttctaagactccttgaagttaaattgtctgactgcacattcagtgagcttaccttgtatctgagagtcatcttgttctggactcatcacctactgtcatcatatactattaaggattcaaattcagatgatcttgagcaagtatgtcatttgtgctttggtcttcttgatagagtatttgagcgtattcaagttttgactgctgacccttcacagtcaaattctgaatacccgtactatcccgctcaacatatccaagacattgttgattctgttcttcggcatcctgttattaccctgtctttgtcatgctctttatccaattgccaaaatttagcagatgggagtttggaacatctggaagaagctttggctatttttgcgacggaaaatctgcaccttatagaccgtttcgttctaaaccttttgggtaaattgtatgaccttttgctaatgtttggtagctatggtggtaactactctacagataatgggccatcccatgagtcactgtttg

SEQ ID NO: 195770 - DNA, 361 bp, Zea Mays
atcggttgtacatcaagaacgctttcctccatggcactcacatcgaaacagtgtattgtagctagcttgctggcttcgtcaactccactcatcctcatttagtgtgcaagctcaaccactcgctatatggcctcaagcaggcaccacagacctggtacagtcgcttcgcttcctaattggtatcgctggccttcgtcaaggccaaatcggacatgtccctattcgtcctccgacgcagcactaatacctgttaccctaactctacgtcgacgacatcgtccacatagcgtccaacccgccctccttcatcacacaatcacctctctgcggcaggagtttgcgacgaaggacttgggtcctc

SEQ ID NO: 195771 - DNA, 510 bp, Zea Mays
acaagttttaatgattatttttacactaaatatcaattctaaaataaatttctctacttctggtctgcgcgcaagaaatctggaaagtgcaggggccctggtgtaaaacatctcaagactcagaactactggcgccaggactgcgggttgattcataaaaataacagggactcttaagcaaaacgtccacggcgaaggggtatggtaggatcagagccgttggattacattcgaacgatccctaatagatcgagcgccgaccgaacgggtacaagatcgcagccgttggatcaccgtctacggtccggatttaaaatagccagacacgctcgcaaccgtcggatcgcagatctatggtcgcggatctattggacgaaggggtaattgttaacctaatctacaccgtccaaactggatcccatggcccatagccattcccctcccaactctaatcctggccacaattgaacaatctaacggcccgcacgatcccagccgccgtcttcccca

SEQ ID NO: 195772 - DNA, 356 bp, Zea Mays
tgtgttttttttctttatgggtgatttctcttggaaatcctaggatagtgtttcgatgtattctgaaactttgttgtgccagaaacatgcattgttttatcattaaccagaattgagttagggattatcattaaggcattaaccaaaatggagttaggatgtctttttttgtagtgtagaaaacgttgtgtatactgaaatgtgcatgcttgcaacatgtctaatatagattatatttgagtggtatctttgttgaagaacatgtgaaattagagttctggtggtcttctagaacacacactgctcctcatctttactttctctacataattcttcaatatgttggtatgttcccg

SEQ ID NO: 195773 - DNA, 1020 bp, Zea Mays
gtgccaccgaggccaagaaggttacttttggggcggaggtagggaaggccaggagactgaggtctcgggtcatatggtcgccggtcgttgccaagacaagggggaagtctgctcgagccggtactgattctgctgctgaagacggtatttctgcagatgtgggcgctgatgtcccagtgaggcggtccaggaggaattcgttcaatcctgccgaggctgaggaagcaggagaggctgttgctgttgacaggaagcccaagcgcaagaatcaggagaatgacgagggcgttgctgttatcgctcaggctagagttacgagaaggtcaaatttggagtggtctgctactgtattgcctcctgctgttgagaagaagagagggaggcagaatgcagctgagtctgatgtgcagaagtccgctctggtggaagtaacagctaggactacaaggtctcgctcaatcgtacctgttgtggtgccacccactgtggttgagaacaagaggaggaagactggagatccacaaacaactgtagagttgactatgctttcagatgtgcccagaagtgattttcctgccaccaggtctttaaggaacaaaattgtccacgttaacaacagcgtcgtggacgaaactcacactaccaggcagttggaaaacaagatgcgtccgtctactcgtaggcatcaacaggttgcatcttctccggaggataaaggtcaaaaaattcctgctaccagtaagtcccctctactgaggtggtcacggagaaactattctgaggccaatagtgcaaattcagtaaacatcaaattggccaaagactcgagcacagctcagccattggcacaccataattctcattctgaagatttggagaaacaaccagcagttaaagaaccaattaaacggtcaacacgtaaatctattgctttggctgcacttgagaaagagaaggatgtaattgaaggaaagaaccctgaagcacatgttaggcgatcaacgaggaaatcagttgtgc

SEQ ID NO: 195774 - DNA, 406 bp, Zea Mays
ggcagttgccccatccgcctgccttcggcctggataagccggtgagctttgtcgggcgttgtggaagaattgatcgggctgaggaggaactccgtcgtgcactgatcgtcagtgttgttggcagggaggattctggctgcgccgtggaggtgcgtgacgcgatcgcctcgaggttttgccttgaagcagggtcgctccgcatacgtcgtgttgcgcctaattctttcctagtcttcttcccctcggttgccgtggctgatcgggtgattggcgaggggcaatctcttcatgtccctccgctcaggttgcatattcgaaggtggtcgcgtcaggcgttcgctcctggaggtggacagccgcttgtgcctgttgacgttgaacttcgtggaattcctgcgcatctctg

SEQ ID NO: 195775 - DNA, 271 bp, Zea Mays
ggaagaatcagactcagcccatggacccgcccggggatgtcgtgctgtccgagctcttcggacaccagaaggaggcgctggggtggatggtgcaccgggaggagtccgccgacctgccgcccttctggcaagaaggtgaagatgggggattcgagaacgtgcttaccaatcaaaagacggagaaacgaccgccgccgttaaagggcgggatcttcgctgatgatatggggcttgggaagacgcttacactcctgtcattgattggaaggac

SEQ ID NO: 195776 - DNA, 295 bp, Zea Mays
gcaagacgatattatggcacatatgacatgcttgaaaacagtatgatgaaagtagggttttcttcccttttcaccttcttggttctttcattcgctgtctgtaactttgcagtgtttatgtatattgttgtttctgttcttgacagttggttggtagggaggatggggatgaagatggatttcgactgtggcagagtttaacccggcagacagacctcactgctcaattgtgttctattatgaaggatgtaagaaatgtaagaggtagcgcacaaaagaaaattgaaaaattgag

SEQ ID NO: 195777 - DNA, 371 bp, Zea Mays
ctgacttctctttcgaggatctagagcgcacaatgatattttgctagcgttatgctcttcaactcgccaaaatcagcaaaacgaataggagtacagttcctatcagttgcaagtgcagactgctttggtcgagatgtctctccgacgcactttgcatccctgttaaaggaatgcaggtctgtgaatacagttcgtcaaattcatcagaagataattgcttgcggccttctttcgtatccatcatctttgttgtctgtgccactcgcaccacttccatcacattcatatgtatcaccaaaatctttgggcaccggtgttgtagcttcctatcttgcttgtggtgctacgaaggatgctctctcagtgttgga

SEQ ID NO: 195778 - DNA, 572 bp, Zea Mays
gcttcctcttcctacagagatcgagacaatggtacataaatagaatataatagatacaacatattaatttgacaaccgatgcagtaatggtacacacctttttttggtaccatttcaagggcacttgtaacttgttttgcgaatgcccagttgcccacaatttgggcaagtatactgtcttttcagctttgttgtgccttgttcattagctacgaccttagcttttttcccacatcctccttctagacagcttttgattctatttttcctttgtcgcccaactcctcttttagccattggtgcacaaacttcagatgaaaaatcaacagttagccaaaaagaacgatcctcaattggtggcacccttctcaagtaagctttcctaaatttatcaatagaataatagtcgtcaacaaagttctccataccaaaattccttagatcctgtgcaattatgagtgctaaaccatgttggaaaggtttccctgtgtgctgccactcctcacacgaacattctctcaactctgccttaacgacatgttttgacatacaatttgtgttgtctcttactt

SEQ ID NO: 195779 - DNA, 566 bp, Zea Mays
ctacattacttcactgtagttagctttgtacattccggcagcaaaaaatataatatttgatgcccaaattttcgggtacctaaatttttcgggttcgggtagcccgttctacccaatttaaaactacaagcttatccgctacattgcttcactgtagttagctttgtacattccggcagcaaacaatataatatttaatgtaaatatacaatgaaaaccaggaagcaaacctgcacaataagcatttagtttaaatttttttcacatagcatcactcactcacatcaaagcagccgagcatcaatgatcactgatcacagctcacggtctacacagtcacacatcactaatcacggtctcacacatcgttgatccactgtccacactcacggtctcacatgcacaacagacaactcgcagcaacagcaaggcagcaatacgggtgcagcacacaacaacaaggcaacattgtagcaggaaggcgagcaggaactaaacggacatctgccactgcaaagtagccgagcaggagcaacaaatcgggccaaacgggtatttcgggtacc

SEQ ID NO: 195780 - DNA, 485 bp, Zea Mays
acatcctaaagctcaacggtgagggtgccaggatccacgagagcatcacaatattcattcggtgccaggacaggagcaggtggggagtggcgttggtgacgacgtggtcattgagggtgtagcgttgaacagtgaggagcacctggtcgcaccagcgggtgtagtgagcggacacggggtcgaggacgacggagacgagtgcctggatgttcaggacacccgctacatgagcgtggaggttggtgatgactgcgacctcgaactccgaaggaagtggtggctgtggggccgtcggaggaggctcgacgacaaaggagccgagaaggtgaagtttcgcctcaaccagctaggaagcgagggcatctgtcgtggtacgcttgtgctcccaggccacaacgactttgacaacagtgagtgccacgactaaggtggattgagctctggcgatgtcggaggaggaccgagcccacgtagttgcagccttg

SEQ ID NO: 195781 - DNA, 354 bp, Zea Mays
ttaaaggggtcggggagcatcactaacatgtaagggtgctagaacaagaacgagaagggaatgagcagacctggggaaggctggccgcggtgaggtgagttcacggtggcggagagtggatttggggcgaatccaaaattcacgagttctagcgaaggactgccagcgattaacggtggttgggtggatgatgatgttatgcagctaggggagggctcaatttataggcagcttcgacggtggccgggaattttaacggcgatgtgtggcggtcggagataagtaaaaaccgtggcgcggtggttgcgtgtcccgtgtcgtggcaattgctccggtgatcaacggggagctagg

SEQ ID NO: 195782 - DNA, 526 bp, Zea Mays
ctccgccgctgctgtccggcaaaccatcacattctgtgacgcgggacgtcgagcaactcctgacttggggcactccggtcccatgtgacaaaattccccattcccattcctatcgttcaagccatcacacactccggacgttgggcccacattgcagactatgggcgcccacgtgatagccacccttagttttgcacacaccggacccacgtctgctcgcgcaaaaagttgcctcaatttgacactggcaggagcatttgaccacgattgctttctctgaagaaggaaggcttataagccagtagaagttatgttggctggtcggtatggtcataaaaatgtgtaagccgtgacgacgacataggtcgcgtgggctgtgtttctttggtgcggcccaagtagctgccaggaggccgcacgcttcttaccctgacccagcttggctttagggtcagtctcccttgctttctctgcccaacgagccctcgccctctagctcttcctgctagcgccgtctccgtcccgt

SEQ ID NO: 195783 - DNA, 555 bp, Zea Mays
aattcaagaagtcatcaaacacttactgcatatttcagttactgcatatgaacattgaacaaacaacaaagtagagacacttactgctgaaaattcactccagtttctctcacaaccagaggccgatcaacagaggcttataactccttagacggatcaggccaccaaccgaacttccagccagggtcctgtgacttagccttccgcttcgaatcgttagcttgttcggcaaggtctggaggcagagctgctattgccttgtcagcaagcgtgcttgagtctgcagcagttgacgacaccgacggaacatgatctgtgctgccagtttcagccgcagaggacgccttccctcgggcaatttgggactacgagaagatgacttgatcagcggcagcacaacgtccatcaccatgatgtccatgcatatctgcgacgtcaaacatcttaatagcagctctgcctccagagtccagaccttgttgaacaaagaggagtcaagaacagaggggagagagagcagagaacaaagaggagtgaagaacaggcaaaagcagc

SEQ ID NO: 195784 - DNA, 2357 bp, Zea Mays
gctgttgctatgtgtgttcataggtacacccggtaagtctaaattgatttctttcctcttgacgtgctcactgaagaaaaaaagatctattatacataattattagtcttgatccgtttaattatctgtttgtagttgggccattttatctggacttacagttatttcctacttctcacctaagctagcttttaatggaagtgctaagtttacttcattgggaagatgaagaggtgattctatccaataaaaggggttgcagagatctgtaaatcaaaaatatttttataatatggttcccacacagacactgtaagggcttgtttggtaaggggattggagtggattaagtgggaaatgaactaattttccccgtaatcccttccattccaaacaagccctaactgtttggaggagggggaatatacataaaatattgggaggactagttaaattgattaggcacctcattctgttactttgcttccaactattgtgaatccatgttatttttcagaccttttataatcctgtacagttagtctttatatcatatatcagttaagagacacctcttcaaagtgagtgtatcgtgatcattcatgtcaattagatactttcctcaacctcctgtttacttctcttacttgggccccatcaatctcccttctgagttctgaccctttgaacacactacaactgcaattggtaggtggtgctaacctttctgtggtgacttcttcattgtgtgtgctctctaaaattggcaggaatgcctctttcttaactctatttcacctcactgtttttttaaaatttgacaactaaatctggataagaagtgatactcaagtatttattgtcactttgcttctatttgagctccttcaattatttgctgcaagtcttttgctcactaaatcatgcataatgcaaacgatgttaacaagtctgacccattgacacctgctaccttgcacaactcttaacattctattcttgttgacactttgcttctactttgactttgagtgccttgaatcatctgctgcaagtcttcttttggtcaataaatcatgcatgatgcgaacggtgttaagaggtcttacccattgacacgtgccaccttgctttgatgacagccaactgctaaagcaacatatactacactgcaaaagttgatacctgcagaggataaataatactgctccactcaaacatatctctatgtgatgccatactaatatgaaatttctttttatgttgattttgatcttgtgcttgctttatatatgtgtctttattcatttgttccttgtaattctattttacctcctctgtaacaaagtgccattggatgtgttgaaagtcatgttattgacaataatatggtgcatatcatctcaataggtttatatgttcacttctgtttgttcactcagtgctacataagatgctgcactaaatcacatacatactcgtggatttgcttttagctggaaaggagacttttcattttccccatttagaatgatgttagggtcattcgtcatcctttactcatctgatgattgtgcagctaaatagcttatacttgaagaagggctagattgaagtactactcaaatgttcaatcacgattatgtatttatgtgcaagatcatataagttcaatatatgaatttcctttgcatatgtaagaaaaacactgtttgaatcatgatgcactatagatagaatcactgagtattgtactaatttttcacggttgatttcattttactttcattcctttccaactcaactattaacataacagaattagcaattcagtggagtgaattatgctggaaagaagagggccttttttcatgtctttttgaagtagtttaacactattccgttattagttccacactgatatttttcatggtctaattcactaaaggttttggcataatattgtttaagaaagcgatccaaaggtgttcatccacttttggatagttttgtccttaaagtataacatttttccatagtataccatattcatctgatgcaaacttatttaatgccaggttgcgctctacttttcatagaatatgatcagttgcaacagggaacaggcgttgagggccagggaaattgctctaaagaagatagaaagcaaagatttttttggtgcccagaagactgtgcttaaagctcaaaagctttttccagagctggagaatgtgtctcagctgttaaccatctgcagtgtgcactgtgcagcagagttaagggtgaatggagagatggacttctatggagtccttcaagtggaggaaggtgctgatgaagccttgataaaaaag

SEQ ID NO: 195785 - DNA, 279 bp, Zea Mays
aggagacgtagagttatgcaagccgacactttgaatcccacatccatcgccatggaggacccaacatatacccttgattttgtacaccctacaacagatgcaaagggatctgatggatccatattatctgtctgcgactgggttatccctgatttcgtcaacgcacctttcttgccatctccaacccagaccgaggatgtcgcttcgcccgatatgtctaccaatacactaaagcgtaaacatcatgttcctcgtggggaaagacaagctatattagct

SEQ ID NO: 195786 - DNA, 371 bp, Zea Mays
tatctgccctggatcttcctttcactgaaaaagaggttagagactattttgagcctcccttcggataaaacacctggacctaatggattcacaggtagattttataagacctgttggcatattattaagtacgatctgttggatgccttatttactcttcatcatggaaacacacatcagttgggacatttgaattcagcttatctcactcttatccctaaaaaggtggatgcttcgacatctgctgattacatgccaattagcctcatccacagttttgccaagttaatctccaagatccttgcaaatcgcctgactccccatttatatcgcttggttgcagctaatcagagtgcgtttgtgagggggag

SEQ ID NO: 195787 - DNA, 294 bp, Zea Mays
taaaccttcggagcgttgaacaccgggcatttgtgctttatgtgcgtatcagtgccacatacttcacaaaacagcgccgccgaacactcactcatgacatgtcccttgccgtagcacctatgacagtagctcttgttgttcttaggcgcatccacaaaaccctccttctcttgatcggactttttcttctcttccacaacagcaggtttcgggtgtaccttcttcccatcactaggtaccgacatcacaggttgttgagcagcagaaggttgagcagcaccccctcccttgtcg

SEQ ID NO: 195788 - DNA, 400 bp, Zea Mays
ccctcgtcctcttgtagttgggtgtaccacagctgcgcgatgtcgtccatatggtacgaagctcgtcccacgcgttcctccgccatagtgcgatgctggcgaaagtaggcctcgcacttgttgaggaagagcattggatctgtcgtgccgtcaaagcggggaaaatcccactttttgtgttgcggcggcgggtccggatcacgcattccatccgaccgtcgtctgccgccgttatccgacgttgagtcggatttttccttcaaggcgatcacctctgccttcatgtattggagctccgaggtgagggatttcagcgatgcaagcacgtcggcgagggtaggtttggtcatggtggctggtgatgttgcggaggcagtggaagattgtggtgatggcggcg

SEQ ID NO: 195789 - DNA, 327 bp, Zea Mays
atgtgtggagaggtcgaggcacttgtatcccttgtgatcagggagtacaaaaaagacacaaacaagtggagtggggtggaagctttgtgggggcactggtagagataatatgatagcaggcgcacttgaacacacgaagatggttgtaagaaggagaggtaccaaagattgcaaagaagggggtagggtgatgaaccgccttggtaatgaagcgattgagtagataggtggcatttgtcagcccctcagtttagtactaagtaacaagggaggcctgaaacaaccgagagtgtatgacattattcgtggtgtgaatcatacgctcag

SEQ ID NO: 195790 - DNA, 278 bp, Zea Mays
tttcttggctttccttttctgctgctgacgtggcactggctgctgctctttctgcagcgcgcctcccgtctcttgcgcgcctccgacggttataggggaggccccacatgacatgtaggcagcattaagaagatccatgtttctgaatttccgagcccacacccaagatatggctgccataatgtcgtctttgatcatcaaccagcaagctttatagaatcgtccagtgaacccatccggtcccggggccttgtccgaagggaggtttttgatagtat

SEQ ID NO: 195791 - DNA, 358 bp, Zea Mays
gtgacaaattcattcagctatcaagatatgctcctgatgaggtggctgatgatgagagaaagcaagagcacttcacagaaggactcaatgggccactagagtatgcattagtcgctcataccttcccatcatttcaaagactgcttgataaagctctagctattgaacacaagcgtgttcaactaggagacttgaagaggaaggccattacacaggggcagggtagcagcagtattcgccctcgctacgtttcgccccagagtacaccagctcgtccaggaggaggaccacgcccagctcagtacgctccacaggggactccacagacaccccacactcgttaggctgcccccactgg

SEQ ID NO: 195792 - DNA, 596 bp, Zea Mays
ataagggcttgtgatctatttcattttaggtccctgtatacaaagagccatcttttgttatcccaggagttccagcaataattcaacatgaaataatgaataatagaagacatgtactgacaaaggtggaatttcttttatctatccttttattactaaaccacaaggagtgggcatcatgatttgtgcactcaactcttttaatgcaggataccactggttcagtcaaattgtgggagatcactcggggtgctgttattgaagattttggcaaggttcttgtttctcttcaatttcttggatgttttttcttgtatattttccgcattgttaagaactaaaatctacttatttgtacccattttgtactcaccccagttcttacttgatggccttttgagctaacaaggattttgtagaatgctaaactgttttttttttgttatgcaggtttctttcgaagacaagaaaaaagagttgtttgagatggtattactgaaatatgtcatgatttctatgttttattaaaaagtttggtacctactactgtgtaatttgttaattgattattaggtaagcatacctgcttggttcac

SEQ ID NO: 195793 - DNA, 589 bp, Zea Mays
taaaaatcctttttccaatttatttacttaatttcaaacagctctggatcgggcctcaattaccgaaaagtgcaggggcttctgcgcataagtttctaagactcagaatactatgcagtggacggcgggttataatctataatttcagaggggctcataaggaaatatgccaaggccgaaggggtatggagctctgctggccgctggattagacaccgagcgcccagattaattcgagctggttatgtacactaatgcgccagcaaccgttggattccagatccgcggtccacaactcctagcgcgaaggggtattccacgttttaatcctacccgcccgcgcccgatccgacggtcgcgaaagcttcgtcttctacacctggcagaggacggagacgcaggcccctacggcggcgcccatggccggcgagtcccaaatcgaagtccccaagagctatttcttatgcggtttagggcatcacgaggagcagagggaggcaaagcttggggtgggattataccggggtagtaggtcgcgaaggcacccgcccacggcaggatgcagtccagagctgtccgccgagctccg

SEQ ID NO: 195794 - DNA, 803 bp, Zea Mays
ccccgatttaatgtcgtgaaagggtatggcttgcttctaatccgaaccgttaacctccggatcaacggtgcacgtgaccccgacgctactccgcgccagcagtgaccggacttgggcggcgagtcccaatccacggcggcgatcctaccggagttcggccactaggcgctacggggctccattctctatcctgaatagtgttacgcgaagaagatagcctagcggactatatgagtaatgactcaccggagttaggcgcggcaagcaccaggattaccggcaatggcggacccgcgccgcgaatcaggattccgatgagcaattcctgtggagtcgggctgttttaggcggaagcgagtcccccgcggccttcagtgttgggtagcaaacatcccgcacccaatcacagggccgaaacggcggcgagacgcggtgaccagcagaccgacctccgccgggtgctggcaagtgacggcggcacagttttagggtttgggaaggagacgaggtggtcaacgaatgcggcgtacggatgtgcacgaggatagagaagaggctgccgctatttatccagggatacccggtcgccggatccgattatcgcgcacgccaactgcgggacgcgttcggccaggttggggatggtgctgacggggccggtccacccgtcagtgaggagatgaggcgagcgtgcgtcggacgagtgggccccggatgccagcggctagcagattgtcgcggaaagagcgcggttgcgcgtggtttcggttgagaggagaacgctgacaagcgggtcccacaca

SEQ ID NO: 195795 - DNA, 756 bp, Zea Mays
caagacagtggtgttaacagtggtcgacaggttctctaagttcacccactttattcctcttggccatccatataccgcagtgaccgtggctcgggcatttttcgaagggattgtgtgccttcatggtattccgtgctcaattgtaagtgatagagatacaatgtttactagtgccttctggtccgagctttttcaccttgctggggtcaagttgttacttagtttcgcgtttcacccccagaccgatggacaatcggaagtggttaacagaattattgtgatgtacttacgctgcttggcaggtgatcggccaaaaacttggttacaatggcttccataggctgaattttgttacaatacgtcatacctgactgcggtcaagtgcactccattcaggattgtatatggccgggaccctccaacaatgctttcttatacacctgggacagccagagtagctgtcgtcgatcagcaacttcaggatcgagatgttttcttggcagacatcaaacaaaggctaatctaagctcaggtaacaatgaagcaggcgcaggacagtggcctcgagatgtgcagtatgctgtcggcgattgggtttggctgcgtctgcaccaaaggtcggcagtgggtgtcactccagcagcaatgtccaaattaggacctaagttctatgggccatatcaaattctgcaacacatcggagaggtcgcctataagctacagctgccaaccaatgcaagaatctatgatgttttc

SEQ ID NO: 195796 - DNA, 444 bp, Zea Mays
aaattatagttacatacgtacagcgagggcatcacacattacattggttcaaccttcgggatgatacccatctccctatagttaaatagcattatcctcagctcctcaccctcaaaaagacttcgcaactccccctcacctacgctcaccccaaccggcgaggacaacaattcccgcttgccagccctgtccacacgaagacgaccaccctccacctcactcaccctacgcttcgccaccgcccttcgccgcctacgcccagcactcggaccgggaagaacttcaacatccatcacacgcggagaagcctccaccgcagccacatccaatgccgcaaaataatccaaatcctcatccgaagactcctccgtccacaccaccgaactcccagaaccatcagactcaaaaaacttagacacagaatcatccgaatcattttccgca

SEQ ID NO: 195797 - DNA, 667 bp, Zea Mays
caagtttttctccattttctgtgtggaatcaagtcaaagatactttagtagatttgttcactatcatataggcttcaacttctctataaacatcccagcacaaaacattacagaacaggcacaaaccagctccaaaactgctatccacactgaaattcagttactgtttccaatctgaaaattcagaaacacagcagcaccactttaaaccactcttttgcctggattccaaaagtttctaggggcaagttgctcaataaagtttatactactatagctcctctacaagtttgatatagtaaccattaaccaaaacctcttggattccaaactacaatagcccaaagtttgctccaattgctgcaattcagaatctgaatttcactaagtctgaaatctacaatttctgacagctctacttgggactagttttagggtttcaattgagtttcatttgtgtttcagcttcttctagggattcatccctttgatccctccacctagagcaaagttactctctagctcaagatccaatcttctcaagtgttacttccactagactaacacttcaaaacaaataattccaggttcttaaagctttcctttaatacttaagactccaagtcatcatattacttgctcaagagatgatcttccctcattttgc

SEQ ID NO: 195798 - DNA, 361 bp, Zea Mays
gtgcgcataacatgaacatcattgtgggcggtagcgttttgggaggcagatacgtggagcaaaaccaggagttggagcatgtggagggaggatctagagactaggtcgttggtgaagcggtagaggaggaatgcacgacggaggcgcgagatcaggccggagggaaaggggagcgtgacgaggaggttgtagatgattgttccccgctccaacgatgattctgtcctaggctcatctgactccacagccaccaccgtcatcgcagcttccccgttggccgcctttgcccatttattccctccattggaactggcggcaagacctgatgcaccgatagagcggcggatctggggagcatgcg

SEQ ID NO: 195799 - DNA, 542 bp, Zea Mays
aagataaacatcaaggtaagatataggggtgataaggataaaggtgataatgatgaaaagcatagttcatggatagagttaaggcaagactcgcaaagtgatgaagtgtagaaaacaatcaaggaaaagataagtgagattctgacataagagttgaagtaaaagttcattatcgaaggaagttacaaggaattaacgagatcaccaaggatgtgcaaaaataaaaatgaccgctcatggattattaggaaacaagggtgatcaagggcatgttaactgaaatgtcttgaatagtcattggggtatgaaggtaagcatacatgaaaatatgagagtacgcaaaactccaaggatacgagcataccaataccaagagaatagaaattgccgaaagataacgacttaacaacggaatgggaaaggatctcaaaagacaggaaggtcatggtcatataaactcaactgtttaaataggcagcagaggtacaagggtaagtactttgaattaagggataagaatattaaaaatacaaggatacgag

SEQ ID NO: 195800 - DNA, 1893 bp, Zea Mays
gcagattcatggtggccctgtcaaagttatgaaatataaccacattcatgatgttgttatatctgctgatgccaaaggactgttggaatattggtctccatctaccctcatgtttccagaaaatgagtatgttgtgctgagaaatgatgcatacctgagaatatgtttccatctttcactactgaaaaattcataactggaacaacataccagttgtatatgttcatcacagaatctgtttaggtgttattatatttagttacatgcaactgttggaagagcataattaatatctaagttttagtcgtgccttggtcactttcttgcttgataataacttatttagttgtttctgtgttagagctttatcctattactctgtcagcatattcctgtgatttcctttgtgtcttctacaaatatttctcttgaataattcatcaactcaatcgacattgctgcttgttttgtgcagggtgaggtttcgcctgaaatcagatacaaatctatttgaaattgcgaaatgcaagactactgtgtctgctattgaggtactttcttcatcctagaatgatttacatatcttgtatatttagtaatagagtaagtaggcgtactattgaatgggaacatgtttgaatgctttgcagaaccataagggtataatcattgacattgtactgctatgcaatatgcttctccttttctttttattggcacagcagttagatggtggtatctgaattgtcgatttgggtacttcattctgactgatgtatatgattacctgagaaatgtcattaaagtaaatagttggacacaataaaccatgcctaatgcattgtcaaatatgacacttcaaaattatgggctaatggtcaatagtatccttcagattatgcatttaatgaatctgctaactggtccttgtgctgttcaggtaagcaatgatggcactcaatttgctgtcacatcccctgatcgcaggatacgtgtattttggttcaaaactggaaaattaagacgtgtatatgacgagtccctagatgtaaggaactctcccctggaaaacatttggaaagcacaagttatgttattgcattatttttaattgatgaatgttgtcatttttctaggtggcgcaagatcttcaaagaagtgatgttccattgtatcaccttgatgctattgattttggacgacgaatggctgtggagaaggaaatagagaaaacagaaaatgttccacaacctaatgctgtctttgatgagagttgcaattttcttatttatgctacccttttgggtgtaaaggtacgctgcactttctttctttcccatacttccttttatatgaggttggtcttcatatacttaaatatttttagtgtatcttgtattccttttgtttttgtaaacatgtgatgagcaatgtttgtattagagattcttcaatgctctaagaccttgctcaaactttatggttttactggaagattctggcattgagggcatagtagttagtgctgaactccaaagtcaaaacaaatacaaaaatacaaaataactcatgctgtgtcttgattccttgtgtgtcaagactgaagatagggttctttcatgtttctcctcttgattggttgtgtaaatagatgatagacaattccctgctttttgctgactgttttttgggtcatattgttattgaatcttttctgtaagacttattaactttgtcatacatgtgtagattgtgaatttgcacacaaataaggtttcccgtatcctggggaaggtagagaacaatgagaggtttctgagaattgcactataccaaggagacaaaggcaacaagaaggttagaaaaattccttcagtagctgccaatgtcaat

SEQ ID NO: 195801 - DNA, 276 bp, Zea Mays
atgaggttgcggagctaacggcgggctcaatttatagattccaggggcggtggcgcttgaattgatgatggcgcggtggcggccggagagggaaaaggctactggtgcaagtgaacttgtggcaaccgtcgtggcgacaactccggtgatcggcgggaagctaaaacgaagaacagcgatgtggtggaggtactcagatacgtggcgcaaggccgtgcgacggcggttccccggcgagcttatctgctcagtcgcaaaacagaaaggagaaggtga

SEQ ID NO: 195802 - DNA, 518 bp, Zea Mays
actgtctgtgagtggagctgatcatgtagtttcagatcacagaagcttgagccaaaaatatcgaccaaggtcatttctagaaattgttggtcaaaactttgttgtacagtcacttagtaatgctatcgcaagggaaagaatagctccagcatatctgttccatgggccccgcgggacagggaaaacatcttctgcaagaatactttcagcagctttaagttgtactgctactggagagaccaagccctgtggagtttgtactgagtgcagtgactttttcactggaaatggaactaatctaattgaggttgatgctaccaacagaaaaggtataaacagagtacgccatttgattgaaaatataccagcatctgcaacttcttcacggtacaaagtatttgtcgtggatgaatgccatatggtatcttctaaagtctggtcggcatttatgaaatttcttgatgaaccattacctcgcgttgtcttcatatttataacaatagaccctgaaaatcttc

SEQ ID NO: 195803 - DNA, 340 bp, Zea Mays
aggcaaagtggatggtgtgacagaggaaggtatccagagggagcgattgagggaaggtaacctcgtgaagatgttgggagaggacacacgaaggcaaagtggagggtgcgacagaggaaggtatccagagggagtgatggagggaaggtaaccgcgtgaagatgttaggagaggacgcacgaaggcaaagtggagggtgcgatagaggaaggcaacaagagggagagatggaccgaaggtaaccgcgtgaagatgttaggagaggatgcacgaaggcaaagtggagggtacgatagaggaaggcaaccagagggagagatggagcgaaggtaaccgcgtg

SEQ ID NO: 195804 - DNA, 468 bp, Zea Mays
agaactggggaacatcaacaaacaaacagagagagcttatcaaattgttggacgagtggtatattgctgttacattctctcttatggaactgcaaatgttccttcatctaatatgattagtttactcattttagggctgtattcattagaaggaagtacgggaataagccactctcatcctcgacatatcttagtgaagcagagcctttccttgaacaatacgccaaacgaagccctgcaaaccaggctttgattggggctgctggtaaccttgttcaaactgaaaatttcttggccattcttgacgcaaagagggatgaagagggtgatctccggacagatcatggggcagcaccttctggtcctgtgtcaacatctgttgatgtggttcccaaaacagagggccttatagtgttctttccgggtacttactgctgatatatgttttatgtcattttcatttgttag

SEQ ID NO: 195805 - DNA, 493 bp, Zea Mays
ctctgttcatttgcattgttatactggtcaaatctcttagtcagttagcatttgtagcgtcctacttgagatgtctttgtacatgtccaatgccggcccttgggggggtcgaccagtgcccttgatgtacctccagattaatggggcctcatcccatgtagtgattagtgaatattatttagtattagtttgtaaaggcccaacaacaataagacaggtagcatcagctcacgtcttgcttttctaaacgcacgtagctttgccctatcttgcctggcggcagtgtgacacctgcttccttgcttttctgtcctgcctggtggccgcgtcgcgagggttaatgcattgtgtgacctgatctgagtacttgacgagagtcacagactcaccgttagctgttcttgtgatccctggtacagtttgtttatctcatgccttctattcgttgtttgcctgttttaggccaatcagagccgatgcagggctagcagag

SEQ ID NO: 195806 - DNA, 274 bp, Zea Mays
aataagttcaattacgtacaactggtttcacacgatttgaaatcctcccactggtgcagtccagataatacacacacctaatactaaaagttcttaacttcggagtccaggatataaataaacttggtctaattaggtgcgttatcctctacaatctttgagctgctgaatgcctgaacccctagctctgttcaccattttagccttatctataacaaagcattaaagtcacatttctagcagtatatttattctgtaaaagggtttatttata

SEQ ID NO: 195807 - DNA, 761 bp, Zea Mays
gaagtctgtcgccttgcgctactaagacggtaccggctactgccacatatctacactcttttttaccactcacatacaaagggtattccagttgctactccagttttctttgctggtaattaattccctcaccttgtatcacccaattgtaagttggctcagatgctggtagtttgtaggaagaacacagatgtatcgcaagttgctgcctcattttttttgtgatccaagttttgtataagatatttacagccttacagagactgtctggtgaggttatataatatatgatattccccagttgcagtttgttaacaatactatcttgcattcctcaattcttttagatacacaagaccctgaactgaggaaagttgagacttcctttctccttggaccactcttagtttgtgcaaggtaatatcttcagaacagtgatttgtcattagttctttccttttaccttttctcttgagaccctgttcatttgatttgatgtagctctgtggcagttcctctgtggatgtttttgtgttatagacgattttgcatcataaattgtaaactgttcaattatctggcgtgaatatatataaatgaaaagatgccaaaatgccaatttttcttcatctttctctatcctttggtatctttaacctttccaattgttttggcagcactttacctaataaaggagctcatgaatatgcacataagttaccgaagggcatatggttgtcttttgattttgcggattcaca

SEQ ID NO: 195808 - DNA, 459 bp, Zea Mays
cacctccacgacgtttcgacgacatcgtctactcccgccgaattactgtaccggcggtggctgctcctccaccgacaaccacctcttcatcaccggctcctcctcagctgccacctggggcgatcctggtatccccggtggtcaatcatcaccgtatgaccacccgtgctaagctgggatttcgtcaacccgctttgtttcatgctgtagcattgtctccagtgccacagacttatcgcactgctcttgctgatcctcattggcgtcaggctatggaggaggaattctctgctctacagagtaacaacacctgggacctcgttccccgacctccttcctacaatgttgtttctggcaagtggatattcaaacataagttcaatgctgatggctctcttgagcgctacaaggcgcgatgggttctccgtgttttttcacagcgccctggaattgactttg

SEQ ID NO: 195809 - DNA, 372 bp, Zea Mays
gcatcagcagcttcatgtcgtggccacacgagtcgtcgcccatgtgagtttggacggggcctgatttcatctcgttaccgaaggttgcgcacttaacaacgtgcgactagttagtggagggtgcttgcctgcttgggaattggatactcacagctctgtgtatgtaccttactcttaattaaaggttccaggcacttatatatattgcatagttagttcttggtcgtcatcgtacttacacgggattattggatatatgatattgatgtcatcacatcacatgttgacaatttgtggtggtgcgcatccgtgcttggacagggaactcgtgcaaggtagctggattactgaaataaagttgacaagcacgaa

SEQ ID NO: 195810 - DNA, 694 bp, Zea Mays
gccccagcagccaaggacataaacaaaggctgcatagtgctccatggctggttcaatgccatatgtgcttggcatagaaagaaagagttttctgcatttgtctgtggagtctgagcttgtgtgactgcaagcagatatgaccagaagaaaggtaatggaatcaggcctgaccattgatctctccatctcagaccatatcttcaatatatcatccccctgatgaagaagaagatgggcagtgatcattgcattccatgacaccaagtctcgacaactcatccgctcaaacaaactgattgcatctttcaactccccacacttgccgtacatactgataattgcgttaccaactccacgagcgctcagaagcccggattttgcagcaaaagtatgcatttgttttccaagttcagcaaaacctagactgccacatactccaaggacagaagtcaacatgaactcatcaatgaattctgcaccactgcttctaaacatctgaaggaaggtcgaaagtgctttctcatactcaccacctctgacacttgccagcagtagagaattccaggcaatgtgaaagctctcctcatgctgccattgctcaaataacagatgcgcgtctccagatcggccacatttgatgcacatgtcaatcaacgcagcatcactccatggactagacacacatccacacttg

SEQ ID NO: 195811 - DNA, 604 bp, Zea Mays
ctgaagaaggccaaggatcaactggcattcatcctcggagagagggaccgtcttgtcggggagctcaacgaggccaagagagtcgctgatgagactcacgagaagctccaggatgccctcatggccaagaggtgggccgaggaggccactgagatcgagaagttccgcgcggatgagctggagcaggcaggcatcgatgaggcacagaggcgggaggaggagtggcagagggagattgagtgcgtgcatggccagcacgccgcggacttggagacgttggtcaacacaacggaggagctggagaggctcagacgtgatctttccatggtgaacgacgccaagaaagctgcacttggccatgcagatgatgcaatgaagatcgctgaggccaatgcggagaaggtggagatcctctcaaatgaagctgctcgcttgaaaggcttgcttgattcgagtgctgccagcgaagagagtaaaagccgtgaagctgagcttcttgttaagaatctgaggtccgaggtttcatctctgaaaggcaaacttgagaaggcaatagtccttgaagagaggttggctgaagcagaaaaaatcattgaggagctta

SEQ ID NO: 195812 - DNA, 418 bp, Zea Mays
caagggcggtggtgatcgctgccaactccgacgcctgggtggcggacgctgcactgtcgtcggtgttggatcctggcatctccgataccaaattggtagaaacacctcggctgcgcagattataggagtgagtatcaagttggctggacgagcgggagcgaaggggcgccgtgctgccgctcggctgggaacttaggtgaggtgcggaacacaggtgaggcagggaacaatcacttcttagattgatcaatgcttccaattgattacagacgcctggactttatagtccaactctaaacatactccttaatcttaggaactctaacagactctccttaaaaaacagactccttaatattaggatctctaaacagattctccttatctaaggatcctcctaatccttatctatatgtcc

SEQ ID NO: 195813 - DNA, 313 bp, Zea Mays
ctctgacgccgtccaccagctgccgggggcgggccgttgtgcgtcattgctattggcatgaacattgaaatctcgatgtgatacgagagtgccactccattcctcctgcgacgttgccctatggctcttcaattagaggctccattgatcctgggatgcgctttggctgtgtacaccagacttgaactccaaagatttcttgttgatcatttgtccctggcttcattgattcaatgaaacaaatatcgtctaggagtagagttgctgtcgcgactccccaaacatgagacgtgcccccctgatttcaacatcc

SEQ ID NO: 195814 - DNA, 550 bp, Zea Mays
cgatgacggtgacacttcatgttcattacttgcttgtttgccttcatagtggtgtcacctagaagccatgtatcgtctaaatggaggccgtttcacacgggacgttgcttatttgcctgcaaacctttgggtttttgacgagccgggctctttcgggttcattacttgcttgcagtgtgtctctagctgggtgatctgcagtagtgaagtcggagctactttgttttgggtgcaatgaagctcggcaatgatcatgtgccacattcacttcttgggagatcagggcttgttgcaagtttgtggtggcgtgtcagagtccttggctgatgttcaccatgggaagtcagagctgcttaatgctgcttgtggtaagcttggctacgatggcatgtagtgggttctgtctagtgtcctttttgtgtagtggagtgactagggagtagggattgtcgtatgggttgtcatggttgggttttgctggttttccatttaagaaaccacactctgtatggtttttaggtctggttttccttataaaccagaacaattt

SEQ ID NO: 195815 - DNA, 2526 bp, Zea Mays
cgagctgccgatgcgaagtacagctgggacgagcttgggaccagtagggaagagcgctgtaaaaggtaacaattatgtatgctgttttttcttttccaagctagtttagtttagctatcaagtatgggcctggaagctggctattgattttgtcaaagctaggagttaattttttgctgttttgagcttgggaagggatgggggaaaacatgtgagcaaacaatagttgttagttactccctcaaatgcttactaagatgctatgagttgagattgcacaattcgtcttactccgctgtagccgtttacacttgaaacacgtgcaaacgaagcaagtttctagctgtttaaagcgaaatcagcaagctaggagggttatagtttataagtcgagttagcaagtgcttgctctttttgttgcttgaacgcaaggcatttctaatgagcaggctcataaacattgtttctatatatgcatcttattgtatatatgcttcattaagggtacgtttgatttctaaaaatattagtcaaatgctacttctgcagcagagatattgtttgtgtatgcgcatagtaatttctccaattccccttctttttgtctgttatgaaaattatttttgacaactaattggtgggctctccttttggagctttgttctatttttctctctccacaaccttttgtgatacatgggctaatccatctcattcacagctaaacctagtgcacagcggaaccattctggagatttgaggacacctactcacatacctgaggctgcggtagtgatatttctatttttcttcttccctatgactttcatttaagtaaacaatggctaatccatccttacatctttttgcttgcatttttagtgtgcatatgatccgtgtgagacaccaaaggaatccgagtccccacgctttaaagccattatgcaggctactagtgcaccgaggaagagactccctgcagatataaaaagtttttcacacgagctgaactccaaaggggtgcgcccatttccttttttgaaacctcggggcatttacaacttaaaggtaatccgagtccaccgtttgtgtgagacaagggtcattcatacgtcaccttgttttttttactctacccattccagtttcttaaatatttgttaataacaatactttctcctgttatctatgcaggaggtaataaaagttatccatgtgagatttgagaaggcaaaggaagaggtaaattcagatttggcagtttttgcaggagacttggttagcgtaatggaaaagtatgcagactctcatcctgagtggaaagatgccctggaggacttgctaatacttgcacgtacctgctgtgtcatgacacctggggaattctggcttcagtgtgaaggtatagtgcaagatttggatgaccatcgtcaggaactctcaatgggtgtgctgaagaaactatacacccggatgctttttatccttacaagatgcacaaggctgctccagttccacaaagaaagtggttttgctgaggatgaagttgttattgatcagcgtgataagattatacaatctgcagataggcagattttaactcaatcaggtgtgggtgacacaacatccagagccagtaaaagtgaggcaagaaaatcatacagtcaggagcagcataatttgaaatggaagcgtagccaggagataaagcctgttaaccttcttccaccacttgatacggatgttaagaaagtggctgattctccaaccaaagaacgaatatcttcctggaaaccttttccatctcctgttacgaaggtcccaaaagaatctactcctactaaattggaatcacctaataagaaaacagatgcacactctacagttagtagccatgttgaattaagcagtccagttgaatctttaccacaacaacagcttcctgtcaagcatcaacataaaacttcatggggccactggtctgaccagccaaatatttctgaagagggttcaataatgtgtcgcatatgtgaagagtatgttccaacacagtatgtagaagaccattcaagggtctgtgcaattgctgacaggtgcgataaaaaaggtgttagtgttgatgaacgcttaatcagagttgcggaaatgctagaaaagatggtagaatcttattcaccgaaagacctgccaaatgctgcagtcagcccagatgttgcaaaagtttcaagttcaagcatcaatgaagaatctgatggtccctctcctaaactctctgattggtctagaagaggatctgctgatatgcttgactatctccaagagactgataacactatttcattggatgacattaaaaatcttccttcaatgacatgtaagactcgttttggaccaaaatctgatcatggaatggccacatcatccgctggaagtatgactcctaggtctccattaactccaagatcaaatcatatagacatgcttttagctggtaaaaatgcaattaatgagagtggtgatcttccg

SEQ ID NO: 195816 - DNA, 292 bp, Zea Mays
atctattgttttgaattctttatattccaactttttagcaaatgtatggtggaaaaaaattgccttacaaccttaacctatgtatggacagttcactcacgcaatttggctaaattttccatggtctttattttattttattttgagaaatgatgtggcataatgatgtgcggtgttttacttgagtggacataaacaccatctaggtatgccttgaatagagaggattataggaaacctggtatcacaaaaggtcattatctagcccaacaatgtcttcatccactagttg

SEQ ID NO: 195817 - DNA, 517 bp, Zea Mays
agaaacacaaacctgaaattgtcagatgaagagccacacgagtagttctctattttgtaaaacaactttgtttgtgtttcagagaggtgtggtgtccagatttgagcgctgagagaggtgtcttccatcttatactctagcatcgcaagatctgggcgggcctgacgcgtagaatgggaagtactcgagcatcagaaggtccaggcagggctgacgcgtagaatgggaagaatgagatggcggggtggtcctgcaaacttgcgatgggatgcgggccgatggtggtcttgtgcgttggatggcgatgaggggattgggttgcgattccttccatggcggcgaggcgggggttgcgtttggggcgcggaggatatgggcggggcatccgcggtgtatgggaagaacgattgggcggggtggtcctgcgcgtcgtcggcgatgggattcctgcgtgctggattgctgcgaggcgtggatagcagcgaggggatgtgttttcttctgtggcagtgacgag

SEQ ID NO: 195818 - DNA, 553 bp, Zea Mays
tatgggcttttgaggagcccgaatgtcagcctttgcatctacctctcgtttcagatatgttgtcctattattgtgctcaagctgctcaggctgtgcttcctgcaatagaaagcctgggtttacatgatgattggagactacagagatatcattttctgggccactgagtgatggaagatgcatctttaaacgttttggaacagatggttgatcctcgaacgcttcagctgacattggatcaacatccattctatcaccttctatcccgttcatgattctctgaggcacattttgttgagcaagttttctagactcaagagttttttgcttagatgcctgttcagttgattggcgcaaaaacttccttacaacgctgcacacaggacattgctcatcgacacaagttttataatggtgagacattgcttttgacttagtgcaactcctgtacgaacaatctttcctttgacaattctgaaaatggttcaaaagctcctgcacctgaacacaaccattgaacttacaacttccaacagggtatgtgcatgttttt

SEQ ID NO: 195819 - DNA, 698 bp, Zea Mays
atcttctgtgaagggtcttgttttggatttatctgatggagttgttaacttgtccgtcaaaccagagctaattgacagtgtcagaattgttggaaaaaagaaggtaatgtttgtacccttggtgtgaagttgttagcatgatcaggcatgcccttggtataggttataacattgtatcatatcataacaactttatctggatctcaatcaccatttttatcggcatctttagtaagcacgatatgcagtttttgaaactatatattcaatctccatgtcatgtattatcataacttcacatcatatctcctgtttcactttagaaacgccaaagggccgtagttgcagacttggagcttcatgaggaagtgaatgcagtcgtggaaataatcaaagacagctatatggtgtgtaaattactctcttcattgaccaatttgtttgtttaattgtaggctgattgcaattaattactctttgttgttgttttgtttaatccaggtcctttccatccctgagtacaattatgcaattgggttttcaccactgatggattataactcacaactgcttccccaccaccactatgataatggacaacggtaatatttggaagtttgcccattttggttccaattattgccttgttacttctctccgactggaaatgtaagaacatcaaagtttgtcaaagtcat

SEQ ID NO: 195820 - DNA, 869 bp, Zea Mays
gggcaacgcgtggcatggttagaggcaacgtggtgacgcatggtgtgggtggaggctacaaggccgcaggtggcacggtcgaaggcgaaggagccatgcatggcacagaagaggtcgctgggaccggtggtaggggaaggggactaggggaggtacttagacgagatcgacatcgagaagagagttgaggtcgagatgtggggaggagccagcaaggggaaaccatcctcatcgaaaacatgtcgagagatgatggtgcaacgagtgagaaggtcggggcaccgtaccccttgtggtcacaggagtacccgaggaaaaaggtagcgtgctgatcggggcgaaagtttgtggggaacgatggcagaggtattaggataggtgcgaatcatgcgatcagtcttgccgttttgaggggaggtgcaaggatatgacatccgcagctacatgtcgtgcaagagaaagaaggcatgagacatggagttatcgaactcctgcccgttgtcacactgaacaccccagatggtgcaaccgaactgagtcaacacccatgcgaagaagtgagataaggtggggaaggtgtcagacttacgacggaggggaagagtccagaggtagtgagagaagtcatccatgatgaccagatagtattggttaccggaaaagctcggtatcaaaggggtgagcattgtgggacatggaagaggtgaagggtaagtgattgtggtgaccaagctgacaagcatggcaaggcgaggtaacgttgccgcggggtggggaatgatcaaggtggacgagagtcgagaaaggacgtcatggctggggtggccaagacggtggttccaagtggaggcagaggcagtggtgacgtg

SEQ ID NO: 195821 - DNA, 468 bp, Zea Mays
caggttctgctagacaagcttagtgatccagatagtaatgtaaaggatgcattcttaaggttattttcaatcaccttgcctatcacaacatatgcgtttggcttgtttgcagatgaacataattatcgtaattcctcagatattgttaacatgtccaaccattgcatgaactggaggcatgtgcttgctgtgaagcaacagcctaggaaactccactggcagcagcttgtttctgttttgagttacctttctctcagattgaagttacctctttcgtcttgggtgcaacggctggtctttagttaccgtgggaagaaagatacgcgttatggtcaaattgatatgtttggagatgctgatgggaatgaactccccaaaggccctggtgtggacagaaatactattgatataatatactcagtaaataatcatgctgctgtttggtggggaatccatgaagctgcccgg

SEQ ID NO: 195822 - DNA, 620 bp, Zea Mays
gttaatggtaatgttatccaggaagtcaaaatcttgggaggaggcagtgggttgctgttcagcaaagggaaaagtggactcatcgaaaacaacgtgatgggaaaggatgacacggttggataggaggtcaagacaccagtaccctttgtgatgcgacgagtagccaagaaaaacacacttagcggaacggggatcaagtttgtggctagtggtggcagataggttgggatagcaagtgcaaccgaacacgcgaaggtgttcataggagggtacagttttgaagagggcgaagtgaggagtagaaaaatgaagggtcttggtgggtagaacgttgagaagaagtgttgccgtgtggagtgcttcaacccagaaggttggtgggatgctggcctgaaagagaagagagcgaatggtgttattggtagtacggatgatgcgctcagctttaccattctgagatgaggtgtaggggcagaacatgcgtaggaggacaccgtgggtgaggaagaatgttcgggagctggagttgtcaaacttgcgcccgttgtcacattgcacaactttaatcgtgacaccaaactgtgttttcacataggcgaaaaactgagtgagagttggga

SEQ ID NO: 195823 - DNA, 1107 bp, Zea Mays
ctccagggaaaaacttaccgttcagttggttggagcactttgtttgattgcttatctatctatgaggagaagttcaaaaaatcaattcaatcttctgcaaacatactgcctgattttcctgagggggatgcacaagcgcttgttgcatatttagctgttcttcagaaggtgtgagatttcttgtacttattcatttgttttgcttgtcttggtcagctttgttcacagtaaactggatttccatctctgacgatgatggttttggaatcactatattttacctttagcattaccctccactttccatgactatctcatcattctgaaggtgtggcacctatcctacgttgtcgatttcatgattttgttcctccatcccttttacacttcaattctgtagttgtgactgcacatcatcagctatgcaagtttctttgaaaaatcagaaaatttaatcagcctttgtctcaccatatcactcttgcttattttatacccattgagaggttcgttactggcttacagctgcatctagattttggaggcttagtagaatttttaatgaatcaatacacttctgatctctcatctgtacgcctgtactggccataaatgagtaccacagccaccactactactaagttgcttgttgtgccagatacactgtgtctaataaagtgttctctccatcatgcataatgattctgttgctactgtgttttctcaaaggaagctgctttgagttgtctacatgattagataaatcattaaattcgtgtacatgctgtaggtggtggaaaatgggaatcttacggaacgcaggaagtggttccctgacattgaacctttattcaagcttctcagctatgaaaatgtgcctccatacttgaaggtataagttttgagtgcatctgtacatcaggcatctttttcttttttttggttgggtggcagttatgttttatcataatatgtgcagggggctttgcgaaattcaataactgcatttataaaagtgtcacccatactaaaggatgcaatttggaattatcttgagcaatatgatcttccggtggttacagctccattaggtcaccatacagcaac

SEQ ID NO: 195824 - DNA, 468 bp, Zea Mays
ctggtggaagttgggccatctattacattagccagttttgctgaagtactagcttttgctgtgagtgcaatcaatccaatgcctgcaaccagagtgttttccatgtttgctggttggtttctctatatcgacctggttgtatccctacttgtcacttgggatttttcaacctactttatcttgtgcagcactggcggtcttcatggatttccttctgcaagtgacagcctttgtagcccttattgtatttgacattaggagggcacaggatggcagaattgattgtgttccttgtgcgagaatcacaccaagtacaggtgctggtgatggtaagtactgaactaggatcttgcatttgctttgctacatgtggagttttcgattctttactaaccgtctccttttcttacttccttgcaaacttaaggtggcgatgggcagaggcttcacttgcttgctagatatatg

SEQ ID NO: 195825 - DNA, 1160 bp, Zea Mays
tatggaatgagattattcagacatttagagaagaggacatcattagtgacaatgaagttgagcttcttgagctaccaccagttgtgtggaaaattcgtgtggtgcggtggccatgcttcctgctaaataatgagctgcttcttgctcttagtcaggcaaaagagctagtagctgatgacaggacacactggtcaaggatacgtaacaatgagtacaggcgttgtgctgtcattgaagcttatgacagcatacgtcacttactgctggagatcattgaggatggaactgttgagcacataattttcagtcagctgttctttgcatttgatgctgcaatggagaatgggaaattttgcgaagaatataaaatagaactgttgcctgaaatccattcatctgtaatcgccttagtggaacttctactgaaagagaagaaggatcagaccaagatagtaaataccttgcagactctttatgtctttgcaattcatgattttccaaagaacaaaaaggatatggaacaactgaggcgagagaggctagcaccatcaacactagaggattcccgtctcctctttgaggatgtcataaaatgcccaggcaatgatgatgttagcttctacaaacaggtgaggcgcctccatacaattctcacctccagggattctatgaacaatgtcccaaagaatcctgaggctcgacggcggataactttcttcagcaactctctattcatgaatatgcctcgcgctccaacagttgagaagatgatggcattcagtgttttaaccccatactacaatgaagatgtgatgtacaacaaggaccaacttcgccgtgagaatgaagatggtgtctcaattttgttttatcttcaaaagatatatgaagatgattggggaaactttttagaacgtatgcagagggatggaatgactgatgacagtgaaatttgggctgggaaatatcaggaactccgactctgggcctcgtatagaggacagaccttagcacggactgttaggggaatgatgtactaccacagagctctcaagatgcttgcttttcttgataccgcctccgaggtagacatcacagagggtactaaacatcttgcatcctttggttcagttaggcatgagaatgatgtgtatcccatg

SEQ ID NO: 195826 - DNA, 349 bp, Zea Mays
cagactagagatgatcatttcagtagcaagcggcgagatttaagcatcaatgactctttgaagagcaattcttctttgcaaggggatagcatttcaaactctgatactggaggattgccgttctccagatcagcagtgaacctggagactggatggaagcctcgaggaattctagtggcacatctccaggaacatcgcttttctgtcaatgacattgccgtgtcgaatgacaataccttttttgtgactgcttctgacgactcgagtgtcaaaatctgggatacaagaaagttggaaaaagacattgctttcagatctaggttaacatatagcgtgggtaatagccgag

SEQ ID NO: 195827 - DNA, 462 bp, Zea Mays
gcacatttagagcacaagttatttactaataagtaataaagcaataacaatatcaagaatggtaactcaaaatccatgaccgctgcatgttgtgaccaggctggagaaacaattgatcatttactcatgtgtatttgctcaacaagtatggtatatcctcttccagaaagtaggctttcaggattgacccctcaactggaaaatttttccttcaatgattggtgggccaaaacaaatgaaatagcagatggtcaagtctagaaaggctaccccaacctttctgccaccgctccccacaagcttgcccctcactccgccagctacgtcttcctcagttactcccctaatcacaaatggtacctatgccttgacctcaccactcatcctctcttgatctcccgtcgcgtcatcttcgtcaagacggatttccccttttcgactccctcccagtgcaccatcgac

SEQ ID NO: 195828 - DNA, 422 bp, Zea Mays
gtgatgagacggtacaatattctactagcacaacctccaaatgtgtctcaagtgcttactgctgcagcaaaacatgtttggctatggaaagaccttgtggctggggaaccaccattggcagagtccccatacataagtagtatagcaaatggcagtgtggatcattcgaatacatcgaacaacatgggttcagattcttcagacgcaccccataacagtactcaagggcagaatagcattccgggtgatcagcaaaaaggtggtaacagcaaggcagataaacaatataaagttaagcaacctcggaaaaaccagtcagacaatgtatctaagccaacaaggaccgatgaagcttcagttgatggagtatctgatagttctaaaggaagcactgctaccgagccaaatcaatcccagtcttc

SEQ ID NO: 195829 - DNA, 808 bp, Zea Mays
gtgacccaccaagtcgaattccttcctgccgcagaccttatattggtaagtgccaaaaaatacttttggtttaacccattgtgtccacattccaaagatcaagattaccaaataattaaccgtttgaattcaaattaacaggtgatgcaagatggtaaaatcgtgcagaaagggaaattcgatgaacttcttcaacaaaacatagggtttgaagctatagtaggtgcacatagccaggctcttgaatctgttataaatgctgagagttccagcagaatacagtcaggcaaccaaaaatcagcagatagtgaggatgagttcgatacagaaaatgaaacggatgatcaacttcagggcataacaaaacaagagtctgcacatgatgtctcacaagacatcagtgacaagggaaggttaacacaagaagaagaacgggaaaaaggaggcattggcaagaaggtttactggacttacctgagggcagttcatggtggagccttagtgccagtaacaatagctgcacaatcattctttcaaatcttccaggtagccagcaactattggatggcatgggcatcacctcctacaactgcaaccactccaaccgttggattaggcctcctcttctctgtatacatagcactatctatgggaagtgccctgtgtgtcttatttcggtccttgcttgtgtcactgattggtctactaacatcagaaaggttcttcaagaacatgctccactgcatcctgcgtgccccaatgtccttctttgattccacacctactggtagaattttgaacagggtta

SEQ ID NO: 195830 - DNA, 381 bp, Zea Mays
tcgccgtgttccagcgcatggtggatggaggcgtgcagcccgcgctcgtcacctacaacgttgtgttccatgcctactccaagatgtctgtcccgtggaaagaggtcgtggcgctcgtggactcaatgaaggaggacggcattgagcgggacaggtatacgtacaacacgctcattagttgttgccgtcgaagggggcttcacagggaggcagcgcaggtgttcgatgagatgaaggctgctggattcgaacctgacaaggtcacattcaattccctgctggatgtatatggtaaggcgcggaagcatgaggaggcaattggggtgctaaagaggatggagaatgccggatgtacacccagcgtggtgacctacaactcgc

SEQ ID NO: 195831 - DNA, 424 bp, Zea Mays
gtcaaggagaactctaacattgcaactatttccttcaagaaaatagcaagcaagaggtccagatatgtcggcagcatggctgcaaaagttggcattctgccaaggaaactctccaagaagcatgaccctttctctgattccctccggtgcatggcgaagcaactccttgaactgaagtacgatggcactaaagatagcgacttatatgactttgaagcaaacagtgtgggatgtgatgtcaagtatcagggaatttctgaccctcctgttgaaattaaggagagtgacgtgcacaaatttctgccagattcatcctatgatgatgtgggttcaagaaaatgcccgcaggaagaaatgaaccatgggcaggagcatgatgctccacctactgacagtccacatgattcagtccctgatgaaggaa

SEQ ID NO: 195832 - DNA, 337 bp, Zea Mays
ataattcttaagctccagcagataaggattagctaaataatagcagggttgttagctagataatagcagggagttgttagctaaataatagcagggagttgttaagcaagtttatctcttatcagttggtgccgaccctggtctataaaggggaagcagtagcgtgtaactaggcatcgaaggaaatacaatctccctgtggggcgattacctcggtcaccctggccgacggtgatcttgctcctgcttcttcctcccactcttctccaccatacgcactcaggtccctgtcccaggctgcgctgctcctctattcgcccttaagcactcctagaag

SEQ ID NO: 195833 - DNA, 407 bp, Zea Mays
tgaatggcagatggatcctacttcaacaaaggaatctagtccctgcttaactagtaacagggacatgggccctggaggtcatcaagataactcatcaataacatcaaatggagaagaagactttaatgaagagcatggtctgccactcggaaggggctcactagattctcccatttcgactgcctcaactatggcccttccagctgctttgaaggattcaaggactaatgaggaagaacctggcccatctactggtaggactgttgaagagcaaaccaccgggtgcttgaatcaagaaaccaattcaatacctatggccagagaaggtgaactgcccagtgagaagccttttcgttgttcttgccaggaaaacattgccagagagtctcgtcaaagtcctgttgcca

SEQ ID NO: 195834 - DNA, 303 bp, Zea Mays
cgcacacttggctatgcttgcgaaggcgttatgtacttggtctggtgtgttttgctatgctgtgctggtccggctgcacccttaggcgacttatgcacggatagtcttcgcggtagagtggggtttttcgcacttgttgtgctagtccggctgcacccttaggcgacttctgcacggatagtcttcgcggtagacttaggtttttcgcacttgttgtgctagtccggctgcacccttgggcgacttctgcacggatagtcttcgcggtagacttcggtttttcgcacttgttgtgctagtccg

SEQ ID NO: 195835 - DNA, 774 bp, Zea Mays
attttctattccgtattgaaggcgtcgatggccttgtccgccctaatcagcaccctcctcgccgccgccatctggtgcgccgcttacctcgccgctgccatctcctccgccttctgattcccactccccactccccaaccctaacctcccccctgtagcacaccccacctccagctttgtaggtcctactatacttgcaacctctcccgccgactcgcttcgatctacccgccctcgcgtcaccatggggtacgcgcagctcgtcatcggccccgctgggagcggcaaggtaagtcccctgacctttcgactcccgtagccttcccccttgcctttgggtgactgctttgctcgcccgctgggggacgggctctgatggtgttccggtgttccctctgctataatgtttcagttccttcttgtttcgtagtgatctggtagggttttgtttcccgtgcgaggcgatttccttctctgtttcgggtggggttaagtttggataaacaaattcccttttagattacaggggacagagggcaatgaactgatttcccaactcaatcccctgctgtacacatgaattaatcttgggttacggcacatgtacccttaagatcacttgcaaaaagatgtttaacttttgaatacttgccgcactggggtctagggtctgattaaggaggaggtagatgatagcttgctctaattggttacttgtggcgtgcttgcagtcaacttattgctccagtttatacgaccattgccagaccgtgg

SEQ ID NO: 195836 - DNA, 598 bp, Zea Mays
ccgacagcagtgatcctccctctcatcctcctgggcaagtttccggagaacgtcatcagtgagttccattggctcctcctcagtaaccaccgcattcaactgaacgggtttcctccttacacacttggccaggtgtccaggctcgaatttctcaccacatgcatagcacagtccattaagcttgcgaaactctctaacttgtctctcacgaaataattctccccccatttgttgtcctcttccatctaccttattaccagccaagttttgcttcgtagcatacccttgtctggcaaccttatgccttcctttctccaacatctcctgctgtaactgggctaatgatgcagcattatctacagtggtaggttgatgcatctgcacagcatgctgaatctccaacttaagcccatgtataaactgtgtcacaaaaaacagttcatccaaccttgtgttatgcacagcagcctgatatctggcctgttcgaactcatgcacatatgaatccagagtatccacctgcttcagatttctcaattttctcagagccttggcatacgcatctgccccaaacttgccctctactgctgtcacaaac

SEQ ID NO: 195837 - DNA, 350 bp, Zea Mays
attgttttttctacatgcagttgaggaaactatggtctgattggcaacctgtgcctcgtatgccactggaggttgctccagatttgaattcttgtttactacatcaggaaatccaagttgtaaattgctgcattgccaggaaaaaaagaagaaaagcagctaaggagtcactggattccttgctaaatcaggcaagtattggtaaatcagaacccaggttgtcagaagcgaagtttcctgacagcgagatgtatgcaagagataatactggtgattatgtccttcgacttggtgctgaccagtcatctgagaacttaacattgctggaaactggtgagcctatctattcc

SEQ ID NO: 195838 - DNA, 327 bp, Zea Mays
cttctggatcccattcccatccccacccctccaatgtcacctcctcgccggataccaccgcagcaaaggacgatcactccgagccggctctggtaactgacccggaaccaaaggaggaacaggagccagacatggagatggaaccggaacaggaagcggaactgcccatgcccgagcagggcggggacaattcggggaaggcccctgcggaggaggatgaggagaagccgccgcagctggaattggaagacgagcccaatgaggttgacggcgaggaagatgatcccgaggcggcgaagaggaaggctccaagtaagaagaggaagc

SEQ ID NO: 195839 - DNA, 362 bp, Zea Mays
gatatgtcgtgggcgcctaggactgcgcagtggtgatcgcagcaaggcttgggactggggaagggatctcagtggatatggggatcgaccagaggtggagctgattctgtcagctggcgcaaggtgcgccaggatgaccaaggaagctccaccggccaggtaaaactttctttgatgagccctaatacaaactacagcagctccttttatagacttaggtgccactttaatctcaaccacctctaacaactaggagctaatctctccactaaaataggagggctaactgactccctctttatctcttcttatcttctaaacaaacagagctaatctctccactaaaataggagggctaaccg

SEQ ID NO: 195840 - DNA, 462 bp, Zea Mays
tggatgacggcacgactccgacgtacgacgacttcaccatcgagtacgtccacattgtgggagctgggggagtaagcaactcttcttcgagcaggtctaccccagcccccaagtctccaccgactctaccgccacgctctccagctccagctacaacaagctcttcgccaccacgcaatccagccacgactccggctacagcgagctcttcgtcaccacatactccagcactgacggtaacctctccaggaacgtcctctctgacgccaactcatgtcgagcacgacccgatggagcttgtgtcctcgctttcccacgacaaggagcgtgtcaacatgtgcttcgatggcgagccgttgcggtatcatacggtggagggacttctcatcgacccgtcggtggcgagcctggcgtctcgcattttggcgggagagttgcatcttgcatgcaatgatggtgagc

SEQ ID NO: 195841 - DNA, 485 bp, Zea Mays
cgatagcactgtccccgtggaactgctcagggtgccgaaaaattcaaggagcttgcactggattggaggcgaggtgttgctgatcaggagaagcaggctgtgaactatgtcttcggacaccagagtacggtctccgtcaaggggcactgtcccgaagtcgacaccggacgcaaccagattggctagaaccgcagccgcagcctcttgcagcctcggtggaaggaggctggtgcggttgatagagagaactcggaagagagggaggaggacgttttcctctataagaaccttggcgctgtctgcgttggcggatacgtgctctagcaccttgaaagcaacctcttttgcttccaagcttcccttctcaacgatgccaccaaacaaggaacccactcttcgcgcaaccaagatcttcaagtcgttagacaagacaatcttttctagagaggatgccatcagcagctgcgtttctggagaacctgatc

SEQ ID NO: 195842 - DNA, 719 bp, Zea Mays
gctcatcatagttgtagcataggccctggcgtcgatgttcgaccatctcgtctacggtgcgatgcttgtacacctggcccagcgtaggagctaaagtggtcgaggaaggaggggtaccggtcacgccaagtgtgtctgagggatggggcagtgctcgtgggccacgactgcccctcgttgtcacgccatcaagggtgagcgtgtgccgcttgtaggcccaaaccagtgccatggaagacttgtgaccaatagttgtacctaaaggtgtggagccagcgggtcggtgttgcagaggagcatcaggaatcgctcctggtaatcgatcaccgtggagcaaaatggcagacccgttagttcagcctgcaggttgtgtcgggctggcggtccgaagcactactggcatagaagcttgaagcatggccactagatgccagactcatcacattccaacatgcagaaccaatgttgcgcgataccggtgaggtggaacgaggtgagccagactttatccgacttgagtgtgcgctggccacggaagaagtgcttgcatcggttgagccaaccaagggggtcctacttgccatcaaaggtcaggaaggaaagcttatggaagtgagagtggatagctatgggtgcggtggggtggagttcggcaattggcatgatgggtgtggtgcagtgtgattccgcaatggttgggatcgaggaaggtgtggaag

SEQ ID NO: 195843 - DNA, 556 bp, Zea Mays
acggcgtactgccgctgggagaggaacaacccaccgttgtcccgtgtcaccgagatgccgaggaagtggtgaagatccccgaggtctgtcatggcaaattccgacgataggcgggaggtgacgtgccggagaagagccggcgatgatgcagtgatgatgatgtcgtcgacgtagaggaggaggtaggccatggcgtctccattcttgtagatgaacagggaggcatccgttttggaggtggtgaagccaatactgcgaatgaagctggagaagcgctgattccaagcgcgcggtgcctgcttaagcccatacagggacttctgcaacagacagacagagttaggtgcagcggggtcgacgaatcctttcggctactcgcagtagacagtctcctcgaggttgccgtggaggaaggcattcttcacgtcgagctgccggatgggccagtctcgggacgcagcaatgctgaggacggtgcggatcgtggccggcttgacgaccgggctgaatgtttcgtcgtagtcgacgccttcctcctgggagaagccacgaacga

SEQ ID NO: 195844 - DNA, 446 bp, Zea Mays
caccgacggcggcaccatggccgggaggttccccaagccccgattcccgaccgaatccgatccaaacgcggaaacataaagcgaatcacgtccaggcttcgtcgagggttactcacagtgattcaaatcgctacgaactccacacacggcgcgcgatggatcttgtgcccggtgatgaaattctggccgccccaacggtcattccctccttctccggccacgagcgccccccaagcaacgtattgaagcccccagaccccctgtggaaccccgactgcaagctgaggccgagggcgacgttggtggtactctctgctcacagttctcccctcgatttggcgttggctctcggttccagcgatggcggcgaactggattttttttcctcactgcgttaatggcggaagcgcagggtcttcatttatctactggcgccgcgtctgtta

SEQ ID NO: 195845 - DNA, 403 bp, Zea Mays
atatattagtgccattccccatccttcaactgtaggagttcctcacttcgattgcctcgaatttgccttatttgacggcaaggaagacccccctccagtggctcaatcgatgtgaacaattctttgaaggtcagcgcacgttggaggaggagaaagtctggcttgcatcttatcacatgacagggattgctcggacatggtacacccaacttcagcgcgacaaaccttccttgtcgtggggaatcatcaagctgcattgccaactccgctttgggccgccactacgcaacaatcctctcagcgaactggcacgccttcccttccgcacgtcagtgggtgactaccaggagaggttttgggacctgctagcctaaacaactcctttgtctcaggagcagaaggt

SEQ ID NO: 195846 - DNA, 631 bp, Zea Mays
aggatgacgcggttggccgactcggactgcccatcagactgaggatgaaatgctgttgtcatccgcagcttagtgcccatcaagcgcatgagttcttgccagaaaatggatgtgaaaaccgtgtcacgatcggagaccatggattggggaacaccgtgaagacgaacgatgtcgttgaagaaggcctgggcaactgattcagctgaataagggtgtgccagtggaatgaaatgacaatatttgctgaaccggtccaccacagtgagaatcactgacttgccacggacacggggaagagcctccacaaaatcaagcgcaatatccgtccacactccattgggcaccgggagcggtaggaggagccctgctgggtgcacatgctccgacttgtaacgttgacagacactgcattgacgtactttttcttgcaccaattgcttcatttgaggaaaatgaaaatcacgtcggagccggtggagggtacgttggacaccctcgtgaccatcctcatggactgcccccaggatctcctgtaatagcggggaggtaggaggaatgtacaggcgccccgcgaattgcaccatgccgtcgacgatggaccagggtgctgctcggtcccctgaagtgatcg

SEQ ID NO: 195847 - DNA, 978 bp, Zea Mays
agtctaattcaatgacatatttttcagttattttttttgcatgttccaatataagacagtaaactgtcacggtcgtcccttacatgttgaagctcaattttaagactttcaacttttttaataaatcgacgtttcgtttcacagcttcattttgaaaagactaaaaggacaataacataattaagacattataatattctaattaaacaataccaaataaggattgcatttttcattatctgtcatctatcatttaacgtatagagttgaaatagagaatgagtatacgacagaaattaacatgcccagttcaactcgtccctagatgttgtgcttcagttagaacattataccgttgcctgcgtatcttctgttaccatcctcgtggatgtgtcgattcaaactcggaagaatgcataaataccattttttggaaggagaaaaaaagacaaataacatctcacgactcacgtgatcctctgcgtgacctcatgtgaactgggcatgttaatttcttacatatgctcattctccggttcaactttagacgctggatgatagatgtttgttaatgaacaatgcaatttttatttggtgctgtttaattaaaatcctgatgtattaattatgctgctgtccttctagtcattgcaaaataaagctgcgaaacaaaacattgatttattgaacaaagttgaaagtcttataattgagtttaaacatgtaagagacgactatgacagtttactgtcttatattgcaacatgcaacgaaatgactgaaaaatgtcatttaattagacagcgtgattaaaaaagtctctaatatttagttatgactatatgtctatataatttaatcgttatttagataaatgaaactgactaacacgtttacaatgacataagaaacatgttagtcttacagaaaatgataaggacattgtaaactaaacttacaactgtggaaaaattaaag

SEQ ID NO: 195848 - DNA, 332 bp, Zea Mays
cagccaaacacaactcttagataaagaataaagtggaattaaaaggttgcccaactaaataacatactttattaatactataattaaaccaagctatagggaacacctacatttttgttacagtcattacaaaggtccaactccatcacatgttcaccataacatagcataaaacaaaggataagcgaactatcctgactatctaagactacctaagtctattacgcttgacttaagacttattacaaccttcgacgctagcggtctactgatccaaatctagtttggttctacagtcaggcttgccataagcatggtaccctcgtggcggt

SEQ ID NO: 195849 - DNA, 394 bp, Zea Mays
taaaatatggtgttctaagtgacttgtgtgttgtcttgtttaagttgaagaaaaggttaagaaacgttaattaacctgctcccacccatgttttgagttgcaatgtctaaatgggttgctaagtcttatgctgtgattagccaactaatgttgagtgggagtcaaattcgttaagtgattgttatatatgtgttgtctcggattgtgataataagaggcaagccgacgtgtatgtcgtatggcggtctgtgccatccctttggttaatcgactagttagatggcgttggttaagctcgtagttacgatgaattacttgttgtggtctaaatgcgtatggttatggtggcaggtaacaattagtagtgctcatgtggtgcctaagttaaaatgcg

SEQ ID NO: 195850 - DNA, 800 bp, Zea Mays
cgtataactattatgttgacggatccctttctaacaatccttctggtcagaagcagttcatgtataaatttctttctttcttatagtaatcattattttaactattaagttaattatagcaaccttacttattcttttgcaatcttgttctgcgtagaaattatcttggaacatcaattgatgcaagtggaagaatcaacaggtaataaacattttaaatgtagacccctttgaataatcggcatgtgttctttgctaatcttttgggtgaaaatcaattctttttttgtattgtagtatatacagttctaaaatttgaatagtattcactaggccagtacatggtttggtccaataccgatcaacctgccagccctagctagactggatcgatataagcgatttgagtgggttagccggtttcaagttttgaacccatatgtataggagagccttggcttcagaacagaaaaccagcaccacccatcccagtctatgcttgaggtcttggtggtcatgcccgtaatttgcggcgaggttgttgtagttggagatggcagtgtgtgattgaggagcatgacattgggggtttagtggccgggaaaacgctcggggcggcggtggtggtgacgacatcagcagaacctaagatgaagatgcatggctcgctcggtcgctctcgccctctccctcactcccgcacccaccgatgtcgttcgctgctgctccgcctgccaccatgcgtctaccctggtcatggcgtcgtcgtgggtttagtctccctcatccctggatcttag

SEQ ID NO: 195851 - DNA, 439 bp, Zea Mays
caacatttgaaaccttgcctctcagcatcaaatcagcttgactcaacatgtccttctcagatattcgcttgttggtaattcgagtggggtcattaacaccagtctacaggtaagcagggtagactctatccttcaaaggctgaatattcttgaaaacaaagtcgacaaccacaacttcaatggtcaagcctctgtccttcaacacacatatctctgcaagtagcaccctagactcagcaagctctgaatctgtagggatctctgtccagctaggcgttcggacgtcggctgtctccctgatcgagcgggaagtgacttcttatgattttccatagtaaaccactcaaagcgtcatcccttaatactgtctttcaagggaatgtcgagatactcagctttcctgcctcgacaaagttccaagctagcacctccaacaagc

SEQ ID NO: 195852 - DNA, 485 bp, Zea Mays
aacgacggttctccgcgccctgatgtgaaggctgcagctctccttaaaggtcgttaccgcgttggttgcgtgtaccgaaggcgaccgcgcttggtgcctaagggccaagtcgatccggtcccaggggctgctgctggcgacaacaaccttgctgtctgggatggcagcaggatgaacttcgcagacaacgtaagtctcatcccagtgcagcgagcattcacaactatcctcgattcccttccaacatgccctgctatgcagctactgcctttggtgcagtctgaggaggaccatgtgctgttaggctctccctgcagcacggttgctgcgggctacaacgccgaagctgtgacggactccaatgtcgacgcttcctctcggatgatagctgctgtgcatgaaccttcaacagatgttgcagcggtgtcaaccaccgcgcaaagccatctactcaacaccatattcaccaagccctcgcctgccat

SEQ ID NO: 195853 - DNA, 820 bp, Zea Mays
tatagataatagagagaacaagacttacaaaaaaagagaaaaacaaaaaccccacggacacacacaacacactacaacccccacggacacacacaacgcactacaaccatcagagactacccaggtgccaagagggtgtcagctaaagcaagactacctagctgcttatctccagccatcatccaacaagagagctcatcaaggaagtttctcagcactgagctgatagagggggatatcttatcaaaaaccactctattccgctgcaaccagagacaccaggcgccaagcatgatgacactgttgacacccttcttcttgtctttatggaccttagagcatacctcatcccaccaattagcaaaggaggaatcatccgaacccagaatgagatgccctaacccgaagagaggcaagatgctgagccaaaactggcgagcaaagacacacggagtcaagagatgctgaattgtctcatcttcctgatcacacagagagcatgtttcagggtgcggcagaccattcttgtgcagcctatccacagtccaacatttgtccctcatggccaaccaaagaaacatcttgcattttggaaggccccacgatttccataatctcttccatggctcaaacgtgatggagcccataaataagatcttgtagtaggaagcaggagagaaacagccagaggcctcatgcctccattcgtgtttatcctcatcatcattcagggctgcctcctccaaaaaatctcacaaaactagatataagcatgctgattaaggaaatctgttaacaaatgctatatattttactctgt

SEQ ID NO: 195854 - DNA, 546 bp, Zea Mays
cactggtggacgatcttcattccattggttgcaaagcagtctggatgcttgatccaggcatcaagaaggagaagggtttcttcgtttttgatagtggctcaaaaaatgatgtttgggttcaaaaggcagatggcagcccgttcgttggtatgtatcactgacttaaataagattcatcgtcaattttcttaaatgttaggaggatatgtctcatacagtttacattcaggggaggtgtggcctggtgattgtgttttccctgattttacatctgaaaaggcacgagcttggtgggctagtttggtaaaggacttcatctccaatggtgttgatggaatatggaatgatatgaatgaacctgctgtttctaaagtacgcgatctatcatgacacatataattaatattgcattgttcaattttttctacgtaactgaatgtgttggtctaaacttgtagactgtcacaaagacaatgcctgaaagcaatatccataggggagatgctgatattggtggtgttcaaaatcattcatactatcacaatg

SEQ ID NO: 195855 - DNA, 695 bp, Zea Mays
ctatggcaatacggtgtttgcgcactctgcgcttatctcagcttatgccaggagtgggcttgcaactgaggccatgggggtgcttgagtcgatgaaaggtgcaggattgcggcctaccacggtatcatacaatgcagtgattgatgcatgtggaaaagggggtgttgaccttaggttcacacttggatatttccgtcagatgctgcaggatgggctctgtccggaccgtaaaacatttaactcacttcttgctgcatgtagccgggctgggcatttggaagatgctcgcactgtctttgatgaaatgatccatcttggtagtgggcgtgacatttacacttacaacacattcgtcgatgctatttgcaagtgtggcaacatggggctggctctgcaagttgtattggatatggaagcaaacaatgccaagccaaatgtcgttacatatagtacgcttatggatggattctccaaactggagaaatatgatgaggcactcaagttgcgtgaaaagatgaagtctttgagaatacaactggaccgagtttgctacaacaccttactggccatatatgtgaagacagggaaatatgatgaaattgctactgtatgtgaagaaatggagaaattgggcattgagaaggacactgttacttacaattccttgattaatggatatggaaagcaaggacgct

SEQ ID NO: 195856 - DNA, 389 bp, Zea Mays
cgacctgaactgcccatctggcagagaccgagctaggaaagtcatttcaaaaaattcagaaaatgatgaaaactcccctttccacaaacatcaagtcaagaagtcagctccgcagagatcaatcgatggtctctcattccaggaaaagcacattaagaagccaattgatggaaatggagaagatccaggtttttcatcctgcaaaagacgcatcgaggatcccttttgcacaaatgttgaagatgcaagcttctcatctacgaaaaggctgtctgagaagcccatgtctgagaagcccatcagtataaacaaagaagaggaccttgaccattgccaccaggaatcatctaagaaacctagttgcagagttgagcaagatgatcatggtt

SEQ ID NO: 195857 - DNA, 318 bp, Zea Mays
ggtgaactcccaactgatgctggtgttatcccaagggctgtaaggcaaatctttgacattctcgagtctcagtgcgcagagtatagcatgaaagtcacctttcttgagctttacaatgaagaaatcactgatctgttggcacctgaagaaccaaaattccctgttcttgaagacaagacgaaaaaacctattgcccttatggaagatggaaagggatttgtttttgtgagaggtcttgaagaagaagttgtgtactcagctggcgaaatctacaagattcttgacaagggttctgcaaagaggcgtactgcagaaaca

SEQ ID NO: 195858 - DNA, 899 bp, Zea Mays
caggtctcatggaaatgtcccagcgctgcgaacctagtcccttccagagaatacgttgtcctctcctccagaatgccatacatagatcttcaagatcccaaagaatgggccccaaagtgcgcaaaaatgtgatacccaatataatgtcaaaggaatctagaggaatggcatatgcgtccatcaagaactcttcaccgggaatggacataccaataatgtcggcagtgaatcttgtcgccatttgctactgtggcctggaaaccttggttggaactgtaggctagccgtagcccatctgcagttttgaggctgacaaaattgtgggtagagcccgtgtcaagaagagctgtgagggcgtatccccgaatatcgacttgcagttgcatggtgccctctgagctgatgcctgttaaggcgtggagtgaaatgatgggtgctggatcctctggattggattcatcctcgattcctgtatcctcttcaaaatctgtgacctccagatagaatagacgcgggcaccgatgaccacgaacgtattgttcgtcacagttgtaacacagtccccgtttgcggcgctcagccatctcgccgggggtgagcttcttaaatggacgttgtgcccccatgctggttggtgctgctactgttacagtggactgttgtgctggaataggaaatgacggccgctggggaggcctcgacggcttgctggtagttgatgtctggtggacgtcgagtgcctgagcccttcgttcacatgctcttgccaaacttaatgcatgattgagatcccgaggagccataagttcgacatcgatcttgatacgctctggaagacctgtcgtgaagagttgtaccttctgttccagagtgagtggcgtggtgtgggccagtaaatc

SEQ ID NO: 195859 - DNA, 613 bp, Zea Mays
gctcgccgacggctcctggctcagctggactggcgacgacgcgctggagctgctcgagttcttcgccatcgccgtcaccatcgtggtcgtggccgtccccgagggcctgccgctggccgtgacgctcagcctcgcgttcgccatgaagaagatgatgaacgacagagcgctcgtgcgccacctggcggcctgcgagaccatgggctccgccaccaccatctgcagcgacaagaccggcacgctgaccaccaaccacatgaccgtcgtcaaggcctgcatctgcggcaaggtgagggacgtgaacagctccgtggagaccaagacgctgccctccgacctgccggcgtccgtcgtggccatgctcctgcagtccgccttcaacaacaccggcggcgacatcgtgctcgaccaggacgggaggcgcgagatcctgggcacgccgaccgaggcagccatcctggagttcgggctgtccctgggcggcgacttcgcggcggtgcgcaaggccagcacgctcctcaaggtggagcccttcaactcggccaggaagaggatgggggtggtcatccagctccccggcggcgcgctgcgggcgcactgcaagggcgcgtcg

SEQ ID NO: 195860 - DNA, 630 bp, Zea Mays
ttgaaatcttcggaacgtttctttgggtgttaaatatgaacttaagttgttctaatattatttaaatacataaaaaattagtatttgcgaaaacagtaaaatttcgaaaactcgataatatacatatatcttcctctcgtcgagcttattccagatctggtgttctttttcgcgagatcaccgaactgattctcctcgcgaacgacatgtcactcgcatctgctatccccgtctaccactttgtctaccctgtctatcctcttgtctcgcctcttcgtataacgttcctcatgctgtgcttgcaaccgcctgttccccatcacttgtttttcttgctatcatcccaggccagcatgtcagtttcatcttctcagaccatcgcactggtcccatctatcattatcttcatcttttttttatcacgcaggctcatatgttgcgatggtttttctttgtcttcgtttgatttccaaacttccctcggctccgctggctgggttcgaacccaccgcaaaatctgcaaccacctcagccccacttttctcctcacgccaacaccgcggttgcccattcgcccacgaaaaagggtcacgttctatgcagtttcgcgtagcacacacgactctccct

SEQ ID NO: 195861 - DNA, 410 bp, Zea Mays
cgacgcgggtagccgaaggctgctcaaaggggaaggctgcggttacaacagcgaggaaaatgaaaaaggttgaagttaaggcgaggggtgtgacgaaggcatccggggctccaggtgccttgaagggttttgttgaggaattagcggagacgtgcactgagcctagggaggtgatgacttcacccgacctccaaaaaacatcttaatgaatgctggaggtgaccggtggtgagtagcataaaaaagatctcattcctgtggcttccagcaaagattattttatttcctgtttgattcgagattttaaaatttttccttgcgggagaaacattggtgatgttgtaacaacagtgatggaaaaggaccgtcagaagtccgtgcagaaaaaatggaaggcgttgctaccgttg

SEQ ID NO: 195862 - DNA, 528 bp, Zea Mays
tactgagacatttgtcaagccaatatcccttgtaagttatttctattacattgggctgttgttaatatcaaattggtcaataactcattctcggattcttggtcagcaaatgttttttttctttgtttgcaaataggatggcctaccagagtatgagaagccttttagcaatgatcctgcgaaacaagttagatttgagcaatttcttagagataaatacaagggaggtcttcgtgctgcaaatgttacacctacaagtactatgtcagaaggtgatcgtgctcgggaaaggcttgattttgaggctgctgcagaggcaattgaaaagggcaagggaaaaaaagttattgatcctttgtcagtgttctctttgcctggaatgaatgagcaacgctttgtagcggcaacccaaccagaggtagatgaagtcacttcttaagattatgttatcttcttccaaatgttgtcttcttccaaaagttgactcttggaaaatttatatagagctctgtagtgatacaagatgag

SEQ ID NO: 195863 - DNA, 338 bp, Zea Mays
caacagttatcaccaacttctgtatcttccgacgatgtcgttgctctgacagctttggaggagattacaacggtagagcagaaatatgatcagcaaggcaggcctctgttctctcctttatgtgtgctggaattctcggcggagatggcgcgtgaggacacagctttgcggaaggcactgtttgtcacaatagttggtactaggccagaggtcctaggggctgagatcatcaatgaagttgctcgaagttttaccgtcgatgtgggtgcaatgtccattcaccaggcaatgcccgaggatttcattctgttcttgccggatgaacgaacagcttcaag

SEQ ID NO: 195864 - DNA, 520 bp, Zea Mays
tacaactccaatgttgtgttgatatatcaaaatattctctccttgaacagaccaatcgtcgtgccttggcaactaacgagtggttaagggttcgcgagtgtgaaggcgtctatgcaattggcgactgtgctacagtgagtcaaagaaaaataatggtatgtgcagagcctctaatccctatttacagatgaagcctactgttcttgctttccaacctgacagcttatgctgatattctgtaaatcgtgaatgcatacatcaataggttttgttgctggataacttcatatgtacgagatctaccattctgtagctcatatgtttttttttccaacatcaaacccctctgacttatctgtttcttgattccaggacgatatttcaacagtattcaagatggcagacaaggacaattccggcaccttaacactaaaagagatcaatggtgttttagatgatatatgtataagatacccgcaagtagagctgtatatgaaaagcatgcacatgcttgacattg

SEQ ID NO: 195865 - DNA, 1043 bp, Zea Mays
acttagatcatgatgaatacaaagcttctaagaaaattaggaaagaagagcgacaccattttgatgtagatcggatccttggatctgatttagctagcggagatgttcctgatgaggccaaggctttgcctgcgaagtcagcaacctcaaagggttcaggtgaaaggactgacctttcttcatcaaagcaaaaaagtgcctcacggcataatcgtttggaaacttccaagaaagcaagacaagatgatttagttggtcctgaagacgagagcaagggatattttcaccagtcagatgtacaaagatcagatttgtctagtaagaagaggatagtgaaggaatgggaggagagccagcacaattcagtagctcatgtaagcaaaggagctgtcaaagaaacctatagggaccagaacttaaaggaagcaaagttgaaatcattgaattctgaagagctgttttctatgacgagcaccaaaccaccaaaagttcaacatgctgatcaggttttgtcttatgatggggggcgtatgaacagtgagttagttgaggataacacactctttagtggcaaaagaggtctgcctgaacaagaaaagagcctttctgatcaggctttggacttgggtgaacctgctagtgatgtggcctatattcagacttcagctgtaacttcaagttcttcaaaggcttcggtctcacaaaaaaagaagcagaccactcaagctatgaagacttcaccaattgagcctctttcttcatcaccacggaggaactccaacattgacaaggtctctgtccctcatagtagaatttcaggtaaggatggatctctgaatgctaactcagccactgtgccaatcatggcaaaacaactaaatactgaagttcgcgtagcaagcaatgatcaacggtctagtgaacctgtttcggttggttctccccgaagaaaatctgatagggataatggactggttcagttaactcaaggtcatgcctctgatggttttcatcttgaaaggggtttcaatgaggacctgcag

SEQ ID NO: 195866 - DNA, 1447 bp, Zea Mays
tgcacttaaacgaaccttgaaaagctggcttccagtatgggcatctactgcactgaaaggatcatcaaagaggtaaatatctgcatcttcatacactgaccttgcaatctgaattcgctgtttctgtccaccactcatgttaattcctctttcaccaatctcagtcaaatcaccatttgcaaacaactcaaaatcttttgtcaatgcacatgcttgtatgatgttttcatatttttccttgtcatgtgtgtttccaaacagaatgttttcccttatgttcccagacaggatccaggcagtttgaggaacatatgctttgcggccactgaccctgacagtcccatctagctttggcatctccccgagtatgcatgataatagactggatttgccagaaccaacgattccacagatagccactttcatccctctctttacctttaactctacatctgttagagttggagaagtcgtctcaagttcccagctgaatattccatgatcaatctccacatcatagtctgtgtcatttcttggtacttgtgtaaccgcatcacatttcaattcttcttcctcaaggtattttgccactctgtcagctgaaacttttccctgagcaaacactgaaagtaagtcaggaagtgtgaaaattggatcttgtagcatgcggaatgtcgcaagagctgacaaaacagttccagctgtcagaggaatccccataagtatacatgagccaaatgttatggaggaaatgaatgcaggtgacccccaaaatatgaacgttgttagagccgacaacctcaccgatctccatagccagttgtactcctcgcctcgtaaactttctagcttctgaaggtacttcatatcccacgcttgaagtttcagtattttcatgcttctaagaacttccgttgttgccttcattctgttgtctttggcaaccatgattttggcttgcaacctcttttgcattctggttagtggaatattgcaagccattattgctaatgtcgctgctaaaccagcccaggccccgacccctaagtttgtatggagcacataaacagctagagaaagttgaatgggtagcatccagatatagtttgtataccatataacatcagttatcctttgtatatccacactcatgtagtttatgatctctccactagtatgcttctgccttgaactgcaggataagcgaaggcccttttgatagatgtgggatatcaaagcagctcgcagccgcatcccaagctgtcgagctccaaaaatccactgcctctgtgctatggtctccacaactttggcacttagaaaaacaacagcgagaatataacctcttttgagtccatattgcctctctcctccaaggaatttcaccaaatcattaatcagtgagggtccgacataggatgcgctggcacttaaaattgcaaatcct

SEQ ID NO: 195867 - DNA, 378 bp, Zea Mays
gcgggagatacatgagctcagcagaaccttctgcgcaacagcagtagtcatcgtaccctacaacatgaccgccaggaccctcatacccattagcgtagacgcaccaaccctccgcgtcatcatacccaccggctaacaacaaggacgacggcggccaatacccgaacgacgacgacgacgcgcatgcgccttcgtagtcgtagccatcggtgccgtccgacgacagcgcatcctcgatcctgtccatgctcacaccgccatcgtcgtcggcgaccatcgctaccgcctcaccgccgccgatctctgcctcgagggaccggatgacatggctcagccggcgatcgccatccccatcgccatctagaagaagcaagtcgg

SEQ ID NO: 195868 - DNA, 626 bp, Zea Mays
gtggcgacttcaatcttatatatagagcggaagacaaaaataatagtaatctggaccgtgccatgatgggtcgatttcgtcgcctcttaaacgaccttgaacttaaagagctagagttgcttggtagaagatacacttggtccaatgaaagggcttcacctactctggttaggctggacaggttgttctacaccactgattgggagatctacttccctaactgtatcctccagagttcggccaccatgttctcagatcattgccctcttctcctcggcctacatgagtttactcaaggtaaaagaagatttcacttcgaaagtttctggacaaagttggatggatttgatgacgaagtacaacgttcatggtctcaacatttggaggggtcctgccctctaaatctgctagcagataaattggctaggctcgctcgggagttgcagtcgtggggacagaagaaggtcgggaatgtcagacagcagctgttattcgctcgggaaattatctttcagctggaaaaagcccaagatcttagatgcctcactcctcatgaaagttggttgcggcagaagctcaagcacctgtctttagggcttgcgtctctggaaagaacgatagccaga

SEQ ID NO: 195869 - DNA, 494 bp, Zea Mays
ggtggctttcatatatatgtagtcatgtacaacttggaatacaatatgtgttagactatacatacctctaatacctgcccacagtcacaactgtagggaactgaatgagactggacctgaagacattgaactactgtgtaagcagtctcttagtcataatgtacgtgaactgattagttgaggccacatggagtaccctaaagccaccttctcacgaacaaagtggatgtcaattgtcaatgtctatatgcttcgtacgacgatggtgaaccgaattggcagtcatatagactgtggtgacattgtcacaatagacaatggtcgccaaaccgagtgatagtctgaaattgaccatcgactatgttaaagctatcgtgagggaggctacacttgaggcttcgtcgggcaaacgggagcccttgcccccatcggttgcggcaagtccagagcagcaaccttcttcagcgatggaggcggaaaagaacgccgctgag

SEQ ID NO: 195870 - DNA, 1044 bp, Zea Mays
gttttacaagttttcagtcaattttgatcaagctcaggggaagtaccaatttgggagtgctagctgctgctgcagcagcagctgcgggttccttggtggcagatgggttgctccaactctaaagtggacaatgaggagcctgtgaggcgctccaaggacaggaggcagctcatgaagcagctggtgcgccgccgccctgagcttgcagctgtgcacattgcgtacctgcacgccctccgtaacacaggagccactctccggcaatttgtggagctggagtctgcattgtcacagcagcctcccgtagaccttgtggtgccgccctcgcctactccacagcctcctcctcctcctcctcctgaactctcggtgacatcctcattgccaccctcgccatgccccccgccgcctgtcccttttagtccagtaacaaccataagaaagatggagaagagggatggtgagctcccaccaccaccaccacctctggttttgagtccgataagattaaggaagatggaggatgagttccatgggggtgattttactgatgatgacgacactgacagctgctcgactcctctaccaccacccctgccacccggcatagattgggaggacttggatccctacaatgtgtgccccttgagtttcccatctccatttgctgataggaatgataaagaagtggcctcgcatgtgaccatggacaatgatcctgaagtagacacagaattttatggagaggaggatgaaagcatgcttggcaataatgatgtcattgtggatagggtccatgtgaatccagccaagggtagggctctgggtgatggcaactcttcaacggtgagctgggtgacaaaggattcagactctatggcggtgccttggaggagtaagaagtcgcttgtagagattgttaaggagattgatgagtacttcttgaaagcagcagcaagtgggaatgacgttgtgatttttttggactctgctggtggacggcctgatgccttagaggtagaggcaaagaaaggtaatacgtgc

SEQ ID NO: 195871 - DNA, 4056 bp, Zea Mays
tgattggaagttcttgatcgagtccgctgtcgctcatgttgacttcagcgggaacctgctcaccagtaccacgcccaaagagctcaagtttctggccgacatttcagagacggttctgtatctcaacctgagcaacaataagctgactgggtcattgatagacggtgtcgagctctctactttcgggaggctcaaggtgcttgatctcagcaataatcagctatctggtgacctcccagggttcaattatgtttacgatcttgaagttttgcgactcgcaaacaatgcattcactggatttgtgcctagtgggcttctcaagggtgattctctggtcctaagcgagctggacctaagcgctaataacctgacaggtactaactctacttaacagtcctttcagctatcgtcctttttgctgaatgccatacatcatgaacacatggccgagatttgatgaatgggctgatatgcatttctgtgtttagtggagttggggtagctgatggaatcagataaaacaatgtggacaccatacaaatgtcatgttcagttaaactgccatatgaatttctattgtggtgcaatgtgcctcccccattgtatttacattacagtacctaactacattacaagcttcttggaagcgataccctttcctggctacagagttaagaaccaggctatcttgtcatgtggttggccttcagcagcattagactgttagtcaatgcgatttgtgaaaaaaaccatagaacataaaattctcatttagcaatttgtgtattattgctatatttatctgatgcaaatgatgatttgaactgttaattacctagaaaatgaactcaataatgtccttgagtctgcaccatttagtttttcctgttcttttcctgtaaggtaacttctatgtacagttttcattcagcataagagattgattgtgcaaatccatgctcatagtgttgcctactgtggcattgtgcctaaaaacttagttagctttgttcagtgcaactaacaaattggtccttgtaagttgtaacaatttggtgataacaagcttgatatagtagttacacatgcagagaggtagattgattagatgcattagcatgattgtttaatagatatatgacaggaaataacacaacagccagcacaaataataagttctgataattgatgattaatggtgtgcttttctgtgttgagcactagacgtggggcatatatcctggtggcaatctcatcgaggaaagcagataatgctgtggacacaccatacaaatgttacgttcagctaaactgaactaacattttctgtttcgttacaaatgagtggaagtaacatgtggatatgtgacttgctttatttaccctcttacatagagttgcagtgcagtgtatcttcaccgttctagttataataccttacactgctctatgcttctcaacattagtaccttgtcctggtccctggactcctggcctacaaagtaaatagctagggcatcttgacatgtggttggctttaaatattgtgggctcttttctaataagagcaagtaacaggactagcaggtttacctgtataagctatgattgaattgaactgttgcatttcatgctgattatctttggtcacattgtttcctactatggaattgcctaaaacttcgtttacccccccacccccaccacccacccacacacaatgaaactaatgaaccagttcttgtttacaaagttagtgatagcgaccacacagtcggtttgttatatgcactagaatgatttgaatcacaaagtcggttggttatatgcactagaatgatttgttgacacacatttctgcgtttaaatggtaagtactggggttgggatatatgtcctgatggaaagattcttgttgatgaaatcagatatagcaatgggcaaataatacaaatctcatgttcaactaaactgcactatgaatttctcatttttagtccattgtgaatggaatggaagtaacatgtgcatcttttctgttaagtgaatggaagtaacatgttcagctaaactcactacactccagtcttttcaaatttagtattttgtcattgcctactaagtaaagaactagccatccttccaattggttggctagagttagtccatacaacttgtgacaaaaaatcaaacatgaattctcatctagcactatgtatcattgtatacaaatgatgatttgaactgctggttacccaagaatatgcactgaattgtatgtgcatgtgcttaagtctgcaccagttagcttattctgttttcctcttaggtaagctctatatagagctttcattcagcatagaagattctttatgcaaatgtgtgctcataatgttccctactgtgccagtgcctaaaacttattaaatttgtccagtgccattaatgggtttattcttgttcaaaaaatgcttataacagacttgatatggtagttatacatgcagcgaggcagactggttaattactagcttgagttagcatttataaagggaaggaggtaaagcaacataaataaaaaagttctattaagtggaaacgagtaccggatttgtggccttgtatcctgacggcaagattcctcaattgtagaagcacataatgcagcaggtgcaatatactaatgtccagggccgggccagagaaatttgaggccctgtgccaaatctaaagcatgtgtaatatatgtttttattaaaaaccagtaataacaatctgtaatttacagtaatatatattgcaatagaatatcaaaagaaacatttctattttatttgaataacatcgttcttttggtgggttttaaagaaaatttgtacaatatgcttatattctatcttctccaaagcttcactctcgagtgctattgtggctaaataatacgtcttttttatcatagtagaacacaaatatgaatttagtagctttaatttagagaacttcattcacgcggatagatatgttaagattctatgaagatttattctttagtggagcgctcggtattttcacttcagcgcagcggtatggtagggagaaaaatatgtgctatatattaacatgtgtagaagatcataaaactagaatatatacatctactaagttttgaggccctcaatttttggaggccctgtgcgagcgcacggctcgcacatgccttgggcccggccctgctaatgtcatgtcgactgtcgggttaaactgcaccatgagtttctgttttgttacaaaagcatggaagtaatatgtaaatatgtgacatgtaattgttttatttaccattttatctactaataaattagagttgcagtgcaatgcacctccaccattctagttatagtaccttacaccaaagcttctcaaaactagtaccctgcctagcctacagagtaatgaactaggacgtcttgccatgtggtttgctttaaatgctgtgggactcctttctgatacaataagtaactagactagcagctccagctgtataaactatgattgaattgaacgagtgtatttcatgctatggtaatgatacctgaggccatgcaaatcattggcttgctttgagtaaaagtaatgggtgtgcccctagaattcagtacactagaaaatactgtaagactgcatagaacatgaatgttaagtgtgctatttgcatgtttcctttcctactacggcatcctctatgatgatagttcgaggaccacttttttcttatcttttgtgctaattgtatttacttactatgcagggcatatcaatatgatcacatcaactactttgcaagtccttaacctgtcctcgaatgccctttttggggatcttccattgcttgctgggagctgcactgtgttagatctttcaaacaacaagttcagaggaaatctatcagttattgccaaatgggccagcgatttggaatatgttgaccttagtcagaacaacctaaccggtccagttcctgatgcgagctcacagttccttcgcctaaactac

SEQ ID NO: 195872 - DNA, 408 bp, Zea Mays
ctggtagtctgcttctggtggctagaagctgaaaaagctaaaacaaacagggcctacatctagtatcggagccgctatcgctgtcagggccatgctagcaatcatgtagcgtgcagatgaactacctcaccaacgaatcaccgttaggagacgaggtgtggctctagaaatgtcgaccacagtctcgtgatccaccaggtcatgagggagtggcgacaataggcaatgcccattgttgaccaagaccaactactattcatggacggtgctcatgaagttgaagttgtagatgaaaggcctgtggacgacagtaaacgtcaacaccacatgggctacaacctcaatgagaaccgattgttcgtctaactcagggagaagggtggtggcaggagcatacactagatcgac

SEQ ID NO: 195873 - DNA, 624 bp, Zea Mays
gtcgtgcaaaatatattttttgcactagagatataacacaatttgtagaacgaagtttaaaacaggaggtgagatagataataggataggagtgcttttgggcacaatatccgtagactccagcaaggatgtagagctgaagactatgatggagaagaggggcggatgcgtgatagagaaagggccacgatgcatgagggagggagaggctcaatgtgtggcagagtgtagctagcgtcgggtgcagagtgggtatgagaagagctagggttcatcgtctcttataaattctaggttgatttgggtcaacgactatttatttaagaggcctatctccgttaattgattttaagagacaatcaagttttaagtgtctttgtaaatggtttgtctgtctccaaaaaatcaggggacattttagaagacagtgagattttatgtccacctctgttaatcaaatcgtttgtcttccaaaatcatctatgtaatagtgataatatgataatttattctattgagctaggctcatataaatttagtcaagtatgcttaaatatttctcttattaatatgcaaagtggactctatttgaactcatctaaaatcttcgtattccggttaaaa

SEQ ID NO: 195874 - DNA, 272 bp, Zea Mays
aaatgattgaatttgttgagatactacataacagtatctacgccttgcttgagtctcatgaattcttccttcttcatgtgcagcactccatctggaatgtagtgctcacgaaacgccaatttaaattcgtcccatgtgacttgatgtccggcaggttgaatggccacataatttccccaccaagtactgacagggccacttaactgctgagccataaacaatggattctgggtctccgtgcatcggatgagtccaaacttttgctcaatgac

SEQ ID NO: 195875 - DNA, 471 bp, Zea Mays
cttctccattgaggaggtgataggaaggctcaagttggtagacgaccatgacgagtcggtcactttcggtagcaagctactctacatcgaggagcagtggctcgcctgtcagaaggagaagaataagaaagcacgagcgcacctagagagcactaccaacgttcacggaagaggggcaaggctagtggaggccgtggtggcaagacaggaggtgacgtcggcgaacgtaaggcgaaccacaatgaaaccaacatgaacagtggagggcaggccactaggctaaggattgccgacagcccaagcacgaacgcatcggtgtggcctacatggcctaatcaaaggaggaagagcccacactttctctggcccatgccgtctcgagttggagctcaaagaaagtagaggaaagggggaagtttcaacctttcccatccttagtccgcggtaacgactactcgctttcaaatcgac

SEQ ID NO: 195876 - DNA, 306 bp, Zea Mays
attgctttgccaggtgtggtttagtcactctaattgtcaaggttaatagctgactactgctttcacatctgttggggttttctgccaacttctaccgagttacactggttagactgttggagaaactcccatcatcagtctgtacaaaaacgggtacgctatggactagcatatctaccacgttcaaccaagataacatataagtacaaaatcattgatcgctaccatttgacttgtagcgcagcagaagaagagcacaacgatgtagtgtaagtagtcgtatgttctcgtatgccaggagtagca

SEQ ID NO: 195877 - DNA, 323 bp, Zea Mays
ggaaatgtgattctggcctatttgtgttctgtttgtagtaatggtcgcacacggcaaaagacacatatgcttttcgttagttcctgcatataaaataaaatcacaatttaaaattaaaaatggtaattacttttgtcagatctttgccggagaaacaagccagtgagttcttagcccaagtacgcacactcgaacacagatccaccaatctaccaaactaactactgcctagataaggtaagtctaagggtgtgtttgattcagctttctgaaccagattcgcttccaaaattctataatctcaaccaaacgtacaacaacag

SEQ ID NO: 195878 - DNA, 820 bp, Zea Mays
ctggatttctacagctgcatcaagctcatcaactttgtccgctccaaggtgtgtcagcaacacccttctgctgacagttatattttttttgggacacgttaatgcctgcaatagtgttacaggctcaactgctttgcttaggccctgattggttacgcttctccaccacgcttagattcgtggaaacgccaagtttctcgcaatcattcgattttcacttattacttcaacagataaactgtcgattctgtaagaacaaaaataatctaggtgtttgttgagattctcgcttattttcatccataagcggattataagcgaaaccaaacagggcctggtatgaacggctgattaaggttacaattttatcaatttatgagcgtactctgcttgatttctagctgttgttgattcataggttgcagagaaaaaatgctggagctgtggccaagcattctcttccaacacagaactctgcagccacttgcacacagtggagaattgcctaattgagggaaaggtgccatgggaggacgatgtgtacttgaaacctttcatggaagatgactcccttttgcacagcttgtcaatcgatgacgatgatgaagatggggactgtggagtgtcaatggaaaagggacaatattcagctgggaatgaggttttagctgaaccatgggggaacaagctgagcagcatatcagaaagaaatgattctgacatcagtgctcaatttcagcaagagtgtactattggtagtacacaaagggaagtcagagagtcccttcatgtggcgattgatggccacctaaaggttgca

SEQ ID NO: 195879 - DNA, 646 bp, Zea Mays
atttcggtacactcatggcgataaggaggtaaataggaatggcggagagcacaaaacaaaccaaagcagttttgcccgccaagttaagaagggagccttccaggaaggtaaacgatcagctaccttctaaacccaaaccattagagtacccttcgatagcttcttgttggatatgggtagccctaagtaggtgcatggaaaggttgttgaagggcactgcagtaaggaaccactttcctgaaccgcctgatcattacaagcaatagggataaaacaactcttttgcatgttggcaaccaaccccgaggcctccccaaaacagtcaagaataaccttagtacacctcaattcaagatcctgtggcttaataaataaaaccacatcatcagcgtatactgaaatccttgacttgattctatcattgtcaagactctgcagcatcccgcaccgctcagcttctttaaaagactgctaagcacatccataattatgataaacagcataggggactgggggtcaccttgtctcaggccccgcatatgcctaatatgatctcccggagtaccattcagcaaaacccgagtggaagaggtggaaagcagattggaaatcaagttacaccacctcggaccaaaacccagatgaa

SEQ ID NO: 195880 - DNA, 657 bp, Zea Mays
gttccaaagcccaacgttggagtgacgatggtggtcctagtaggtcgtaggtctcgtacaaggacacgcttgtctcctctaggcctcttgcccctttcctcgttgttgctgatgacgatggtggctgggtgaaggtggtggaccgtcgggcttgtcgatgtcgctctagcctctcgaaccccccttccaggcctattcctattgacttgcacgagaagtgcttcaattttttctccctgtcgcatcgcgctactacgtgtcgtcgtcaggtgtggtgtttctctgccggttgcctgggcaccgtgtctacgtgtgcacacgtcgacagacgtctctgcaccagccgaggcaggccttggtgtggcgccctatttcccgcacgatgacctcggtagaggcctcaacctgcatgaagggtagcgcgggagacgatggcgagggttctggtggtggtgggagaaggcgtactcgccgcgggcagaggaggcgtcaggcgtgaagcaatagtgggcatgtcccttgggatgactaccctggtgtgccacctttgcttccatcggcgcttgatcttgcccctcctacagactctgcctggcctttgtgtatcatcaagcgatctaggaggaccatccaagctgaagaagatttccggtgtgc

SEQ ID NO: 195881 - DNA, 468 bp, Zea Mays
catgtgctatcttgctttcccggttcttctacgcgcaggcaaactataaattattatattatataatatgcggaggactctttatattatatgattttctgaaggcccgttatcgacattcaggtgcaggtgtaaatgcagtcagaaaattcggcatgagccccctctctgagctggtgtggtctccggatgaaggcttgagcattaaaattgcggcgtctagtcttagcacaagaaaggcttctcttcgttggaatgcagatacattgagcatattgatatcttcacctcaacgaagtggttctggtccaggtgaaaagaacggtgataccataaatgataacctagaggtatcagaaaagatgccatcacaactgcggattcgcagtgacagctcagtgagagtaaccgtggatagccccaatagtacaaatgttgacgccctacaatttacgtctatgagatcgc

SEQ ID NO: 195882 - DNA, 355 bp, Zea Mays
tgggattctttcctctttcgtcattaagttgttaccatctggcgaactctagttctttggtattgacatgcttgtatccctttaatactcttgtttcaaatacttgcctctaaatttctactgcctacttagacatttcagttaacatgtccttgaccacccctatttcttaatgatccatgagcgatcattttattttgcacaaccgtgataatctcgttgtttccttgtaacttccttcagtaatgaatttttacttcaactcttatgttggaacctcacttatcttatccttgattgttttctccacttagtcactttgtgaatcttgccttaactctgtccacggattatg

SEQ ID NO: 195883 - DNA, 866 bp, Zea Mays
gccgcgagcagcagcagcaggacggcagtgttgccagtggcgcttctgctgctgtggcggccgaggctgatggcgccaaagcggggaagaagtggaccttggatggcgaggagtctgacgaggaagaggacaaggaggacggcaagaaggctgaggggaatggtggtgctggtgacatggacgtgggtttgcccagtggaaatggtgatgccaacggtggtgctgagatggaggaggacgaaattgatccgctcgatgccttcatgaattccatggtgctgccagaggttgccaagctggagagtgctgcagtagcaatggatacagcccctgctgcaggtgcagatggcaagaatggtaagagctcaaaggatgtcattagtaatggggataagaaagggtcaaggaaagctacggggagaattatgcaaggggatgattcagactcggactacgatgatgctgatgatgatggggctggagaggatgatgaggatgatgaggaattcataaagcgtgtcaagaagacgaaggctgagaagttggcgatcgttgaccattcgaagattgactaccaaccgttccggaagaatttctatattgaggtgaaggacatcaccaagatgacatccgaggaagtggtagactaccggaagcacttggagctcaaggtgcatgggaaagatgtgcccaagccaataaagacatgggtgcagagtgggctgacaagcaaactccttgataccatcaagaagcttggttttgagaaaccgatgcctatacagacacaggctttgccgatcataatgagtggtcgtgattgtataggcatcgcaaaaactggatctggcaagactctagcattt

SEQ ID NO: 195884 - DNA, 471 bp, Zea Mays
gctgagattgtttctataactgtcttctcatcaaccgtgcactacacttcaaggttgcactccttatgagcgtgttttggcacccctccttccaataaccatcttcattgttttatttgtctgttacgtgctttcacctcatgaacgtaccaaactcactggtcacggagcattagggtcattgctgctacaatccttgttgcttgacgaatgaggatttctcaagatattacttttgaccattctcggtcttactatcctcattcctcctttgggttttcatgtaccgtagagtccctctcgttcctcactttacctgattggtatcttccattgtcatctccacctttttcgcaaccccatgtctcacctccaccctcaccatctcctccttccctccaccagtatttccttcccctccaccaccatcatctccatctagtatctcctccaccactactgcgtccttgt

SEQ ID NO: 195885 - DNA, 562 bp, Zea Mays
ggaagtggggaacaatgtgtttcacaggatgattcttaatcagtttgctggggacttaggtctcgacgaggacaatgtgccttgcaatactccaagaaactccgctcgctctgcatttggtggcagggcagttgcttctactagcagcaaccacagcactgattcattgagcccaggcgaatatgtgagggatcctggatcccttctaagtttacaaccatggatttttagaagaaacggctcacagaaccatggggaaagtgtgcttgcgagcggtaagggcaagaatcgggtcgatgtccttcgagagggtcatgctgttggaatctcaccaaggagtcctggtcttggttctgggcctggaagaggttgtggagctgttaggagcagaagatctcgttcgaatttgatgaagccacttgtgccaatggacaactcctacgtcccacagctttacagtgagaactttgaaatcgaagaatgcacatttgctccagctccttccccagcttctgctaggccattcattgtgacagatggtacaaggataattagtaaatca

SEQ ID NO: 195886 - DNA, 424 bp, Zea Mays
actctagagtttcaaaatggcttgaacaacttaggagacttcctaccaattttaggatggttctattgagttcctcactaaaggtgctaccaccatccttatatataattctttttgtactgcaagtgggtcatatttgggtcatattttcttattttatcttccaggaaagtattgctgagcacatcagtctgctgtcttttctcaaccctgaagaaaatggtacattgagtgtttcaaatggtgtttcttttgatacagctggcactctagttgttctgaaagaaaaacttgcacgttatgttgcctttgagcggaagacagattcatcaaagcttttagagtattgggttcctgcccgcctttcaccagtgcaactagagatgtactgttacatattactatcaaactccccagcccttag

SEQ ID NO: 195887 - DNA, 839 bp, Zea Mays
taaagatgcacctatagtgaactgtggtaaagttcatgtatcgagggagagtaatgatgatgagcagtcgaatggtttacaatccagggacaccagcattattaattccaatgtgtcaagaagaccgtcgggccaatttaactcccagaatgaggttcttgaggaaagtgtttcgcttaatgaaggaagtcaagacaaccaaagttttagtggcgctcctaagaagtttttaaagaagacatcacatgggacaacaaataccgaggaagagatttcaggtcccaagattctctcttgttcagtgcagaggtctgtctttgtcaaatgtgccttcattgacgatataaaacgcttttagatctccactgtgatttattgtgattgaatactaacatagaatgcatagcctgcgattctacttctggtctgccatgcttctgttcataatgcattctaatgtagtggcagcaaatttatatggagaagtgtgagacaatggatctatttacatgtttgttactttcctgaaataatttctcacaattacatgcagggaaatcagaagtgttgaacctgcaccgatgaaggagagaggaagcttctctcttttatccaagtctgtacatatgaaagcaaccagggttgaactaacttcagaaacagccttaaatcaatcatccagtgcaagtaaagtgataaaaaagatgactacacatcctacagacttgaagaggttatagacagatggacatattagcatctattcatgaatattaatagtgtatcgaataatgaacgtggtttgaaatatgcagggaacacatgcaagctaatgcagt

SEQ ID NO: 195888 - DNA, 393 bp, Zea Mays
caacaacccatctaaacagcatcgtttctgggacaatcactagaacctccaaccaactagtgtttgttctgggaaaaaaaaccctataagttatcatttgcatgcatgtttgtccttacatgctacagtttctgaccaccttgtaatctgtagctgtattagccacttgattagcttcgttgcagggaatgtcgtgtggtggatgcgcagcaagcgtgaaacgtattctggagagtgaggtaagctaagttagatcagcatgccttagatgtagagcttttggccaaagtgcttgttagctctctactgtttctagtagtgtttgtaactctgtatgtgcttggatttttcagccccaggtacggtcagcaactgttaaccttgccactgaga

SEQ ID NO: 195889 - DNA, 362 bp, Zea Mays
gaacaaaaggaagtacaaagttgatattcttcgatgtgagagcttagcctcacttgccccggctacattagaacggctattccttcgggactatgacattattgtgtcgatggttcctcttccttcttcatcagttcttccaggcccttcaggcccaattcattttggaccaccatcttattcctccatgacaccttggatgaagctagtactgtatacagcaggacattgtggaccagtatctgctgtgttcatgaaagggctacgttttagattgctgcctgaaccattagctggttgtgagaaggcactgctatggtcttgggatggctctgtggtgggtggattagggggaaagtttg

SEQ ID NO: 195890 - DNA, 1062 bp, Zea Mays
aaaaacttaagtttgtcctaaagtagcagtgttgattttttttcatttttatcaaatgataccttttcctctttgcagcaataaaaggttatgccttatcatatttgttatccagtgctggaagaatacggttcttacttggtactccaggaatggttgctcttgacctagatgcgacactgaaaggcctttttcagcaagtcctccattgtctggagaacattccaaaacctcagggggaaagtgttcctgacattaccgctgacttggctgtaagttatcaacctaatatcatatacagaattctcactgacctatgaagatagacctaattttcctacaacttctgcattcttgttgttaatacaattttctatgcccagtaatgtgtagattgatgcaaaggttttcctgttgatccacacaacattatacaatttctgttcaaatttcttgtgcataatttccagcactcaggctttccctctcaaaactgtttcatttgagcagtagtacatgttataagtctacatgtagataactgcagttctaatatttatcaagattctagattgcaaggtagttttgaatactttttaatggcgttgttgaaaaataaagttctagatgttgacgataatatatttgctttactgccagagtatttttgttgataaagaagtgctcactatgcttctcctcaaactcattataattgtggtttattgaatgttatctcaccccttttctgtgtattgacaattttatgatttttaatcatgttgaaagctgttaatctaagcaccatattctgttgcttgttgaaacttgaaaggttcacacattggttttcttttacattgccgattgcattagccagtgagaagtatggcaccaactgtgtatttaattctgtatgcttagtcttccatttaattttgcattttgaactgttcaaacctgatatgctacaggatttgcgtaagcactggctgtcaatcttgatgatagtcacatcttcacgatcctcgataaacattaagcacttggagaaggctactg

SEQ ID NO: 195891 - DNA, 561 bp, Zea Mays
gtcatattatgcgatgctgcaggctaggagacaactaataagatccatgtgcatgcattatgtgtactaacacattatgtctgtgtgtatggttatatacatatgcaaatgtttacacaacaacatacatggatacgtacatagtgtttaataaaacatagtgatggattctactttttctctgcccaattaaggggcgctatgggaaaaactattaagttgagtgcattgacaaggactataaaaaagcagggttcattttttgtgggaaatcatacctgatctggtaaaagttgcaacctgtacaaaagagtttgtgattctacggaacaaatcatatttgttgtatctatgtccaggagggattggaataacgagaaagaaaggatgtgtatgtacattaatatgtatgaagggacaatataaataaacagagatctataatggttagtattgctaacctggagaggatattaatacttgttattataatgactatttgctacaaagaaatatgaattctagaaagatgtagccatctgcaatcgacaccaattgccc

SEQ ID NO: 195892 - DNA, 549 bp, Zea Mays
ggcgacaatgataatggcaattctttggacaatgataattatggtggtggctactcatctctacagagtggtagctggagtgcccttatgcaggaagctctccagtctacaaccagtgaaaacagtcccaaagaagagtggagtggcttgagtttccataaaactgagcaggtgatggctaacaatgcaactttatcaggccatgatgataataagcttactaggttaagcggtgcaaacctagaaaatgcacgtccttcaccaacatccagctacgctgatggaacaatgaataacccaaatctcgccagttttcagcatgccataaggcctccattcgagcgaagggaccatatgactcatgaatctcctaatgctcctgttaacaatcatcaatcaacttctgaagtcaacaatgggtacattcaacatggcttaaaacaaattcaatctgatggaaggcaagaacaagtgcacctagcaaatggaatttggccacatcaaaagactgaactgctcagaaataattcacagtcaactggtatgcat

SEQ ID NO: 195893 - DNA, 330 bp, Zea Mays
gttgcaacaagatctctggagataggcaagaacttaatgcacgggattgaagcatgcagtgaagttcttgaatcaacggaaccagatattgatgatgacatgaggcatgggtttttgtgtactcgagcagcattgtacctaaaggtttgtttgctttctttatcatttgtgagagctctgttccacattaaaagtagggatcatagaattttgacctacagaggaagtggaaaaatgatgtttacatggcgattcgggattgtaatagagcgcggaagattgatgccacatcatatcaagcgcacctacatatggctgaggcactattgc

SEQ ID NO: 195894 - DNA, 399 bp, Zea Mays
tcttccacggcgagtcgctctaccaaccgcatgcctggacccccaccttctaccctttggtctacgctggcgctagcgggaggccgtacgccgagctctgcggcaatggctcgctggacggcttggacgtcaggggcaagatagtgctatgcgaactaggaggcgggccgggacgcaacatcacgagggtactgaaaggcgcggtcgtccaaagtgccggcggcgccggcatggtattgctcaacagatttgcccaaggctacagcacgccagccgacgcacacgtcctgccggcgtcgcacgtcgactacgccgccgcctcagccatcaagtcctacgtcaactccacgtcgaaccccacggcgcagatcctgtttgagggtacaatcctcggcggca

SEQ ID NO: 195895 - DNA, 594 bp, Zea Mays
ggggtttctggttccgacgagttgaaggaggtgaggcattgttttggtgtcaagttggaggacatgcggattcatcagacctaccctgaagatttcctgttgtttctaccggatgaagacacgacaaccaaggttctcaacgaaggaagacctctgaggggaccccgtttcagtttgctgctcaaaagatggtccagatttgctcatgcgtcctcatcgtcgatggctgagttggttgatgttagattaacaggcattccccaacatgcttggtgtagatctacaactgaacagttgctcagggactcatgttgggttgaagcattacattcagaagctatggaaatgagggatttttcagccttgatggtgaaaacatggtgttttgatcctgaaaaactggttaggaaaatggatttacacatcttggaggctgggatagatgatcaggaaaagagattcttaacctataagatctccattgatatccttccacctaagaccctacagatgacatcggctaccccaccacctcctcctccacctccgtcgggaagggaacctgatgatgatggccctgacgatcaagatccc

SEQ ID NO: 195896 - DNA, 550 bp, Zea Mays
gttgtaggaccgaaatgatccgacgcagaagggcaggtgaggaagcggtgaggacgatgtcatcaacatatagcagcaaataggcagtatcggatccacgccggaagacaaagagtgatgtgtcagacttggcctcaacaaatccaagggatagcaagtatgtggcaaaccgattgaaccatgcacgaggagcctgcttcaatccgtagagggacttgttcagatgacaaacgaggtcggggtgtgcagggtcttcaaatccggacggctgaacgcagtacactgtctcagacagagttccatgcagaagacattcttcacatcaagctggtgtacaggccatttctggtatagagccagggagagaactgtgtgaaccatagctggctttaccactggactgaatgtctcagaaaaatccacacctgggcgttgggtgaatcctcgaagaacccaacgcgccttgtaccgctccagtgtcccgtcggcattgaacttgtgtttgaagacccatttgcctgtcaccacgttggcatgaggtggtcgaggc

SEQ ID NO: 195897 - DNA, 433 bp, Zea Mays
gaagctcctcgagaagcagatcgttcttggtctccgcaaaggttggaaaaggcttcatgcgggtaaggatgggcgttatgcgatcgaagcgagggctcaagccgcggaggatgttgaacacgaggcactcgtcggtgatgggggccccgagggtgcggagagtgttcgccatcgtcttgatctgacgacagtactcatccacagagagatcgccctgagcaagctgacggaaggcggtctcgaggtacaggatccgagtctggcggtggtcgaggaactaagcctcaagggcaccctagatccggtgagcagtatcatccggcacgcgaacgatgtcctgaagttcggccgtgagggtgccatcgatccaggaaagcaccacctcgtccatcagaagccaatcctttgacgggtcagggaccgctgagaggac

SEQ ID NO: 195898 - DNA, 929 bp, Zea Mays
agtgccatatgcaagagatttgagaacctaaggttagtgacttcctccgataacaaatactgtatctggtcagtcaaacatgtttaacttttatcaccaatatctgaacttctatatggattggaaacaggtagaaattactagacgtgctcatacttttggaatctatactgggttttcactcaagatactatgttttttacagttgaaaatattcgacttaggaccagtgtttttaaggagtcgccttggcgtccaggcggtgggccaacacccagaaatcctaggcgccttgcccgcctaggcgtccagacgttggtccaacgccttgcctcgccttacactttaaaaacactgcttaggacaaacctagatgtatctatacctcatttcaatcagtgaatatttttttctacagtagaaaatatttgacttaggatagacctatcttgataactttattgatttttcacatctgccaactgatatatttatatgatttcttgttgggtgtgggtttagattttatgaggctgtagtccgattgcctctgcagaaagctcaagcacttgactccaatgctgatattatcaatggtcaaatagacccaaggcatcatgatacaataatgttgcagcgtgaacaatgctataggattgttatggatgcgctgtgcactctcaagggtgttgggcatagtcgaatgcaaagtgcagacaagtcatctgctctagcaactgctgctgatccagcttctcgaagcaagtatatcaaacaaatcatacaacttagtgtccaatggccggacacagttttccatgagcatctatacaggacacttattgagcttggtctagaaaatgagcttttagagtatggtggatctgatttggtttcttttctgcagagtgctggccgtaagcatcaag

SEQ ID NO: 195899 - DNA, 361 bp, Zea Mays
gtttgggtagggtagcgggaacggaaatgaaagcagcttgcaacgctatcaactgcagattagttaccgtgttttgtttggttggctcgtgaggaaggtgattggatatgggatcagatggcacccaatgcagagcggtaacaagcttctactagtatgtaacaaatggcggtgtcaacgattgcagctggactcaaccaaacaataacgtagttcagtcccgctaattaagcctccatcgcagcccatggtgcatattttttatataattttattaatcctttggccggaaaatacctcatcacaatagcacccaacgcatggtactgttggacagattcttcattcgttggagaccgaa

SEQ ID NO: 195900 - DNA, 368 bp, Zea Mays
aagaaggtatgagacggaagaggggcgattttaaagggcaggtatgagacaaacatcaatgtaggatatagaggtgtcaagggtgcatatgataataattaaaagcataacaaaggatatagttaaggcaacactcgtgaaacgacaaagtggagaaaacaatcaagggtaagataggtaaggttccaacataagagttgaagtaaagattcattaccgagtggagttacaaggagacaacgagatcaccaaggatatgcaaagtagaatgaccgctcatggatcattaagaaacaagggtggtcaagggcatgttaactgaaatgtctcaaacagatattgggatataaaggtaagcatatataaaa

SEQ ID NO: 195901 - DNA, 479 bp, Zea Mays
gagaaatcatccaggatgaccagatagtattggtaaccggagatgcttggaacaaggggtgtccaaaggtcacagtggatgaggtcgaaggggagcttgggacatagaagagaagggtaagcgagtatgacgcccgagctgatagagatgacaaagcgaggtggagttaccgtatgggcaaggaatggccgatagtcgagagaggacgtcgtggtcgaggtggccaagacaacggtgccaagtggaggtaggggtagtggaggcaagggcgtagggttggacaaaatgggcagaggaaggtggggtagggaagcgaatagggtataggggactggaactgtcgtagcgagcaaccacaacacgagtggtatgatcccgtatggtgagtccccaaggatcgaactccatagagcaacagttgttagtggtgaagtgacagatcgagaggaggttctggatgatgttgggggcaacaagga

SEQ ID NO: 195902 - DNA, 767 bp, Zea Mays
ctggggctgtcgcagagccttgctaggtgttgctgttggatggatgtccagggcctgggatctcctttcatatgctcgcgctaagctcagcgcttgattaaggtctcgtggcgccataagctccacatcgatcttgattcgatccggtagtcctgcagtgaatagttgcacctgctgctcctgggagagaggtgctgtttgggctagcagatcccaaaatctttcctgataatcatccactgtcgtgcgaaagggtaatcgtgccagttcacccaatggattgctgcgaagtggcggtccaaacctttgctggcacagctgtttgaaatgagaccatgataatggtggtgcatcacgctggagctgtccataccaggttcgggcgacccctgtcatgtgatatgaggccagccagaccttctcttatatcgtgcgttggccgtcgaagaactggtcacaccggtttaaccactggatggggtcctcgccatcaaacgtggcaaattctagtcggtggaaacggggaacgccgaccatggatggtgggaatgggttgctaggcatgtgctgtggaatgtttggcatttgtggcagaggtgatggcgagtgcggcaagggcagtaggtggattggcaggggtgtggtggtggttgtgtatgcggcggcggaggtgtggatgggctgcgggggtaaggatccctcagggactagtgtggttggcggcaggccgccgtaccctggcatgccgtaggggcagccagatggag

SEQ ID NO: 195903 - DNA, 538 bp, Zea Mays
ctctccgacctgcgcgtgctctggctcgccggctgcaacctcatcggccccatcccgccgtccctcggccgtctcgccaacctcacaaacctggacctgtccaccaacggcctcaccggcccgataccgccggagatcacgggcctcgccagcgcgctccagatcgagctctacaacaactcgctcacgggacccatccccaggggattcggcaacctcaaggagctgagggccatcgatctagccatgaaccgcctcgacggagccatcccggaggacctcttccacgcgcccaggctggagaccgtgcacctctactccaacaagctcacgggccccgtgccggactcggtggccagggcgccctcgctcgtcgagctccgcctcttcgcaaacagcctcaacggcgcgctgcccgccgacctcggcaagaacgcgccgctcgtgtgcctcgacgtttccgacaactccatctccggcgagatcccccggggtgtatgcgaccgcggcgagcttgaggagctgctcatgctcgaca

SEQ ID NO: 195904 - DNA, 1334 bp, Zea Mays
cttgaaccgtgttaaatgtaaaccatattctgaagctaaggattcagatggccgtccggatgaagaggttgcagatgagtattggggcaaccatttagctcgaaatgactctatcatagttgatatctgccaggttagttttgaatgaatgtagggcctctatcttcgagcacattcttctgtaacaacatctcctttctatatcttatattaactgttgagtatcagtactttcccttttttcattggtatattccttctatgtttatgcaaacagcttacaagtcctgctatttgcattaggagtgccaaagagaaattatgggatattgattaggactatggttatacagctgcacatgtattcttgaatcatccatatctacttaccagtttgctgattagatatgtgtgtgatcttgacaaggagcctgtgataattaaattttcaagtttcagcacaattaatggtgcaagattataaagcgttcacgtgtgctaacggtttattgcagccactccatatgcgcatagttggatgaaaattctacatttcctccgaattaacctaatttgtaaagaaaaaaaaggacattcaatgtcacgaaaagtctcacgcactggctacttgatatatatcttttcattaaactatgccaattgcctcttaagctcttactggtagtccaatgccattattctagcctcattttatcaaccttgatcctaaacaaacaggaggttatgagtccttgggttaaatatattgatttaacacctgccacagactttttgtttttttctaagaacatctcctgatccatttagttggtagatggcatttaacatttattaaatctatatccgatccgattatccgttattctagtggggagacaggacatgggctggacaaaagtatatcccttttcactctgcaatttatgtgtcggctctaagatgttatgcatattatttgtgtatatgttacaaacgtgcatagtgggacagttaccctgtttatacttcaattaacatgcttttatcttctattgatgtctttggtgtttcaacacagggtcagtacaagtcaacattagtttgccccatctgcaagaaagtttctgtaacatttgacccgtttatgtatttgtctttgcccctgccttcaacaacaatgagaacaatgaccataacagtcttcagtactgatgggaccagtgggccatctccttacactattagtgtaccaaaatcgggagatacgaggacccttattaatgcgttaagcagtgcttgttcgttgagagatgatgagcgccttctagttgctg

SEQ ID NO: 195905 - DNA, 431 bp, Zea Mays
aatctccatgtcatgtattatcataacttcacatcatatctcctgtttcactttagaaacgccaaagggccgtagttgcagacttggagcttcatgaggaagtgaatgcagtcgtggaaataatcaaagacagctatatggtgtgtaaattactctcttcattgaccaatttgtttgtttaattgtaggctgattgcaattaattactctttgttgttgttttgtttaatccaggtcctttccatccctgagtacaattatgcaattgggttttcaccactgatggattataactcacaactgcttccccaccaccactatgataatggacaacggtaatatttggaagtttgcccattttggttccaattattgccttgttacttctctccgactggaaatgtaagaacatcaaagtttgtcaaagtcat

SEQ ID NO: 195906 - DNA, 433 bp, Zea Mays
accaataacatcatgcgttttctcctctttcaggcctctgttcctgctcgctactggctgagagcctccataatcgccttccgactacaacgagtcgtgcacccacaccacactttggtttttttggtaccactccctcctatgacatcttcttgtttttgggtgtgcatgctaccccaacctttcttccactgctcataagcttgctcctcgttctgctcaccgcgtcttcctcgggtactcacatgatcataaagggtatcgatgtcttgatctctccactcattgtctcttgatctcccatcacgtcaccttcgacgagacgggcttcccattctcgactacctcgaagccctccacctacttcctcccttggttggattttctcaatgctcctgtggtgccctatggtcagccactgtttgcttttccc

SEQ ID NO: 195907 - DNA, 716 bp, Zea Mays
gttttggagccttacaaatgtccaccggcacccttatgtgacctactgcgattcgatggtgatagtcgtgcaagaaggttccttaggcaaatccgctcatacaattcccttttcgcgtttacctcactaggtgctgtcgttgatcgatcgataaataacggtactgcaccttatgttttcaaaatcaatggtgtcgtacaccatcgcattggctcgctattgcccagtcatggattgcgcccacaatttgctcagctttacatatatgacactgaacatgaggtgcaaaataggttgggcatgtttgagaatgaagctgatgtccatgatcgtccggattcagaggtggcccgtttattacttaacatgctagatgagcataacaagctggtcgcggcatttcgctttgctaaagaacgtttacacgaagagggcgaccaaaaggtgacgttgcggttgttaggctgtaacacacgtcatgacgcacaatacaacttaccagccaatggtgagctcgctgctataatagtgggtgattgcttatcttcacagtacaagtatgatgtcctcgtgcacgctagagacggtggcctcaaacatgtttcgtgcttgcacccgtcgtacatggccttgcagtacccgctgcttttcccttacggtgatcgtggatatcatcttggaataaaatacgctgacgtgggagagggtgatgtcgc

SEQ ID NO: 195908 - DNA, 572 bp, Zea Mays
agcagcgatcgtctcggtcttgggcccccgggctagccatgtcgtggggacggttcagcttcactcctcagcaggggcccacgctgacgcggcgaacgcgggtgttccctgcgcacaagcccgcacctcgcaacgtggtggtcatcgatgaggacgatgatggtgatgttatcattatggagcgcgcagctgcgcgaggttcaccttctgcggcggcggcaccaggatctgaagcgaggaaagggggcggcttctctggtgatgtgatcaacatagatgatgatgaagatgagaaagatggtaccagaggggataaagcaggtcctagcatgtcctgtgcctctgggtctccagtagcgatgaccccaggccggggttctcccaggaaccgatatgggtttgattgctcgtatgacagctctgagagcaatttgaccaaaggatgggactctgacactgatgacggctctgattgtgagattttggatgacacggctggtacagcccgtgagatgtgggagacggctgcttccagaaaaaagccacctcatggtgtcgacgagtgtgaggat

SEQ ID NO: 195909 - DNA, 341 bp, Zea Mays
cccgcccctccttacgcggcaccatcggtggggatatcccccaatctgctggaaggagtccgcgccaaatcagagcccgaaatccgtgccaaatccacgctggatgaggtggtggggagaccccccaatctgcgtcccttctacatgcctacacatcctccatagaaggcgccctcctactaaccactaaaaaaccccttccacacgctgacaactccatatatattagtccaaagggagagcacgattaaggccacgcctaccagcttcaccctcctcgcatttgtaagtccaatttttagatttatgatttcagatgttgagttgattttgcaaactgg

SEQ ID NO: 195910 - DNA, 542 bp, Zea Mays
gaaactgagaggtttcgtgctgaacttactcaagtaagaactgagcttgaaccatgggaaaatcaaattattgaacataaaggaaggttggatgttgcatctgcggagaaaaagttaatgaaacaaaaggtagactttttgggaaacaagaagactgctgtcaagtacttcaattcactttgagtcctttagatggagatatatgatgcactgatcacaagcaaaatatcttcaattctttatgtgcgatagcttaccatgcctgacactgacactgcaagctttgtataattaaatctacttatccatttagtttatttgataaacattaatttgatttttttcaaacttgtcaattacgtttgaaactagttccctgatttcagcatgatggagcacaagcagagttaactgatgcacaaaatcagatggaaagtataaaggagaaagttaaaacaaaggattcatacattgtggggcttcaagaaaaaatagagaagcatttgaatgaagcatctgaagctcgcaaaatcgaacaggta

SEQ ID NO: 195911 - DNA, 274 bp, Zea Mays
gtcattttggtaagcattttatgcccccactttttcggacttgtgcaccagttgttcatattcgttgtaactactttcaggaagccaatgctcaatcattccatcaaacagcgggagactttgtcatgccagtagcccctgcccagaatttcgtttcgacttcagttgcatcattagccccacctcttggcatgatgccatctccatttagccagccagttgctccaccaggtttttcagattcactgcaaggttctccagctagagaagaggg

SEQ ID NO: 195912 - DNA, 427 bp, Zea Mays
ttttgaactatggtttttatagaggaattgaagagcataagttggggtacaaatgtctttgagggtgatggatatgatcctacacaaaaagtgtagaaaaagttgactgaaaatgggctgttgagttgctggtgactgaaaccagttcagttaacaaaaaactgaaattcagtaaatggtgccaaatttggagatcatttgtgatcagtccaagtagttttagacaaaagttttcataaaaacgttggagcccatagtacagagaacaagtttcataaagagggttggacttggttccacataaacctgggagaaaaggctgttccaagttgtgctgtcaggatgtagagatgttgatttagttgattgttgctagcagtttcagtgagttttacacaccattggaactctatggtaattaaaccaa

SEQ ID NO: 195913 - DNA, 959 bp, Zea Mays
tggatcatgaaatgatgtttcccgttgtgcaaattggttcacagttttctaaatggataaaagtccataacccaagcctggagcgtgcagccatgcagctgatagtgaactccgaggagatcattgaccaatgcaaaactgtaactgatgtatgtgaactcacattctcaagcaaatctccagaggttaactcaactgagactagatttggtttctcgttaggtgatgcagcaatcaccgaggcctatgtcgatccttcagagactgctttgcttggtcctattgtcttccgtccctcgaatcactgtatgtggtcaagcatggttttgatcagaaacaacctgtcgggtgtggagatgctgcctctccgggcatatggtgggcgacaatctattgtccttctagaggaatctgagcctgcttggaagctagagttcagccttgggtccaatgttcataataaatcaacgatgaccaaacaagagatcccaagctctttgtgcagtcaacagctaaccaaagagatacatgttaaaaacagcggtgaccttcctctacaagtgacaaaggttaaagtttcaggagctgattgtggtgtggatggatttaccgtggacaactgcaaaggatttagcttagcaccgagtgaatcaataagaatgctcatttcttttcaagctgacttctcttcagctatggttcagagagatcttgagttggtcatgactactggcatctttccgatccctatgactgcaacaattccggtctgcatgcttaaccagtgcagaaaatcttatctcagatctgcccactggaagctgttggtaatcttgtttggagctttagcactgcttattctggtctttgtccgttatgccccagattctttgacagtgggctctcaagactatatcaagattgatgacaaaaaaagtgccattttcgaggagaacaag

SEQ ID NO: 195914 - DNA, 806 bp, Zea Mays
ccctgcttacttctcgctgctgcctgcatcgactcctccctgatcgtgtgcctgcctttgcggtggcacaaaggccggatgtcacattaccgccccgttgaaacgttgctcgtccccaagcaacagcatgacatgtaatgcatttgctcatcctgaagctgctattctgaagatggacaagtagactgtcatgaaaaaaaacttcagattctgaatacccgggtcccaaggtctaagtatccaaagaataaacaaaagtgtcaaggtccctttttgtgtatagagtatcaagttgaactgctgaaatttatgataattgccattgagcacacatctgaagcggtgtctcacttcctttgctgggaaggcaatccgaagcggtgtctcttccctgtcacctgcggagaagcataagtggagagagagacacacctttttatgcgcttaccttgaggaggcggggcggcgcccgtgggttgtgtcagtcggacgggacgtgtggcccctaggtgggagttaatgcgacgggacgcaacagcccgtgggctatccgttgcggcgcgcatgcgtgcggaatccgaagagataaaatccgtttccggatttgaccttttgatgtgggagggctcggctctgacctcggtgggtccgtcggtccctatatatatgtccggcaggggtccctctcggttcttaccttacttttgccttcccagccctagccacctctgcttttttcgtccgcaaccaagagtcgcgcaccgagacgagaggagcaaaaaagagcccatgcaccttttctccgc

SEQ ID NO: 195915 - DNA, 446 bp, Zea Mays
tgtagctgcctgatgaagccatactatctgaggttcttgaagttcctggtgttcaagattggtttaacaaagctgctgaggttggagatccagatgcactctttctagctttgaagttgcaagagagaactattgtccagaaggagatatttgggaagctcctgccttatccattcagctcggacaatttttttgccgaacaacatcttagatccattgctgcttgttttaaggtactgttctcactgatagtataaatgagcataaataatctcaaattttgctaccactcaaactcatcccagtgttctttgtaacctgtgtttctcacattgttattaaagtgtcctatgttatgtgtcattttggtgctgatcttttggtttgatttaacgtgttcaggaatcttccttttgtcttccacgtattcatagtttatggcttgt

SEQ ID NO: 195916 - DNA, 305 bp, Zea Mays
ccggagtctagattattttttttataatcggttgtgctagtaggtaaatactttcaagctctatgtccgtacgttcaagctctatgtccgtactctaccaatatcctttcaagctctatgtccgtactgccctataatcggagcctagacttcaagctctatgtccgtactctaccaatatcctttcaagctctatggtccgggtgcgtacggagatgggtaaactactggagatagtctaactgtaggtaaatactttcaagctttatgtccgtactgccctataatcggagcctagacttcag

SEQ ID NO: 195917 - DNA, 693 bp, Zea Mays
caatgatgcaaggcacatgaggctgtactgctattccttccaaaggggtctcatcacttcctggcaagacagctccatcttggccttgaccaggatccgaaccacccctcgacgatgaacggcgcttgcgatggcgcctgcgacgtgggcgaggcgggaggggttgctgcgagtgtgcggcagttgcgatctccatgaccgtggacgatgtcgcgacggtcgtcgacacagtctccttcctcttctcaccttcagcactagggggtgaaatcctgcgccaaaccttattacgaccctcgaatcgacttggatgagaagccgggatgcggagccggttccaaactggcgctttagaagcctgctgcgaaagcttggttacagacgtcgtcttcactacagtctgaacaccagccgccggcgcagctgaacccagtctatcccacacggagcctctagataaccgccggtgaaccgtgagcctgttgtcgttacgcaccggccctggacatgtataggatcgatgtcccagagccttgcagcgaaaacaccttggctccctgcggcacgacacagcgaagtggtcgtcggcaaagcagttgaaacagcggccgatcaagtcgacgggcacagccttgctagcccgcagcaatttagcactccgctgccttgtcttcttcgaccttacttcaaccc

SEQ ID NO: 195918 - DNA, 735 bp, Zea Mays
gttggacaatgcattgtgacttagtccgctggatgttgattcttccctcacactttgtattctattcctgttttgtctgacactccatgtttacacatcctccagccacttaacatttgatgataatatttcacatgatcaaatggtttctatttgcttactcaaggaaggtgtattttcaactattccaatcagcatttctctccacgagtctggtatttttgcatggagaacccgtgtgtcaccagtcaaaggtatttctttcagagaatattcattcatagaaatttcagcagtttttagatatatgtttccaaagttgttccgaatctgcttgctttaaagtatcttttgggttgaactattttccattacctttgtagacctgacaaccttttctggaccatttattgtggtcaaggtgtctcatagttctgaggtaggaaagcaaatgcttttgtacttttccatgcatattgattattgtattctaattttgtcttctcatagttaatgctaactaaatgcaggaaggcttatctctttcagttcaacctttggttaggatccataataagagtgactttcctcttgaactccggtttcagaggccaaacaaagctagtgaagaggctgcatttgtcacagttagaagtggagatatggtcgatgaatctactggagtatttgacgccatggatttgtctggtggaccaaaaagagcattgatgtctc

SEQ ID NO: 195919 - DNA, 1114 bp, Zea Mays
gagttcttgaaatgttccattgctggtgttgcttatggaagtaggcctacagaagttgaaacgtgttatggagaaatagttgaaactaatggcagttttgggcgcaaggacactactgaattcaagagatcagtcaagggatttaatttcactgatagtcatttgatgaatggaagatgggccaaagaatgttctagggatgctatagaaatgtttttccgagtcttagctgtttgccatactgcgattcctgtggcagatggaaattctgctggtatgccttatgaagctgagtctcctgatgaagcagctcttgttacagctgcaagagagtttggctttgaattttatcataggacacaaacaactatatcagtgcatgagtacgatcctgtcgttggtggaaaggttgataggtgcttatcatttccactgttcttagtgattattctttaaaagtgtcaacgttgccaacgtcatgatgctatttttgtttcagaacatataaactactcaacatcttagaattcagcagtgctcgtaagcgtatgtctgttattgtgaggacagaagagggtcggctatttctgttctgcaaaggagctgacaggttcaataattgtttttacatgtgatgaaaatcttctatgtttgacactgcatttcccgtttataagtacatatctaattatctatatcatgatagtgttagccttaaagttgtgcaacatatttaaactattccagctattctgaagtgtacctttcttcagagttgtaaacatcacatgctaaaattttcaaccttcaagtcctgttcaaataagtatcattatcttttcatctctgtgctccagtgtaatattcgaaaggctctccaaggataatggaacagctcatctgaccaaaacaaagtgtcacattgatgagtattctgaggcaggtctccggaccctggcacttgcatattgtgaacttactgaagaacaatatgttgtatggaatcaggattactcgtctgccaagaattctgtacatactgatcatgttgcagctgttgagaaggtgtcagaagacattgagaaggatttggttcttttgggtgctactgctg

SEQ ID NO: 195920 - DNA, 438 bp, Zea Mays
agaccagattgtcatggcccagctcagtgacaagggagtgcagattatcaagaagaatctccatcagaaggtcaagaagtataattgtttccgccaggatgaaaagggtgtgttatggtttaaaagcagattggtgattcctaaggaccaggatctcaagaggaaaatcttggacgaggctcatctctccaaattctctatgcatccgggaagcaccaagatgtaccatgatctgaagcctttgtactggtggaccagaatgaagagggagatagcccagtacgtatcagaatgtgacacctgtcagagggtaaaggcaagccacttgaaatcaactggagccttgcaacccctatctataccttcatggaaatgggatgacatcagtatggattttattgtgggtctgcccaacacctctcgtcatcatgattcgat

SEQ ID NO: 195921 - DNA, 1163 bp, Zea Mays
acaaaacattagctcagaaaaattaacagagcatttgattttagtgctatctttctttttgcttcttcagcacatttgacatatttggtgattggcaggatatttcacagccaaattctgaggctaatccacctgatggggttttagcggttcctttattgaggcatcaggttaccttgcaactcatgttgtgttattttatgatgaaaaatagtattaccactcctttgttaactgttattacttcggacagaaaattgccttgtcatggatggtgaaaaaggagactagtatctcgctttgctatggtggaattcttgcagatgatcaggtataactagctaacaccttccatgttgccaagacaaatggtcaattgtgtcttaaggtcatttggtatttttcagggccttggtaaaactgtatcagccatatcactgattcttactgagcgcccaccagttccacagtcatctactaagaacgagccatgtgaagctgtaactctagatgaagacgatgactgtattggacctcattcggaaaagctgatgcggacatgtagctctcaagtgacaagtaacacagtgaagcaagaaaatcctattgtagcggttaaggcaaggccagctgctggtactttggttgtttgcccaacaagtgttttgcgacagtgggcaggagaactgaagaacaaagttacaagtaaagctaatttatcttttctgatatatcatggtagcaatcgcaccaaggatcctaacgaacttaccaaatatgatgttgtgcttactacatattctatagtaagcatggaagtaccaaaacaatcaaatcctgatagtgatggagaagagaaagggaagcctgacccgtatggtgcacctgtgtcctcttcagggagcaaaaagagaaaggcatcctcttctaagaaaacaaaaaataaaagtgttgcagagagttgcttgcctgaaaaacctcttgcgaaagttgcttggtttagggttattcttgatgaagcacaaagcattaagaactaccgaactcaggttgccagggcttgctggggtttgcgagccaaaagaagatggtgtttgtctgggacacctatacagaatgctgttgaggatctctatagctacttcagatttctcagatacaat

SEQ ID NO: 195922 - DNA, 342 bp, Zea Mays
ggtaaagctctgcccaaaccacatgttgtttccgcaactccgtacacttatgatgctcaccagggcgcccgattactaaatccgaccctggttgagcgggaacgcgtgcccgtggtcacggtttccgccgtgcacatggacaggtcgttctcaatgcattcgtgtcaaattgttgggtgttccgaggtccctgttagtcggtaaagcctttccgattgctaaccgtagtagtcaatacccgccatgaccagtacgggttgtgcaagggttgatctgtgtgcacgccatggccaggggtactcgtggggaagaaaacaaagtagaggggcctttccgtaagtt

SEQ ID NO: 195923 - DNA, 358 bp, Zea Mays
tcgttgaagagctgtacaggcaagccttttgtcatgatgtccgcgaactgatgagaggatgggacatgaagcacgcgcacttgtccaagagcaaccttctcacggacgaagtgaatgtcgatctcaatgtgtttggtgcggcggtgatgaatgggattggctgccatgtagacagcactcacgttgtctacagtagacgaccgtcgcagaagtaatcgacacgtggagttcctcaagaagctgccgcaaccagcaacactcagcaacagcgtgggccacggcccggtactcagcctccgcgctggaccgggagacggtagtctgtctcttggaggaccaagagatgaggttgtcgccg

SEQ ID NO: 195924 - DNA, 777 bp, Zea Mays
cagaaacagacgcgtctcccgcacctgctgcaggagggctttcaaggcgtctgagtgtgaaggacaggataaacatgtttgagagccagaaaaaggagcagactccaagttctggtaacagcaactcagcaggtactggtagggtggttccagggagaggtgagcaccgcagggttccttctggggcctccatggagaagttagttagaaggtggagcagtgttagcgacatgagtattgatctcagcaacaatgagagcgttaacataaatgacaaaaaggacaatggaactcctgttgtgactccaacatctactgatttggaggccaactctaaagcaaaagctgatgtggactctaatggacagaaggatttagtcacatcacactcctggccttatcaaaaggataatgtaccaatggatccgactaccacagatttgtgcccaccctcaactttaagtaatacacttgctcctcatagtgatggtgcaggaaacgacatggttataaactctagcattgagagtgagtcatcctttgggaaagaagcgggggttattcaaggactcacaaggatgtcaaatcatgctacttcaaatgtttccactcgaaaccatctaaaatcttctgcaaagccagttgaggaaggcttgctgaaaaataaggatattttaaccagcacatcgttagaggagcatgttcgcatgatagataaggaaataacagctgttcctcatgaagtattagttgcaagtgaacagattccccagaatg

SEQ ID NO: 195925 - DNA, 640 bp, Zea Mays
cctggggatccgccgcccttcttcgtgcggcgtcatccagtttttacccctcgaatacggcttgcaggcgcgtcctagccatctcgctctctgcataatcctctgcgagacccgggctcgtatgccacattcgtcgttgtcaaactaaacaaaaaaaataggcttttgtcgcgaagatcccagcagagaggtgcgctgatgcctccctaacaatcataatcttcgcagagaaacgctcatgatccgtggtttcgtggatgtgtgatttggatttttgttccattacatctgtttccacggcgacattttcatgattactgcagcgaactgaacgagggacctatggatggactgctctttgtccgtgttgtgccgtccaagtttgccttcggatagtaaaaccagcaatctggtcacgagatctcgcaagccttttcatgtttgtgggaatggtgtgccaatttgccaaattttgggtttctatcgttatcttcataggtcgtaattttgccaggatatagcgccggaaccccatactgaggtcgtcgttattgcagtcataagcgacgatgaaactttgaacagaccagaatgttcttgcagtcacaagtggttgtctaaatttggatattgaacagaa

SEQ ID NO: 195926 - DNA, 425 bp, Zea Mays
ctcgcagttttttctcaaaaaacctgtttcatgtccttgttctagtcaaaaaacggaaccctaaggaacaaaagacaccccgatcaggaaggatagccgagacgcggagcacctacgccttagggaatggttttctcactcactatccccacctaaaatggtaactcgtgctccaaaagggaactccatggaaggaccagacgacgagagcgaaacaacggaaaaaataacacagtgaaacgtcagaacaaggccaaaaataaaaggtctaaaagcacaattcgcgcaaacaacttaacatgttctttacaagcaagccctcagggtgaataggaggcttgcatggcaggaggaggcgaagcgtcaacctcaggggcgccaggaggcaccgcaacacagtaatatccgacaggaggggacaacac

SEQ ID NO: 195927 - DNA, 753 bp, Zea Mays
gagccagtgagctggtttgacctgagctgaaggattcccactgacatgaactccaaatcacggggcagctcaccagtaatcttattgtaagagaggtccaagcttgatgcgttagcaaacacagcccaaaaccattctggaatcgtaccggtaaggttcgagtacgaaatgtcaaggacgttaacttggttctgccagcgtagccaggcagggaatcgggaacccagctgacaggatgaaaactctgctacattcagttgaaacggtggcacccagtccggatccactctgatctgtagattgttgtcggacagatcgagagatgtcaaacttgttagcttgctgaagtgctcttctgacatgacgccattcaggttgttgccagacacatctagggaactcaaggctgcaagctcgcctatctccacaggcacagggccagtaaggtgattgccagaaacatcaagtagggtcaggctggtttggttcggcagccagttcaacatggtccctgtcaagttggcttggctcaggtctaactccctcagcttcctctctgggcagcttggtagcctgtccagcagacgcgctatgtccaggccaatgttggtgtaggcaagggtcagtgtgttgagactgcacatgtttctgaacgtctctggcaacatcccattcagatcgttgttgccaagatcaagcacttcaagtgaggtcatgtatcccagctcgcgaggaaacgatccaaacagtccg

SEQ ID NO: 195928 - DNA, 463 bp, Zea Mays
ctatagccttttctataagggatgcaacatctgaagaagctgaggatgctgaaccagcagcagctgatgcaacttgtgtgctcatcttcgtgctcccttggacctgcagatggggaagagaatcagcgagcttctttgtgtcctgcgtacccacgaccttctctttgatccctgctgccctacagcaggtgggaggaagtagcagggaagatgcacgttgcacagacaggcagctgggaaccggaagggagggaggaggtgggaagagatgcagctgttgcacacgcacagcaattttgcagccaatggctgaaggtttcacgggatgaggaggtgaggaaaagagtgggagagatataggagagaaaccctaatgtgcttggcccaaacagagctatcccagtaagctaaagcagtcgatctgcttatttgatatctagtcagtcagggtacctagtcagac

SEQ ID NO: 195929 - DNA, 1055 bp, Zea Mays
cctgaactcgctgatgcgccaagattctgtgcgtgaaatggtggactcctctagggtggatgtggtctgttttcaggaaactaaaatgcagtcgttctcaattcacaccattctttccctgctcggatcagacttcagttcgtacatttgtctaccttctgctggggctagtggaggtatccttgtggcttggagaagaaatgttggggtttcaggccagaaaagacaggacactcacagtgttttagttcagttctgcagtgaagatagaagtgcgtggtggcttacttgtgtgtatggccctccaagaaatagtgaaaaagatagttttttacaagagctcagagatattagaattgcttgccctggaccttggatgatagctggagacttcaacctaatttataaggactctgataagaataatgcaaatctgaatagagtcatgatgagaaggtttggagggctgatcgaggatcttgctcttaaagaaattcctttgcatgggaggaaatttacttggtccaaccatcaagagacacctgttctagtcaagcttgaccgagttctttgttcagttgactgggaactgctcttccccaatgttttacttcaaagtgctgcttcccaggattctgaccattgccccttgcttctggggcttagggataataaatctggaaaacgaaggtttcacttcgaatccttttggaccaagttggatggctttcaggaagttgttcattctggatggaatgctgtgataccggtcccttgcccgtttaaaactgtagatctgaagctcaaagaaaccgccaaaaggttgcaggcttggagcgaaaagaaggttggtcacgtgcattctcagcttgctttgaccaaagaagttctccacagacttgaaatggctcaggacattagagtgctcagtcaggctgagctttggctcaaaaaccggctgaagaagcaagctcttctgctttcctctctcaagcgcaccatggctaggctcagatctagaatctcctggttaaaggagggagatgctaatacaa

SEQ ID NO: 195930 - DNA, 1925 bp, Zea Mays
tatcaaatactagtaatcgccagcagcacattcctgaatcagtgaatcaggatgccgaaggttagattttttttttaaaaaaactcatctgttctgtttgtgtttttgctgaggtaatgtttatttttttcatgtttaatatacacttttttcatgtttatgacagaagtgttgtacactgggaggcctaacagtagcatgggtcaatctttacgagaccttgagaacgaccatgcagatttccagttgacaccacatgatccccattctgtggttggagaagctaatttgccgcagcataatgtcccaagggacagcgatctgagtcctcttggcttactttggtctgagctggaagggcatccaaaacaacctctctcatcaaatgtacttggtgtaaatgaacgtagaaactccaagcctacaacacccaaggacattctacctgtaaacatgagacaagggccacttagcaggatgaatgaagtttctagtgtgcgtgatgagtggcctgcaaactttggacggctggacaatatgaatggccctaacatttctggcagaatccctcaggttgaagctgagcatcatttgaattttgatgggcacctcctgcttcagcagatcagacgggagcaacagcaacatcaacagcgacaggagcaattgatggcccgtagtaatttagagttttctggtgcatttcccgggcaggtgtttgattctttgcaccaacaccgacagcctatgaatcaacagcttcctgatgtagagcatcttttgagagtccagtttgaacttgagcaacagcagcaacaccaactccaacaagagcagcaccaacggcagctacagcagcaacgacaagcccagtttttgcaacgacagcaacagcagcagcagcaacagatgattcttgagcaattgttgcagcagcagctgcagggttctaattttggaccaacaaatatggttgatcaagtcttacttcgtgaacatgtatttaatgaactgcaccagcagcctcaccatttgcaaaggcagcatgatgcagctattgaacaacttattcaagccaaatttggtcacgggcttcatagggagcaccataatgatatgttggatgttctctcacgttcaaatcagagacaaatgcttcctttagagcagcaaattcttttaggccttcagcatgagcatgaacaacaacttcagtcccaacaattggcaaatgctctgcggcaacattcaggcagggaagaagaaatgcacttaagtggggtctggccaatggatgatgctgcccagtttatccgctcaggaaccagtccaaatcagagacacggttgtttcgatctcctggagaaccttcagagatcgtcatcgtttgatcatcatgaccatctagaccgcagcttatcgttacaggaacgattgcatatgggtggtctaggtattcactccctagaacgatctgattctttgcctggtggtggtcctggaccaaacacagatgtcataaatgccctatcacgccatcatggacttgggcagttggaaacacatggtgatgtataccctttgggtcaaatgcctatgcttccttcaggtgttcatcctcagcaacataggcatcaggaacagcttcctggttctcacataggaaggcgtgaaaggcactggtcagatgccaatggtcagttgcaaaatagtctaatgcaatcttcacacatcaaccagttgcagatggaagtggagaagcagaggaggaatgtggaaatgaacctttctgttgacaatccacatgcatgggcagccctaatgaataaagagaggaatgcagaacaagatttgagtgatatgattcacaagaaacttgcccttcaatcgcagcagtcccttggttttcctgatgtttctgttgc

SEQ ID NO: 195931 - DNA, 406 bp, Zea Mays
agagagatgagtcgccgcgggtgattcacgtggtcaccagtgctgtgtccccgaaaaccggttggggagctccgcctggttcccgtgaaggagttcgtagcattgattggatgggagctccttctgtgcctctgtgattgctcgtcggtgaagcgcctccgccgcgggtccgccgttcgccgtgggcagaactgcctacaccgcctgcgatggtatgagtatttctgttagatttggcgtgttcccttgtgcgcgtagaacctggtaattgaggaatggcatagtcacgggcctgattgatctcgccgtcgacgtttgttcctcggcggcgcgtcgtgctgtgggaggagagtgaggcgatgggggagatggggtcggagccgtccgatctgctactaacggctct

SEQ ID NO: 195932 - DNA, 543 bp, Zea Mays
aagaggtttatcatttgttgcatcaattgctttgtcttgaggaatattgatggaaatacgatcctctgcaaacttctgtgaagagcaaataacactaaggttggaggaacatggcctatcagcaccaatacaaggctcattttgatctcgaaactttatgtcaattatattgcatcatcaatactgttgtcattacattctgggcttatattcctttcagtaatcttgggttccctactagtagagctagatggatttgcacaactagcagagaccatatccaatggactataaggtgatgaaccaagattaagtgaacaaacttgaagtggagcatgacaaactgtatcagatgcatgttctgttaccaactgctgatgatcctcatccaaagcacatgacatggattgctgagaaccattagtcgaattgctttccattaacatttttctatggtgccaaagcagtactgaaggtgcagttgtcatgtccagaaaactttgagtgaatttacaccggtcatccaaacaacaaatggcaggt

SEQ ID NO: 195933 - DNA, 660 bp, Zea Mays
gaagccaccggtgggggtggtggtgtcatacgagtacctgaaaaagaagacacgggcgacagtccaaaaggagctgcaaccgggttagagtaatcatcaagaaagtcgaaggccgctggtgggggtggattggaagcctcagaaaagggaaacgaggtttcatcaaaaaccacatgacgggagataatggtacgattggattggcgatcaaagcataggtaacctttgtggtggggggaatagccaaggaagacacaaagggttgagcgaggggataatttatgtggagtggtggcagaaaggttggggtagcatttgcagccaaaaacgcgaaggtgctcataggatgggttgtggccgaagagagcaaagtgtggtgtagggagtgcgagtgttttggtgggtagtatgttgaggagatatgttgcggtcccaagagccgcagcccaaaaactggggggaacactggattgaaagaggagggtgcagatgatattgttgatggaacggatgacacgttcagccttaccattttgagctgaagtgtaggggcaagacatgcgcagatggactccatgggatgagaaaaaggtgcgggcttgaaggttgtcaaattcgcgaccattgtcgcactggatgctctggatagggacaccaaac

SEQ ID NO: 195934 - DNA, 1333 bp, Zea Mays
gcttccagaggatatcactattcataatgaagatttggagggtaggttatttttgttttaatttattctttggaacttgaaactagattcattctctggttccaagtttaaaccattaaattagaagaatggaaaacattttctcttctgttattaggttatgctatgtgttctcttctgttaacaacttaacatcgaactagaagaaccaaaaacccttttctcttctgttaggttatgtctcttctgttaacttctttttttggtcacaataggtgataggcggagatctctgttgcgcggccttactgagtcactgtcacaaattctgcctctgttgtattctgtaagtttgcctttacacctttaccatgttcgcatgggagatatggaaacaccgaaatgcctgtgtgtttgagggaagaaggccttctgtccctgctgtttttcaggaagttacttttgaagatgctctttggtgtagggcaggtgccggtgctcttcaggagctcttggcacgccatttcactcctggacactaggatgggttgctagtagtggagtgtagctgtgtggattatgtgggtggtggtttgttggtttggtggtcctgagcccgccatataggtgctcagttcctcggtcaaccattgtacaagggactcaccatttggtagcctcctttatctttctctcttcttaatgaaatgactcgcagatctcctgtgttgttcttaaaaaaatagatgccaatgattctgttgggttgccttggttcatgatattctgaatcatactaaacatgggtatcatgtaatgtcttgttttgtagctacttgagaaacattttggtgctgctttaagtgagcatgcgaagcagcaaatggatttggctaaacaacatgcagggacggtgactgcagttctaaatgctgtcaatgcatatgctgaatgggttcctgtgacagatctagccaaatatggtttaattcacgggtatgtttactggagtgtttgacatccctagttttttaatgggattctcacttgcctcactagttattatgttctgttttgcagatgtgggtccttgctttcttacagcgattttcgcctccacgcttgtgagttttttaaagtgatatgtcagaggtatggagaggctttattcaggctaaaagttaattttactgttttttctctcctgatatgttcttgtttttgtggtgccacctgtctcaggaaaagacctgtggatgtggcagttgctgagtatgatgctgcaatgtgcaacatattccaggtgttgatgaacatttcacaacaatttttg

SEQ ID NO: 195935 - DNA, 517 bp, Zea Mays
gtcaagagggacggccgccaggagacggtgcacttcgacaagatcacggcgcgcctcaagaagctcagctacggcctcagccaggaccactgcgacccggtgctcgtcgcgcagaaggtctgtgcgggggtctacaagggcgtcaccaccagccagctcgacgagctcgccgccgagaccgccgcggccatgaccgcgtcccaccccgactacgcctcggtgagtaacccaccccgaaatcctcctcccctctggccttggtttcagctctcctgtctgtctgtctgtctttctgtctgtgctgacgtggggttggttgcccctgttctctgtcgtgattcgtgaagctggcggcgaggattgctgtgtcgaacctgcacaagaacacaaagaagtccttctcggagacgtaagtaacggctggctttggtctaatttcattcattcatttcgattgggtggtgagttggggtgtggctgttgtggatgcaggattaaggacatgtacatgcacttc

SEQ ID NO: 195936 - DNA, 461 bp, Zea Mays
gattgatatagtatattcagctgtagtgtagttagttgtcaacgtagtgattgtagcggcaagtgaatctcgtcctgagtcctgacaccatttttagttgtgatcaattgggccttaaggttttcagtgttcacacgtgtctctagcaatgtcttaagcttgagcgcacttccccaagtccagtctcggtatgcagcaccgatcaaacctgaggcacgagtgttcagcattgttcatgagaatgctgtcctcatctagatgggcaaggtgataccaacttgctagggagatgagggcatgcgtgtcggagcaaatcctttattagttgctgacttggcgtgttgtgtgtgttttcgacacgtgtcctgccgttgctagttttgtcagaattccatgcacgacgagcactttgacgatgacatactaaaacaggacaattgcttatctccggaacactcaag

SEQ ID NO: 195937 - DNA, 423 bp, Zea Mays
gaatacctagcttgcagcttgaataatgagtttttgttggtgacaataataagttcatcatcacactgtccacgtctgtaagcaacaacagcaagtgtaggatcccgcttttcacaatatttacccacaacacgagagtcgtaaaatgggttggtagtaaggaaatgctcaggattgttgttgctgtcaatgatgattttaccaagagcattatggacatgcacatcttggctaccttcactcactaagtgctccaggaattgagtgagcaaacgtaggcgattcctgattcacatatcaagcatatgagaccaacagaaaaagacggagggggggagcatgatccatgtgactaagcaagctgagggatatgaaaaacaaacctcttctcacattcatcaaccagtggttcaacaggaagga

SEQ ID NO: 195938 - DNA, 685 bp, Zea Mays
ctgcaacatactcttcttagagatatcttctcttgattcatctactgccccaaaatttctgtgaatagcttccgttgtttccaaaacttccctggaaggagactgtagttgtaaatccagcctagtggcttcttcagtcaaacttgtagccagaacctctaccttttcaggatgtatgttagcatcaatgaactctttgggaggtaccacatcaactgcaaatacgctagtagttgattcttttgcaaccacaaattcaccaacctctgcaatttcttctgtttcagtcaattcatgtttttctaccaaggaactactggtgttaggtagaaaggaagtaccaggggctagagggacaccaatctctagtgcttcagtatcatcactgaatgcataggacgtggatgcaagtgtctctcctacatgagattctgtctccagttgagaagctaatacacctgaaacgactcccggaagcttttcagcatcagtgaaatccctggccacggcacatccttgcatagaatcatccttgcatgtgttgaggctagttggacaagtcctttgttcaagaacaacaaattgatgatcctctgcaacatgcttatcgtcatcgaaagtagttgataggccatcatctagtaaagagtgtgtgtcttcagcaatcttgtcatcatatgattca

SEQ ID NO: 195939 - DNA, 404 bp, Zea Mays
tggtggcggtcaagggaagtgtgggcgcggcttgcgttatggtggaggtcgtcataccccaacacccatagggaaagccagctatgtagacagcggaagaggcgacgaactatcgggcttccagggcagcgagccacgcagactattggacgcttatggcactcatccgcgttgaaagcgacacgagttgcttcacgatcatgcactagaagtccatgtcggtgtgttgggggtcgggcatggtgggggaggtggtggagtcgatggtggtcgccgtgacgggagacggtggcagaggagaccactgggttgttgtcgtcgtgtcctggcatcgctgataccagattgttggagcctacactgaggagatcgtaagagtgttgtacaggggcagagacgacgac

SEQ ID NO: 195940 - DNA, 324 bp, Zea Mays
ggccgccacagttatgtttgattggagctgatgaggctgtgaatgcaggagttatggtggaaacattacagccgcgtgtctctggaatcgaggaaacttctcggactctgcagactgggcattcaagccttatggatacagttatgattggggcggctggggttaatgtgtcgcgcggttccaaggagtgggaccattctttggcggccgctgtgcatgggaccgagtttttggaattggccgaggagactgtgaatgcaggagttactgtggagatgttacaaccgcgtgtctcggaaatcgaggagtcttctcggattttgc

SEQ ID NO: 195941 - DNA, 354 bp, Zea Mays
ccacaaccagctgcgatggatcctccatagcctccaccagccggagctgatctcgcagttactacccagatacggataatgcagcagatggcagatactatggcggacatgcatgcacagatgcggcaggagagagaagatatacgccaggaaatgcgtcaggagcgagaggagatatgccaggagtgaagggcgcagcagcaacagcagcaagtaccacagccaccaccaccacctccactttcaccctgggacaagcaccgggaatttatgagtcacaaaccgccgacattcgccagttcaccagatccacttgacgctgatgattggctgaagtcaattgagaagatgctc

SEQ ID NO: 195942 - DNA, 2500 bp, Zea Mays
ctaactgagcaaggcgaggtgaagttgggtaagcacatttgtttgttcatttttttcattttgttggcacttgatatttctgcatgtcttgacttctgtgtttgacatgctcaacaatgtacaaacaggtgattttggtgtagctgcccagctgacaagaaccatgtcaaagcgcaacacggtattcttaacagtgtttcttttgctacttcaaattccaaagttcaagaaacttcacatcgatgtgacaaacaaaatgaagtgcagatgaaacttgtcaatgccagtttactataagatgccccatttgtgcttgtgcatggttctttaatatgatgatactttgatgagaacttgaaacaagttcgtgttggaaaatgatcgatgtgaagtcctagctatttctgttaagtgttatattgaaaaataggaatgtgtatatttcatatataatatatcttgctcaattcttccttggcattcttctgtttttcgaaacccattcgtgacagcctctagtccccaaatatcccattatgagtttgctcattcccccatttggcttcttccttggccactagcccaccactcaacaattcttctgttcttgatgactgcgaggctcatttcaagctggcacattgctgccctgctggagctattggagaaagtagagggttactgtgacagtagcatatcaaatcaacagttgtggaaatcataatataaagacgtccaaattgggaaatattattcagggtgttatcatcctactggcaggtggcccctgcccaatatgtcatcttcactatggatggtactttcatcttttttcctcactgttagggagttggtgcactgggagtccaaatcagctagggtagttcatagttggctagatctaggaggtacgttgagtcagagtttggaaaatcagggtagagtacaagttcaggttctctaggacgatgatataatgtagtactatactataagtgttgtggtggctgtttttgaggaaggtaatgcttggtgctgggcttaggggcctgctctcaccacacctatagaatagttcttggtcgtcgtccccagtactgctgccagtgttgttctagtggctggggtgtgttttgctagtcatgactgccctgactggccttgtgttggggggggggcatttgttgtccccccccttgttgtattgtttccttcttaatgaaatgacacgtagctctcctgcgtttgctcaaaaaaaaaagaattgactggaatttatcaatatctagaaagaaaccaaaagaaaaaaaaatcaatctactccctttctactgctgttgatacttcttgtttctcttctacacgttctaggcagctacacttctctagtttccaaccatggcaatacataaatgcttgagtaacccataactaatagttctacatccaaccatttcgtagtagtgtgccggaaacatttggtgtcctcttcttgatggtatccaatatccattgcttttctgcaagcacgcacaagcagacacttctaagtacacatactgatttgttgtcaatttgtcattgacatgcagccatgctttgagcccagatccatcatgatcgcacaacacaaatctacatgtatacggtgtcttggatgtttctgttgttggggcgttaatatatacttcaatcaaaatgcaaagataaaactgtcccgattttacagtaaaataactctatcaacagactgtcagcattgctctctaacctcagtctgtatggcttttgccaaataaaaataatgcagtgttttttttgcaaagaacaaaggttttagtggcacactaatttccattatttgatccttcatgttaatgctttcagttcattggtactccacattggatggcaccagaggtcattcaagaaagtcgttatgatggaaaggtagcatgctattctctctgcagtgtatatctatctatggaattgttcatcttagcagcatttatggatgttgccatttcactctatcacttggcccataaatttatgattgggttttttgctgagtgatttctttaatattttgtttgtttgggtgcggactgtggaatgtctttacatatggcaaaacaaaggttacgtgtagctgcaaagtcataaaagccagtaaacaatttaacaattgttatgacttatgaaacccctgcctagtgccaaaacatgttatttcttttccttgtctcttgatagttcctctagtaaaaaaatattacttactacttaacctctaaaacatgcctactggttgcaatgtgagaaaattgtttttgcagttggattctttctttaatttgtcttactaaatcatgtgtacttgttttctgcgccaggtagacgtttgggcattaggtgtatctgcaatcgagatggcagaggtagacattgttctttgtttttttcttttgtgaatttacaccttttcctttttgtg

SEQ ID NO: 195943 - DNA, 522 bp, Zea Mays
aattgggtcattattgtgcaattctctcagcaaaaagtagtttcagaaactctgttggtgaagctgtatctgcaaagttatctaagctttcatttgcagtggctgcatgtgccttgaataagtgcggactacctgtaagtttaccctgtgctggctaacttcttttcacctgtccaccctttgtatctgcatattttgtatctattattttgcattattctaattgttgaattttttcccactcattagcttgaagcactagaatgcttgtctactaactcgagcatagatggcaaggatagcataatcgcacatggtgatggagaccacaagattttttatggaatactgagccctgtctctgcttctaagaattggctgtcttcatctgtcattagtggcattgagtccaaccttaaactaactatggcttcaaaatatctatctagccttctgagaaagcactcactctgttcacaattgaacgcaccattatctgaagaaaaggtccttaatgagtac

SEQ ID NO: 195944 - DNA, 543 bp, Zea Mays
gcgggggcggggcggcctcatcagcttcataaggaggaggagacccacggctacgggaggaaggggggacacgacgacgaccacgagcagcaggcgtaccgaaagccgaagccctcgtacgggcacggggacggcgacgacgaccaccaggcgtacaggaagccgaagccgtcgtacggggacgagaggcccagctccggccggaagaagaagaatgtgagcgtaggctgccgaatggccgatgggccttgaactcgtaatctgggctgttttaaacatggtgaaattacaggacgacgacgatgactctgatgacgacggcgcgaggaagccacgttacaaaaagaaagacgacgacgactcggatgacgatgacaggaagaagcgctacgagaagaacgaccgccgccgccgccacgactatgacgattgagctatatgcatgcagtctcgtatatacacatgtgctcgagtcacgcgttatgcaatgtatcatccccattgcatctcctactagcagtactgtagtaaataagcgaagct

SEQ ID NO: 195945 - DNA, 481 bp, Zea Mays
gagggaggttgtcttgcagcctaaacatctcttgctcatctccttcccgcgcctctctctatacttagccggcagcaagagctccaactgttccttcctctcctgctcggacgagcagccgttcatctgagagagcctattccacacgcaacgacccctcgctagcacatcatgtctctacactcgatcacttcgagtgcgtggcgccagcaggagcccaaggtcgccgcagcacaagaacacgagcgagcagcgacagcggcgagggtggcacgactagcggttgcggaactggcagcaacgagagcggaagtagaagcagcagaggcagagacagagctcgaggctgagtagcgccggcagctctgtttccggcgatggcaacaccaacaacgagctaaggatggcaagggatgcagcgcaagagcagacgactcaatgggcagccatgcacccccatgagggcgcacgcggcgacagc

SEQ ID NO: 195946 - DNA, 565 bp, Zea Mays
aaaaaaacaatcatcttcagaggcaaagatacagccaagaggtaacgaaccaacatgcaaagtgagacaattgatcatggaaagcaagagcattggagcaggaaattgcaggcatgcaacgcgaagacccccctcaccaacaaccagttggtgcagtcaacaaccaaaatatttatcacttccataggccagccaacatgcaagttgctttccaaggattaaactacctcgatgagcgaagcctcctatcagcacagctccaggcctccccgtggccgcaaaactacagagcgggcacctatcccaagtacaacgacaatacagacccaacccagtataatgagttaccaggtcgatgtcgcatcctcgggaggagatgactccaccatagctaagtcattcatcatggaagacctcaccctcacatggtactcaaggctatcgcctttgtcgatcaactcatggaagacccttcgtgataaattcctgctcaatttccaaggctataggcctgagacagatgtattggcgaattgtccctctgcaggcaacaggaacaagaaag

SEQ ID NO: 195947 - DNA, 669 bp, Zea Mays
gacgaacgcggggtcgttgtggttcctccgttgtcagtgctggtgtcgttgacggtggacgaggacgggaaggctggcgcggcgtggacgagtagacggcgtgagccgcctcagcggaatggtgctcaaaggccctagccagactcatggccatctgaaggttcgccggatgttgcatctcgacgtcggatgacaagagcagacccatccctacagtgaacaagtagatttggtcctgccaggttaggttgtcgcgtcggcacaggagggccaagaactggctctggtactcctccaccgtgtcagtgcagtggagctccttcaactccccaagtgcgttggtgcggatgggcgggctgaagcgcatgttggtgcattcgacaaagcgcgactaagtgatgatgccgagatcacgctgcaactggtagtaccattgcgtcgtcgtaccatccacaccttatcctccaacaacgtgaggtagccgcggaaatagccttcacacttgttcaaccatggaagcgggtccaactcatcatcgtagtgcgggaagttgaggttgggctcgcgtgggccgatgcggtcatgacgtcgagggccattcccgcggcccccactgaagatgccttcctctgtgcctccgtgtcgtcgacgatcaggcgaaccctgtgg

SEQ ID NO: 195948 - DNA, 423 bp, Zea Mays
gtttcgttcaagtgctattatcaaccaagacacatacgctgaaatgccttttggctatttaacaaaaagaaaaaccagtttaattgagttggagggtgcaagctgactcatttaccccggtacagaatccatcttgctctttcgctcatactttctcttcttagttcctagcgttgatgggcacataggtgatgttccacatggagtagcggtaggggtcgtcagcgctggcaagtgacgctgctgccacggcaagcagcaagaggaatcaacatccactacggcgacgtcacgaacacccaccaaggtccgccagcgatgagttctcgagtgtaacgatctaatgtctgctgatgtcgtgagcatggtggccttctcccatagcatggacgctgacgccgtgagcagctgcaccattatgga

SEQ ID NO: 195949 - DNA, 819 bp, Zea Mays
ataccattcacttcaaaggtgtgtattctcgctaactttttttttgtaaaagatttctcgaaaggaaataatcttattaaactaatccaaagaaattccaattattaatttggattttgggcgcatatcatgtgtcatgactattggctgctctgcagattcttgaaccttgccagtcaagtatcgcatatcgtcctccaaatccctggaccattggaattctaagtctacttgctgaaatttataatcttccaaacctgaagatgaatctgaaatttgatatcgaggtcctcaacatttccttttttgatagttcctttattggcatgtatctgccctagctactcatgctcatgctaactgttcttttgggatttcaggttctgtttaagaatcttacagttgacatgaaggatgtgaaaccaacttccctgcttaaagatcgtctgcgcgaggtcgaaggaaatccggatttttcaaataaagatgttactacctctcaaacccctgtggttccagaagttcttccagggactattccttcatcaactcatgttgaactgcagcctgagatcaatattacatcccgagctatgagtcttccaaatatactcaatcaggtttggctttgaacttctatatcaattatgatgtggtaacacttctgccattatagttggaatatcttttgtttgcagtatgtggctcctgtccgtctacccacaaacagcacggtagaagctgacaaagttgctctgatgatgcctgagcaagtgtcctccttgacccaggttttgccagcacaaacacaatcaccat

SEQ ID NO: 195950 - DNA, 1175 bp, Zea Mays
ggacctccacagccgccagctcgccgtctacgggcgcgagaccatgaagcgcctcttcggctccaacgtcctcatctccggactgcagggactaggcgctgagatcggtatgcctgctcgtcacaaacttcgagcttatgtatgtgcggtaataaatttgtgagacaaaaaaaggccagctggtttacttcaattgtgcgcctgtaattccttggccgagctgatgtcgcaaaatctaactattgttgtgctactaccttttgtaaagcgattattcctttctttgtgtaagagcaagagtaagatgctgccaccagcgggtgtgctgtgctgtaggattttgatatgtgatcaccgcctcaatcagtcaattctcaccacacctcacttagttcattttcactagacgacatacttctcattgatttctttccatgtttgtataaacactttaatagcgttcgaacttgtataacataaatgataacttagtttcttatactagtgcatttttgtgattacacgtgaatacttgttctgagactagctgcgacttttattcttgtgaactgaaactgtctcaatgcagcgttgcccttaagtaactttcagaatgttggcctctatagatcttattatatcaaagctttctgcaccgcatttgcgcattaagctcactctgttttggtactccataccaaggccagaggattggacatgttttactggcaaatgtagctagccttgttgcttcctaaagttggatttatgatgtaatgctcatgtttgccctagtgtgtcagttatttacttctcttattatatcgatttcagtatatcatgtttaacttgtgaattataaattgcttatgaggattcagattattcagttttacaaggattttgatttatcttctgctctttctatgattggcttacggccacttaatttctgcagcaaaaaaccttgtccttgcgggtgtcaagtccgtaaccttgcatgatgatggcaaagttgagctatgggacttgtcaagcaactttttcctctcagagaaggatgttgggcaaaaccgtgctctagcttgcgttccaaagctacaagagcttaacaatgctgttatcatctctaccataactggtgatttgatcaaagagcagctttctaattttca

SEQ ID NO: 195951 - DNA, 364 bp, Zea Mays
ggaaagatgcgtgattaccagttggctggacttaattggcttatacgattgtatgagaatggtatcaatgggatattagctgatgagatggtatgcgataggtgttaatcttgattaagattatcttttactccattttgttgtgtttgacactttaactttgaatgtatgtttttttaaattgttatttagggtcttgggaaaacacttcaaactatttcattgctgggctatctgcatgagttcagaggtatagctggtcctcacatggttgttgcgccaaagtccactcttggcaactggatgaaggaaatccaacgtttttgccctatcttacgtgccgtgaagtttttggggaacccag

SEQ ID NO: 195952 - DNA, 551 bp, Zea Mays
aaataggagatgtccacaagtcacagtgaataagatcgaaattgttaaccgcacgagaaatagacgtacggaacagaaggcgaacatgacgactcaactgacaagcatggcataaaggagagctagcatctttattacacacgagaacgattgatgcgagcttggagagggactcgtggccagggtgaccgagacggcgatgccaaagtgacggagtggagctggcgatgaagctgtgtgcaacagggaggcatagggggtatagtggcccggagctattgcacctgacgatcacgtttcgagatagtagatccttcacagagcaaccagagggatcaaattcaatggaacagttattatcggtagtaaactggcgaacggaaattaggttcttaataagtttaggtgacacaagaacattgttgagatgtaaagaaccatgtaaagtagcggagccagtggaaatgataggaagaagcgagccatcaccgacaataatggaggaaggtgcagtaagagagggagttgaagtattggatagggtatcggcg

SEQ ID NO: 195953 - DNA, 335 bp, Zea Mays
gttatgctcatgctgggtagatagtactctaattttacattgtacatttacatatatatctttttttggtggggaagcatgtgacaaggtctggtattaagtttctacttatgctaatatacacggatttcatagttccttaattccttttttcttttgttatgctattctatgcaaacaaatctgcacctgcttattcatgtagaatattgatttcagtttttgtgtggatagattatatttgcttggttgatatgctaagaagtggtaagtgccgacattgtgcatttgttttaacagtttttttgaaataggaattagttgaaggttttgac

SEQ ID NO: 195954 - DNA, 362 bp, Zea Mays
gacgagggtggcgccgcgggcaaggagcggtctgatggtggtctggcgaatggggcagttgagggcagcagcattgcgggggaagtgccagatgtggctcctgtggtatctgaagcacggatggacgaggacgggggttgctccacaggcaatgagtactctgaaatgaagatggaggtggatggcggctgcgtagcagaacgagagggcgatggtcaggaacaggaacaagagtgcactgcagctgctgtggaaagcgaggttaagacgggggaaggtgacggcggagtggtgaatcaagggactacggcacatgctgggggtcttcaggttaaagaggaggtgggggaaggcttggtggg

SEQ ID NO: 195955 - DNA, 597 bp, Zea Mays
ctccggtagccgccacatcccttcacgccaccgacgacccctgtctcctggctccgaggacccgccagccatctcccaatcatcttcccatggtcgacacctctagatcgacatccccgccgacacgaccatccctggtgcgatcgtgcggcccgagccaccgtcggctctgttaacggcgcagacacctccaactctagaggcgactgcgtgcacgctcgatcagccctcgtctccctcctcggctccttcctcatcgtcgtgcgctcccaccaagaccacatcccctgcgctcggcacctcccctctgctccagactgacgccacaccctgtaccccgacacctcccctctacactaggccgacgcgcgcgcctagggctctccactgcttctcccagcaagaccacgccctctccccacctgcgatgagctctcctcctgtgaagttctctccaccgcgtcaagcagcaccggctctgacaaccatgatgttgtcaccagatccagcagctcccggctccacctccaccacccgtgccctccgtcgtggtctcatcgacccatggcgtgatgcctcactcgatgtcaacgctgc

SEQ ID NO: 195956 - DNA, 1124 bp, Zea Mays
caacagtgcagcagccttcagacaagttagaggacaagaatgtgacaacagcgatcctaaatcctatggagactctactactcgagtgaccagaggtaagacaaaaacaaaaggtttgatgtttgatacctgatacttctttttggttttactgaattatcttggtctgacaaactatggtgctctttacgttaacaaaactatgccgctctgaaactaatataagaaaatattgtatctcaacacttaaattatcagatcattaatgttttttttttcgaaaaacgcaggagagatcattaatgttttaatcggtttataaatgtacagtcatcactatgctgacactgaacaattttcatctgaagcaacaaaaattgcataccctatctgtcccaaaaagaatgtgattctagctttgaatctggttgctacattctagctttgaatctggttgtagcaaccagattcaaagctagaatcacattctttttgggacggaggtcggagggggtatactgcaaaaaaaaagtataagacattatacatctttaacttcataaaccttatactcagtatgctatctacttttagtttatataaaaaagatcaatgcggaaaggtgagtaattttctctcatgtatctttgctatgtgagattgaatattgtaaataatcataaacctttgtattttcatagtcttttttttgtccgagaccttagcagaatctagtaatcgccttaagcattctgaagttgaaacaaatttatagctagcatttgcttgttctcattgatggccacaggtaaaaatccttttgccctgtccatcctgaagcaagtggagcataagttacatggacagaatatagatggcaccaggtcggtaattaagaggaaaggattttagcagtcaattttacttatgtacatttctggttttattgatctcatgttattctgtcaaggtccttgaatatttctgagcaagttgactatcttcttaaacaagcaacaagcattgacaacttatgcaatatgtacgagggatggacaccttggatatgattcaaagatgtgactttccttcattgtgcatggacaaatagtccaggtaataac

SEQ ID NO: 195957 - DNA, 286 bp, Zea Mays
acaagggagttgctgaaagtatttgggatggatggccaagttgactcagcaaagctagagacacctgtcatgccagagcaacctatggaggaagagatcaatcctaatcctaaagcaaaaccttcgaagaaggacaagtcacaaggttctttgaacttcttccaaaaatctaggaatgctttaataggagcagccgatgcggtgcgcagggttgcaacaaaggggacatttgtcgaagataaccgcagaacaggagcggtggctcaagcaatggatggaacaatct

SEQ ID NO: 195958 - DNA, 370 bp, Zea Mays
caaaagtgagtgtttcacatatttgtcgcaaacacaagatgagatttgttgcatcaagttttgatgagctcgatttatcccccctcttgccactgttatattccgcaggaaggatacctatggagtgtttgctgagccagtggatccagaggaggtaagagcccatattcatttcccatgcttcctggatttgccaatttgtttggtacggagctgttgagtattaatatcgtggttattgattgacacagctgcctgattatcatgatgtgattgagcacccaatggacttcggcaccgtcaggaagaagcttgccaggaatgcatatcgctcgtttgagcaatttgaggtcagattgataggctttgg

SEQ ID NO: 195959 - DNA, 418 bp, Zea Mays
ccttgttcatctgccgcagcgttgttgcctcctggtcctggaagcgaaggttgagccacatagttgctgctaaggtcgatccacacaggtccgcggtcccagaagtgctcatttgttacctgttgcggtggggtgagtggttgctgccatgttgggcatctccggcggcagcggtggaggcagatgcacagcggtggttgcgagcagtggtaacatgagcttctctgctggtgtcgacatgcggcacatgaccttgacactagcctgcctgagttgctctggttctactcagcgccactcgtgtctgcacttgtgctagtgattgctccacgttgctggtggcttcactgatcaaagcggtgcatacccctccacctcttcacccttcttgaatctgccaatgcaagctgcatgtgcg

SEQ ID NO: 195960 - DNA, 695 bp, Zea Mays
tgaaggggaaccaaagaacaaggatgtgaacgaaaagaaagtggggctgctaggagggcaagagacagaggtactcatggacagtgagatagagggatccgaactggtaccaggctcaggtgctccagatttgtcttttggtgatggggccgtagttagcaagatttcaagtttgttaactcctgaaggcttagcacttgcggcagtgccggaggcagtggttggctcctctgtcatgaagagaagtaagaggagagcagcatcaagcgcaggtgactccattgtgagagcttccaagcttaaggctgcatggaatttggacactgcgttcagtgaaggtatggtgcactcatcttctgttacaaattttgatcacaatgaagttctttcaaacctacagtcattaggcttttctttccataatgaatctgttgggttacgcaagtttgtagaatttctggttaataataaaaattctgggcctagtttgcaggttagtcatgatgtttttagtagagctatagaaaaaggcgagagagagttgttagaagaagcagagcttgataagctcatgttaagtaatctctgtagcgtggttttagaggaggtgatggacgcacacagtgagcatgaggtttttgctcatacagtgaagtctcatcatcagccaaaatttggtaaaaattcagttaaac

SEQ ID NO: 195961 - DNA, 382 bp, Zea Mays
caggcaagctgtcattggatggtcagcaagggaacaatgtggtgcaggtagcagtactgggtagttcgagcaccgttggtgctagttatttgcagaacggtgacaaggggggtggattgttggtggctgaggagaagggacgtggtggcagcagtgatgtggggcaggaggttgctgttaatggggatgtctcagagattgcaaacaaaacgggcactggtgagttacagagaaaggaaaatggaactgcaggaagcagaacaaaacggtggtttgtatcctctctgaatcctccacccaagaggagggaagtctcagccgtacgtagatttccacctggctgtgggaggactgctgttaccaccacagacagcggtgtttt

SEQ ID NO: 195962 - DNA, 1473 bp, Zea Mays
tttttctatcgtcgctcttgatccagggtcgcccggcattggttttggagcgggaggtttgagctcttctaagaatcggttttgcgaggctttcgatgggttcggaccgtgaaggccgcggctcggaggccgtggcggcgagtaagccgcggaagaggcaactggtgatggagtccagcgattccgaggccgacgagttctgcatctccacgcggcagaatgctagtggtgccgcgtcgttgggcaatgctggtgtcagcagccaaggcagtggcgatcggtcggaggagaaacctgtgacttctagtcctgagaagcttccaggggttaagtccagtgatgtagatggttcagacaagaaaacgggagttcagctggagagcagtagttcgcagcctgctgtcaagaggatcagagttgagactgtccatggtgatggcaatggatgcagtggaggcgcatctaagtgtgggactggtggaaaaatgctgcctcgggggctcccagcatggcggtttgagaggccagaagtaaggggagggcgtgttctggatgacaaaggtggggtgagtatgaaagcaagcagtgcttcaaagatgaaggagcaggtatcaagtttgggtgacaagagacaggcagagctgcagaaacatgaaagaaggacaccattgaagactgatcagggcaaagcaatcgattctggccaacaggaggttttaaggttgcaagggaaaaggggtgttttaaggatattgccaaagaatgataaggtgaccagggatactggtgatggtaagattctgtcaaggcaaactgaggtggatgaggagactggtaatggcaggattccaacaaagcgaggtgttttaaagctcctgccgaagaacaatggtgctgtgatggagagtaatgaatgcaagcttctgtccaagaaggttaaggtggatgaggaaactggggatgacaagatgccaatgaagaaaactaaggtggttgataaggagaccagtgatggcaagattcttgcaattacaactaacttggatgcagagtttggtggccataagttgccaatgaagaactgtactgtggacatggaaactgttgctgggaagtttcagcaaaagaacagtaaggcagatggagaaaccaaagggagatataaaggatatgaagagaaaagtggcgcccctgcagaatttcagaagcatgatgcaaatggtgagaagagagttctgggaaagctactctctcccgttgcgctgaggaaaagtgatccaagcgtagtgggagtttctttgggccagagaatgaaacaacaaaattcaaagcaacaactgaagaactattctctgagcttgaaagatgatagcactaaatcaagtgaacagaagaatctgaaaaaaagattgcttgagcataaagggtcatcagagagtttgtcaaagaaggcacaactgaaagctgttgatc

SEQ ID NO: 195963 - DNA, 523 bp, Zea Mays
gtccgccgcccgcgctgctgttgggaaggaaattccgcttcagtccgccataccggaaccttccatgaacgccctcctctactccgcccgttctccaatagtggaaggttggccaggatccgcgcactgtcgtcatggttccttttcttcgcgcgacatcgacggtggggaggatcggcgcgccctcctctgctccgcccgtctccaatagcagaaggttggggacgatctgcgcaccgccatgcttgcgcgtctccaatagcagaaggtcgcctacgatccgcgccgacgattgcgcgctcagctcctccatccccttccaagcgcgttgatctccaataccagaaggttggatcgtagcctgcgcgtgccctcctccccatgccgatccgccccaccctcctccccactgtccccgtctccgatagcagaaggtcgcctaggatccgcgccgacgattgcgcgctcagctcctccatccccttccattcctgcatcgatctcagcttattctctgcacacc

SEQ ID NO: 195964 - DNA, 1212 bp, Zea Mays
aacgaaatgctggcattaagcctgaccccgagattgatgctttcatgaaggcaactgcagttgaaggaaaggagaccaatgtcataacagatcttatactcaaggtgtgtccccgtatcttcttaagttcactttcacgagcagattcttttaacctagcctaaaattcactctcatgagagtcgaactcaggacctgaggggtgctaaccaactcagttagaggtctttcgcttctaactactctttttatgaagtgctttcataacaactatttcataactactcttttatgaagaaattgttatgaaagcacgtttccttaatatatacaactttcttataacaggaactaggcttatcactgtgacagttacacataaatttaatcttgatatcacccatggtttgttccatgatgattgagtttataaatgaccacaggttcttgggcttgacatttgtgctgatattattgttggtgatgagatgaaaagaggcatttctggtggccaaaagaaacgtgtgactactggtatgcctgcatcatgccattttatcaatataaataaatgatttgtaatttctccaagaaactctcaaactattcactacatgtataatcatagctattacagccgttaaatagaggatagagggccgtccatgaaatgcagcatagctatcagttattttctgaaattgcagagcttatgtttattgttcttttctgtagtagcagacctaggtaccctttggggtctagttacaaacacagagccccatggactctaattcgtcacatattttaattgatcggaagcttaatcagtatgattagttaactaggaattctaaaataaacctatggattggtttaagtgatgactctggcactgctttcctctgttatttatacattgtttctgtcatatccagcataaagaatcctgatgttaacttccttggacttcaataattggtttggctgtaggtgagatgctaactggacctgcaaaggctttgttcatggatgaaatatctactgggcttgatagcaacagcacatttcagattgtcaagtacatcagacagacggttcatgtgatgaattatacagtgatgatttcccttctccagcctccacctgagacctataatttgtttgacgacatcattttactgtcagaaggttacatagtctaccatgggc

SEQ ID NO: 195965 - DNA, 394 bp, Zea Mays
gcgcatgattcgcacagcgaacgatgtcatgcgctctctgctcttttaggcttcccttcctactcactactgggccgaagccctcaccactgctacctacctcctcaaccgtctgcccaccaaggcggttgcccaccccactccttacttcgctcttttcggcacccacccctcctacgatcatcttcgtgtcttcgggtgcacttgctacactaatctcgcctccactgctcctcatgaattagcgccccgctccactcattgtgtcttcctcagatactcccccgaccataaggggtactggtgtctcgacctcacctcacacagagtcatcatatctcgtcacgtcgtttttgacgagtaggatttccccttttcctcctcttcttccact

SEQ ID NO: 195966 - DNA, 450 bp, Zea Mays
catagttaatgtactctaacatgcctaatatactctaacaccccctgcagtcgtagcgttagcaacacgaatggatagactacaaaacaatggagatatccccccacagtcggaatgcgggtgtgaatgctgcaactggagtagcccatgcagatgatagcctttttgccgataatgtcgagatagccgagtgcaagggcgtcgagccgttgtcgaggtgtcgtgcgtcgggtagctgtggtcgatatagctgtcgagaacgccgaaaaagacaagccgggcaagtcgccggcacaagcgcaacacgtgggaaggcctgcgatgcgccaggaggtgccaaggtgacggtggcacaggagggcgccatatacaaagttggcgacacagtcgtgaaggaagtagccgttgacgaggacgatgatgtcaaatcgccgtggacgaggcctgctc

SEQ ID NO: 195967 - DNA, 341 bp, Zea Mays
ctagaactccatcaattgcactaggggtgaatccaggaggtggtcatccacaaattgttgaaggggtgggtatcgatttatacatgcatatttgatgttaatcacaaatattctatttcttttctttttatcctgtctgtttcatgcttttctttagtatattcttgaacattcatgtttctttctggtaggcatattcctggggattcgatatacgtagctggcaacgtcatcttaatcttcttacatggcctgagatattaagacagtttgctttatctgctggttctggaccccaattaaagaaaaggactgtggaagattctcactatcattatgat

SEQ ID NO: 195968 - DNA, 527 bp, Zea Mays
gagcacgcagagcaagcttattgattgaaatattgatcccaatatttgggttcatgtcactcgtattgctggtgcacattttactcctagagaagaggcagtcaagaagactatggatcgaagcaatcatttggtgagcattttgagaaagttacttataatgacttagctcaatcaacatgtaacttctcagaatctaacttaattggtagaggaagatatggttcggtgtaccgagggaagctgaaggaaatggaagtggcagtaaaggtttttgacctggagatgagaggagcagaaagaagcttcttgtcagagtgtgaagcattgagaagcattcaacaccggaatcttatccccatcataactgcttgctcaatagtaggtactttcaaagctttaatttttgagttcatgtctaatggcaacctggacacatggctacgtcacaaaggagacgaggaggctacaaggtgtcttggcttaactcaaagaataaacatagttgttaatatagctgatgcatt

SEQ ID NO: 195969 - DNA, 560 bp, Zea Mays
gcagggagtagatctcgccggacttggaccgctggacgtcgacgccgaggggcatggctgcacgcttgaaggtaagatgggaactgttggattcacataaattccctgtgcgtatagagtgcttaggatttgagctgtgatcacggggcgcggatttgtgaagtccggcgggccaccactgtgttcaccagcgcgcggccgcagtaaagccgccgccgtgctcggttttggcggaggaggaagacgaaccggggccgtcgatctcgagattagcggttaggattagaagtggtggtgtggtggtccggaccgtaggattttaaatgagcggcgtagatcagattttgtgtaccccttcgtctcgaaggattcgggcggtcggatatgaatcatgtggttcaaatctgggtcctgctttcataaaatcgggaccgtcgattctagatccgatgggcgcggtatattaccgattcggtcatgtgtcgttcgatctgggcgctcgctctctgatcggatggccgaccatgcctggtaccccttcagccgacacgtcttacaaa

SEQ ID NO: 195970 - DNA, 719 bp, Zea Mays
gagaggtataccgcgtatcgttgtcgcagtagacgagtgtggcgcacatgaggggatgctagagcttttggagcagttgatggagccaggatgcctcggctatgctgttggccacaacacgatactcatcctcagagctagagcgggagacgacgggctgccgcttcgaggaccaggagacgaggttggtgcttaggaacacggcccagctagaggtggactggcacgtgttagggtaatcgacccaatcaacatcggtgaagacgaccaactcagaagtcagagagggccgaagaagactgtagtcgagggtcacagaggtagttaataatccccttggtagcgataagatgggactcctgcgagacatgcatgtgaaggcacacttactggaccgcgtaggcaacatcgggccaggtgaaggtgaggtgctggagagcctgatgaggcttcggtaggccgttgtatcgctgaccacgacaccttcgtcgttgtagaccttcccttgagtgtcaacaaacgtggagcagggcttgtagttggacatgttggccagctctagaatgttgatgacgtactagcgcaggtgaaggaagaggctctaggggcgtcactccatggttacctcgaggaagtgatggagagggcccaggtccttcatcgcgagctcacgttgtagggtggcgatcatgcgctggaggagggcgtcactagacaac

SEQ ID NO: 195971 - DNA, 600 bp, Zea Mays
ccgcccttgtacgtgaacgacaagcaggcgctgctgttcaagcacatgtcccggcaggcttcgaacgggacggactcgttggaggacaggtcgaagccgtagtagtcagcgtgaggctgctcaacgaaggtgaactcctttccgtcgtcggtcgtcaagaacatgggcttgcatcctctgttccagttcgtcggatcgaccatctcgtagtccggggggcatctgcatctgaggccacccaggtagtcgcagagcccgttcctcccacacagtccatgcacatagcacatctgtatgacagcctgccccgtgacgcgccacgcccccgtcgacgcgttcaagctgtacatcctgaagttgccgtcgtagccaatcgtgatcctcctcttgacccctggaccagaatccgaagcctctatcctgaacccgtcgctggatacgaaagtacccaggtcgtccaggaccgctaccctggtgctgttgaacctgttgcggccgttcttgagggcgttgtagtcggggctcggccagtagatgctggtgatctccgggccgtcgtagagcatcctcaggacgttgtcgttgtcgaagtagaggtgg

SEQ ID NO: 195972 - DNA, 466 bp, Zea Mays
atcactccaaatgagctcaagaagaacaacgtgtatcctgccaggttgcgcaccctagtattgaccttggcctcgtgatatgtgaatatggcggttgtggcgagaacaaagggctgataggtgagagtaataatccttgttggatggtacttctgcatccagaaggcaccaaatcagtaaacgtgtgcctttgtaacagcaaattaaaggtacatggatggatggaaataatagtcacgtcgacattttcataccgggaagaggtacacgtagtaatcttcaatagtaagcatcccattgaacccaaatagacatccatttccaagaagccagcagatgaaaatgccccaatactttccctgcaatcagcagttcagcaccctgcccttcagccaccaatatttagcttatgaaaaatacgaaaacctctcttcagtaagtgcaacaagtgtaaacctgagtttta

SEQ ID NO: 195973 - DNA, 1351 bp, Zea Mays
gtcgcgcggaaggtgaacgtgtccctcgccgacggcgtcaagtccgacgaggtgggcgtccgggccgaggtctacggcgccaaccagtacaccgagaagccgccgaggacgttctggatgttcctgtgggacgcctgccaggacatgacgctcctgctgctcgccttctgcgcgttcgtctccgtcgccatcgggctcgccaccgaggggtggcccagcgggatgtacgacggcctcggcatcgtgctcaccatcctcctcgtggtcatgatcaccgcggccagcgactacaaccagtcgctgcagttccgggacctggacagggagaagaagaagatcgacatgcaggtcacccgcgacggctaccgccagaaagtgtccatatatgacattgtcgtcggggatatcgtccacctgtccatcggcgaccaggtgccagcggacggcctgtacatcgacggctactcgttagtggtcgacgagtcgagcctctccggcgagagtgagccagtgcatatgtccagtgcaaaacctttcctgctcggcggtaccaaggtgcatgacgggtcggccaggatgctggtcaccgcggtcgggatgcgaactgagtggggaaacctcatggaaacgctgagccaaggcggtgaggacgagacgccgctgcaggtcaagctcaacggcgtggccaccatcatcggcaagatcggtctggtattcgcggtgctcacgttcaccgttctcatggcacggtttctcgtgggcaaggcgcacgcgcccggcgggctcttgcggtggaggggagcagatgcgctctccatactcaacttcttcgccgtcgcggtcaccatcatcgtagtcgccgtgcccgaggggctgccgctcgccgtcacgctcagcctggcgttcgccatgaagaagctcatggaggagcgcgcgctcgtgcggcacctctcggcgtgcgagaccatggggtcggcgagctgcatctgcacggacaagaccggcacgctcaccacgaaccacatggtcgtcgagaaggtctgggcgtccggggcggcgcagacggtgagcaccgccaagggcttcgacgagctcaggtcgtcggtgtcggagaacttcacgagggtgctcctggagggagtcttccactgctccggctcggaggtcgtcacgagcaaggacggaaggactagcgtcatgggcacgcccaccgagacggccatcctggagttcggcctcgaggtggagaagtacaccaaggtggagcacgcggacgccaagaagctcaaggtggagccgttcaactcggtgaagaagaccatggccgtggttatcgcgtccccgaacgcgg

SEQ ID NO: 195974 - DNA, 315 bp, Zea Mays
cagccagcctatgttgaaatgcataactgaaaccgaaggcttagagcctctctgcgaaatccacagcggaacttgtggatcacactcaagaacaagagcccatgcagccaaggtcattcgtcagagattctattggcccgccatcatatgtacggccaaccgagtaacccgatcgtgcgaagcatgccagaaattcttgccccgaacaagcgccccttcgcaactcaccaagctcattgcccacacctagccgcttcagcggtgggggcttgacattgtcggaccactacccacagctcaaggaaatctcaaatt

SEQ ID NO: 195975 - DNA, 384 bp, Zea Mays
cagagggatgctccaactcttgttaagctggaccatgttttttgcactagctgttgggaagatctatttccggacacttctcttcatagtaacgctaccacatcttcagatcattgtcctttgaccctcaaggtcagagatggctgcatggggaaaagatggtttcactttgaaagtttttggcccaaaattcctggttttctggaggtggtgggtgcgtcttggagcatgccagttgggagctcctgcccgttggagcaagtgtcattgaagcttaaaaggttacctcgcgcattgcagtcctgggggcataaagaagtgggtaatgtgaggatgcagctggggcttgtcagagaagtgttgcataggctggaaatggcgcag

SEQ ID NO: 195976 - DNA, 498 bp, Zea Mays
atgggctaacgcaagaccgtaccctatcagccaaagttagcgaaaaagcccagtccaactaaatgatactccatttcatatttttctggcctgaaacaccttcaaattccgcagcgcgaggacgaaaccctcgcaccgtttcagttttccctcccaaacttgccccaaatatctaaatccatcctccttcgcaggcgctccaactttccccttcccggcaaccaccctgtgccttcctcgctgcctcgattccgcttctgtgctcggctagggagagcggcagagtatcaggcgggtgacctctatctcgccggggcggggcggggcggtgacgctcgcaatccctcgcttgctgctgcattttcgaatactgagatggccatggagatgtccccgcggcagtcgcctccgcggacgccgcgtagggcggcgaagccgcgactgttcatcaaggagatggtcctccgcaacttcaagtcctacgcaggggagcagcgc

SEQ ID NO: 195977 - DNA, 642 bp, Zea Mays
gaaagggagaagtcatgggacacggagttatcaagcttatgtctattgtcaaaccggacactccggatggtgcgaccaaactgagtggaaacccaagcaaataagtgaaagagcgtaggaaatgtattcgcaccagggaatgagcatgtaatatttatagctagaaatgttgagaacaagggatgtacaaacatcacagtgaactagatcaaaattgcctatggatctagaagaagaggtaggaaaaggaattctaacatgacgacctagctgacaagcatgacgcagaaactcaaaagagccctgactacaaaagatgacaaagccgctagacaacttgggcatcgcatcaagcccagggtgtccaaggcggctgtgccaagtggttgatgaagtagcagcagtcatggcatgcatgatggagatcatggatgagaaggcaggcacacatagtgtgtacagtggcccgaagctgtcacatcacgcgagaagggtcctgatagcaagatccttcacaaacaaaccaaaggggtcaaattccatagaacaagagttgttagtggtaaattgatgaactggaagaacactctgaataatgttgggagcaataaggacgttcttgaggcggaaggggctagggag

SEQ ID NO: 195978 - DNA, 406 bp, Zea Mays
gaactattgcaaggctgagagcaaggatttcatggctcaaagatggggatgctaatacaaagttattccaccttcacgcccgtcatcgtaagaggaaaatttttgtggcatgtctggttgatggggaacaaatcctaatcagtcacgaggagaaagctgcctgtgtggaccaattctacaccaatctgttggggaacagtacggacagggttcaggcgattgagttagagactcttggaatgcctagttttgatctgaccgatctggaagcccctatttcagaacaggatgtctgagatgccataaaaaatcttccttcagataaggttctaggccctgatggattcacaggaaggttctacaaggcttgctggacaattattaagactgataatattatggctgc

SEQ ID NO: 195979 - DNA, 287 bp, Zea Mays
ccctcgtcaagctcatcatccggttccgcctatcggatctcgccgtgcaccgccgctgattccacccaccgctccgcacgcatttgcaccccaactcctcacagatctccccagatctacgcgctccacgcactgccattttcccgctccgattcttcccccactccagtctacgccgcgcttaatcgcccgcccgctgtttcacttccgttgaccgattcccgctcgcatttccacaccctgcgcttggttcggaattggtctcgatggagtaaagtccttgcaat

SEQ ID NO: 195980 - DNA, 393 bp, Zea Mays
cagtaagaatattggtagataaaattccatgtgcaacaaatcaaagacagtgtgtgtgccaccgtttcacaattttataagtcagcttgctgttttgagtatttggtgatatcatttgtgtaacggctcgcgtctctattacggtttggactaggaccagcacaacaccattgtggaacgtttattcaacttgttgtggctaacgtggtactagctattccttggaactactgttttagcagccacctataaatccacaattttttctacaacaccaccaggttgtgctagcagccacggttgttgttcttcttgctgtttgccagcgccacttgctttgcgtggtgagaacttgtaagagcttgatttcttgctagtgaggcagtgtttatc

SEQ ID NO: 195981 - DNA, 981 bp, Zea Mays
cgtccaaaacaattgggagagcgaggctatcaactgggccgcctttatcagcactaatagaaactcgcggaccaaggcgagacttaaccgaagcacgaacagtcaaatcatggaaaccgaaccgtctcttccgctgaacaatatctcgatcatcatcagactgatccagcaatggtggatgagaaaggattgtctcacgtaccatccgatcatccaaacatgaagccaaaacggagataggatataccagtgatcggggatacgacgaatccacctcaaaagccacaggtggttcctcaacatgcagatcaacaattgaaggcaacaatgtcggtacagggcaccatgcacgaagcttgaaaatagccctgttgttgtcctcaaatgaacttggaaggatctcatgaatcatacaaagaccaaatagaagactctccactgtttcaatcctccaaagatgagcaggaattccatgaagctctaattccataagctgaggtaaggctccaccccctgaggccgaagcatgacgagaccagcgcttgatgttcagccggagggggggacatacagagaatgcccaccagcaagcacacgatccgctagctcaacacttgaaaattgaacaatgaagttgtttgacgccaccatgcgtaagtcgagcgcatcagcctcaaggttgaaacttgagatgagcgcatccaagacatccgtcgcgcagaaagagccctctaaagcaataaccgagacaagtaaagcacgccgaagctcttcttcagcctgagagatgctcctggagcgcttgatgaaacacacctgacggacggaggcagtggcaggatcagggacaggcggcgatgaggaagaggtgggaggatcatcatgaccactgcccctccgagaactcttcctcggaccacgacgagtacgccttcttcctctgccaccagaaattccatcgacaagacgcgcagaatcctc

SEQ ID NO: 195982 - DNA, 466 bp, Zea Mays
ggcatagcactgccactatttccatatagttagaaacacgagcattctaaattctaatattcagaccgcatccacaatagaccaacacttttttttctttgagaactaactaacggaatgcaacaagtatatgtgtgcccagatttcacctcaccactgaactcctctgatcgattcagatggccactaaactccacatctcctatgttatggttgccctttctgctttagcttggatgttttgcaactaaggccagggcaagtctaatctgaagttgtgtcgctagggtgggttgtacttattagatgttgggtaagaaacctggcccaggctattatttgaaaattgcttgcagcagtaatcatgagcttaacacctgcaatcatgtatgtggctttaccattggaacgttgagcaagcaactaatgcacttgaaccatatcatatacagttgctgtcatcatg

SEQ ID NO: 195983 - DNA, 291 bp, Zea Mays
cggagttgttaataggatctgcctgtttcaatgcagctgacataaaagagcaattaaaactcaacatattcatggtcaggtgactttggatgtaaaaaatcatttgtgtggcttatatgcattagaattcagagaacataacatttcatttggagctaaatttgcttggtaggaaaacaggaggcagacagtgttacatcttggtagggttaacccaagcacataatggagttcaggtaatgagaaaaacctgacagcaattattccagttctcgtgatccatgttcatct

SEQ ID NO: 195984 - DNA, 805 bp, Zea Mays
tttcctttatgctaactacctcagttgccatttcattctgcctttgtgataaaactcagggactaccagaacttgatgtgagaataaaatggcctaatgatctctatctgaaaggattaaaagttggtggcattctatgtacctcatcttatgaacccaaagtgtacaatatttgtactggtaaaatgcatttccaatgttgcccattctaagcatttgatctctttttttttttcttttgacaaggatgggattcctttgatcttaatcaggtgttggtttgaatgttgacaatgagaagcctaccacatgcttgaatgctgcacttcaagaggcaaatcatacatcacccatattgaaacgagaagacatattggcatacttcttcaataaatttgaaaaccttttcgagatcttcatgaaccatggtactcggattccatttccccccatttttgcagtacataaccacatgctcattagaaccgtggctgttgatgtgtatgcagagctggttcctttactgacaatgcattaaatgataattttgttttgctgtagagacttactgttttcctatagctgatttagatgctgacaaaaaatgttttgaagttaactacaatttttttgaactctagtctacccctaaaaggcttttgtttgtttgttgtttttgtctagcctaccccaaatttcttgggactaaaaggctttgttgctgttggtagaattgtgtacttaacatcctcaaatttctctgcaggatttcaggttcttgaggagcaatactataactcatggc

SEQ ID NO: 195985 - DNA, 913 bp, Zea Mays
cggaaagtggtcctattcctgaatgattgctcttgcgcaaaaaaattctgcaaggaaagggctgcacttgcagtacaaagttgtcttaagagagtcacacttggggattgtgctactgatatctgcattgagtaagttaccataaatgaagtccttaaacatcactgccaccttgcccctttttttgtggattgctctgagatgctgtcttatggcggctagtaaaagccagttaaccagtttttctgaagataaactcgattctcgtttctatttgattgtttaatggtcatatcatatatccatgttccatgaaattagatgcttattcttccatgtttgagtaatcagcatttttgagctaccctatcctccgattttcctgtcagattgtgcaatgctatgcaagttggcagattagtttagcacttgcttgtttacataagcaattgggtcagacatggctacttactgaagcagcattgttatgagaaaacttagcaagctttctaatcaaagtggttaaaatgcatggtctgatcattcttaaagtgagaatagatgtaggatgctcttgtggtgcagattctgtgcttatttctttggggttaaccataaatatgttgcttgcattttcaggcatcagaagcaaataaatttagatggaacatctgaagctgccccaactcttgtaggacatattcaccttgacaaggtatactgatatatgatttatactgaatttttttgcataaactgtttctgtaaaaaaagtatgcatgatttttttgcaggggcatttagaaaggataaacattagtactcaagacattctccaaaaatgtcaagaagtttctgggagatttggaaagaagaaaggacacctttgccacatctttaaaaaaattacttt

SEQ ID NO: 195986 - DNA, 332 bp, Zea Mays
cactactcctacatgtatattttcccatactcatatgcagacatgctttccccagtctattcatgtgccatcaatattccaccactgctaccaaagtcgaaaccattaatgatgatatcgacaccgcccataaacaacatataatgagacgtcaaggagacaaagatcggtacatatgccttccttgcatataaaattgattctccaatccatctcaacaaccctagtatgtgaaggatatcttgtgacagctctctcctctaccaacctagtttcccatgctactccatcttctctgctctctatttacaccgcatcgacctcctcacctc

SEQ ID NO: 195987 - DNA, 706 bp, Zea Mays
gtcgaacaaccaagctgaatcacaatgtgtttaaatttggagtgtgtttggacagttttgattgtgcaagcagcagccaattatcagatagcaaattatttttttactctctacagcagctgtgccggaagcaccaaactgaacttggttgcacaggatgacaggaagcttcaccctaggcccaaaacagcattctacgaccaaaacaagcctctgcagttcaaactgtctcccaagttaaccaatatatgccacaatctgggtccattgagctaaaaccaaaacgagtgctgacgttgtcgacagcatgatcaatctgagtaaacaacagtcataaacttcgatgtccttgccaataccaactagccagcatatgaaacatggtcagtcccccaaaacagatgcaagcatgtcaatctcacacacattcaacatggcactcactgcggcgaccagattagcaaccctattcatctgatatctacaaacagagaaaaggtgtgatttcaacgtatggccatctgcatcatgtggaatttgtggaaggaacaaaaccacagaattttttacaagaaattatccacacccacccaggtagcaggcctaactaatgaagatctggagcaatacagagggctcaaatacatatgcagagttagcgcaccactcaatgtccctttgggctatcagaccgtgtaattacctc

SEQ ID NO: 195988 - DNA, 288 bp, Zea Mays
atttgtagttgtcgttcgtttctcaatgcgcttggttatcgatactgttatctcatggtctcagttcagctgagttcacttaactaggaccagcatgtgcagtagaaaatccctggttaattatgggtccttctaacctccgttcgttgcttgaatttctcgttatatgtggcatgttcattcaagttgtttacttacaatcacataatgcttgcggtgttacatgggacatgctaatttctttggatgttagcatgtgaacttgtgagtcagttcattgctcatttc

SEQ ID NO: 195989 - DNA, 481 bp, Zea Mays
gtcatcttttcagcgcttgtccactgcgggcctgcggcattcctttccttctcctcgaaggcgaagcaaagctaccaacgcatacaagagtgagagcagggagcacgagcgctctgagtgagtggaagacgagaggagttggagttccccagggctagggtttcattcgccacccgcgccgcccttcccttccccaggtatcggcatcgcccctcccttctccactgctccgaccctacctgtagatagatctgtctgtccatcggtttcttacgtttttttggttgccccctctctctcgtgcgccgcgctgccgttgctccatgacctccatagagaggtggtaggataatgtgcccgtggattggacgggatctcgttctgcccgcccgaccccatccgttctgctcaggcctttttacctagttgcgctgcctcctcctcctcctgtgaatcgttgatctactcgcgttcctacggc

SEQ ID NO: 195990 - DNA, 597 bp, Zea Mays
ggtcctggaagtccatggtcaagttttgaggatcaggttactgtctttgcaatattgtgggtcttattttttattggttggcaatacactaatttcctttcacaccaggctcttgttgtccttgtccatgatatgggtgaaaactgggaattggttagcgatgcccttaacagcatcatccaattgaaggtaacattttattgaggataactgttttaatttgttatcagtcatttacttttctcctgaatcatcaaaatgtgccatgcaactattttgttgcaacctgttacgagttagtttatgttatttgtgttcctctttgtaaatgatttatgtatataatattccagggctttggatcttaattgttgtaaacttgcaatagtctgttgctaattgaaaaacattttatattttattacttgattcaagattttagcatcttcttcgcagtgcatatacagacggcctaatgagtgtaaggaacgccataaacttctcacggataaaagttgtggcgacggtgctgacagcgctgatgactcaggctcatctcaacactatccttctgcattgcctgggattccaaaggtt

SEQ ID NO: 195991 - DNA, 287 bp, Zea Mays
aggtaaccaaacagggacagactgtactcagtgtactgaaggggtctaaataagaggttatgtaggcaaccaagcagatcctgtgtctagatacatagcaaaagcaatgtatgtcaaaaagccaaaacgtcttataatttagaacggatggagtattacctaagtgctacctatatatatgcaaatatctgtctgactatgcactgtccacccctttgggactttttgcttttcaagttaaaagtagcaattttattgaattttaaatctaagaaattagttttgaa

SEQ ID NO: 195992 - DNA, 478 bp, Zea Mays
ctcaccatggagatgattcaccattttctgagatcgagtgaaagctggctctcattaagccaggacaactttctgctaatacatgcagaacatggtggatggccaattcttgcttttgcattggcagccttattggtttacctcaaaaggtataatgatgagaggaaagctctggaggcagtctgcaaacaggcacctgatgggttagctgagtttttttcaccactggacccagtgccttctcagctgagatatttgaagtatgtgtcaaaacggcacaaatcactagaatcatggcctcctgttgacagaatgctgaatctgaactgtataataatcaggaaggtgccaaattttgatgggcaagggggatgtagaccaatattccgcatttatggcctagatccccttgcacctaatgacaggggtactaaacttctctttttgaccccaaagacaagtgattttgtccagctct

SEQ ID NO: 195993 - DNA, 434 bp, Zea Mays
taggaaacctggtatcacaaaatgtcatttgctagcccaatgacgtcttcatccactagttgtactctaataccctcacgtgcaattacaatgcccttgacatctaggaaacgtcttttgtggtataaaaggtgatctattgttttgaattctttatattccaactttttagcaattgtacggtggaaaaaaggtgccttacaaccttaacctatatttggacagttctctcacgcaatttggctaaatttcccatggtctttattttactttgagaaatagtgtggcataatgatgtatggtgttatatttgagtggacataaacaccatctaggtatgccttgaatagaggggattattggaaacctggtatcacaaaagtcattagctagcccaataacgtcttcatccactagttgcactctaataccct

SEQ ID NO: 195994 - DNA, 617 bp, Zea Mays
gtcccgccgccaggccattccctggaaccccaccagcgcgctggactccgacgactgccccgttgattggcacggcgtgcagtgcatcggcgggcagattctttccattgcgttcgacggcattggtctcgttggaaatgctagcttgtcggtgctagcgaggatgccggtgctccggaacttgtccctgtcagacaacaagctagaagggttcttgccgggtgagctggggtcgatggcgtcgttgcagttgctggatctgtccaacaacaggttctccggttcaattccgtctgagttgactaagctggcaggtttgggctatctcaatctctcttccaatggttttcgtggcgcattgccgttgggtttccggaacttgaggaaattgaagtacttggaccttcatgacaatggcttcactggcaaattggacgacgtattcgcgcagctgcagagcccagtccatgttgatttaagctgcaaccagttctcggggtccttggcatcgatctctgacaactcatctgtggttagcacgcttcagtacttgaatgttagccacaatgtgctgtcagggacattgtttgacagtgttccgatgcctttgttcgaca

SEQ ID NO: 195995 - DNA, 318 bp, Zea Mays
gcagcagtgatagtgttgacccagatactcttcgaaggttatctgagaagttgcagcttgtcacaatatatgacctcaatcatgaatctctgaccttgcatgagatggctagtggcggtgatcctggtgcagttgttgaaaagatgtcaatgctcctcaaaaggattaaggattttgtgcagacagaagaccctgagatgggtgcccaagcaagtacagcaaccatttctacaaaagacaattcagcatgtcctgttattcccgatgatttccgttgcccaatatcactggatttaatgaaagatccagttattgttg

SEQ ID NO: 195996 - DNA, 630 bp, Zea Mays
tgcgccgcttatagataaaagtgaatctgtgaaccgttcttatctgagcaatgaatacggatcaagtataaatgaaccgagggaagcagaacctgaagtagaacagaagatcagtcctgctattgatcaatttgaatcatggcttcttaaaatgctttttgaggttctccttctcctagtacaggtattttttaagaaattgattctgagcatgatatttgtattctcttattctcaaggaaatgtgtaaggaaattaactattttctttgttgttgctctcggaaagctagcttttgcttttagtgacatttatatgtatgatattgaatctatttatttttcatgaggatgtgtttttatgctccaattcatccatgggtttttattaatttaaattaattaagttaattgattctaagcatgtttttagtcctcaaacatgagcgatgctttgataatcaatgtcatgcaactatattttcatatggtggtaatctgatgtgtgattgtttcatttacttgcttccatagatagaggagcgacaagagatcgtgtgggcctcagctttgagttgtctattttactttgtttgtgatggaggaaaaattatcaggagtagactgggag

SEQ ID NO: 195997 - DNA, 472 bp, Zea Mays
gttgcaggattatatgccaaatctgctaagtgaagacacaagagattagaatgtgcaaaatagattcctcatcttggtcacagagagtacaaacatccgagtgtggtaaacctcgcttggcaagtcggtccgtggtctagcatatgttgttgattgccatccatatgaagaaatggaagggcataagtgccagattgcattagctaccacctgagaatatcagggacattttgcagcaattccacattgtccacctaatcctagattaggatatattcaaccaacacctgaacagataggcttcccctgatatcatgcacccatgtcttgtcaaacaaagcttgggcaaccattctagtttggaaagaattaatttatgaaggtttggtgctaacttttggatccccttaccattcagccacatatctgaccagaaaagaattgagcccccatcgccaactatggaaaccac

SEQ ID NO: 195998 - DNA, 275 bp, Zea Mays
ttaattacccgatagtatagctttgaatatcttacttattcttatagatcggtaccaatgcaagttatttttagctttgcctccactcccttaggttgttgcattcacctctgaggccaccttccaatgcaagttatcatcttctccctattgtttgtgtcatcatcttccttccaagtgtcctctttgacggtcttctctttgaagacttatgttgtctccactttcaaattccaccactttattgtcgcaatcttgggttatttatcccttac

SEQ ID NO: 195999 - DNA, 362 bp, Zea Mays
ataattttgattttttttgaacaagagaaatcggttatacttggaataaaaatgtcaattataaattagactgcgataaagccggccgagaaaaatgtgagctccgtatccgtaattccgtatcattgtttctctcctgagtctcctccttatcagagaggagctggggaaagtgctccctccgcctccatccgtccgtcgtcgcccggcgaatcgatcgaagctagcaatcaaatcagaaagagcaagagaagcgcccgagtccctaggccggaaagctatggacagcgccgccaactggcggtcaacgcagggcaccgaccctgccgccggcggcgtcgatccaaacgcggctgcccccg

SEQ ID NO: 196000 - DNA, 646 bp, Zea Mays
gaaaagttagtcagcaaaccaaacatattcctaactgacatattcaaatggtggcttgtttttatgggtaatgtgtgcatctgtacgttccgctaggctgcaaggacctgatttgaatggagaacccgatcggccctaggtgagactctgtatcctgatgcttcaccatgtcgatctcacgaagcacgtacagctgcaaaccaccactcaacaagcgatggaaacactcacatcatagtgcttcgccatatcgatcttactaagcacgtacaggtgcagctgcaagactggtcgagtagtacatggtttctattcaccaagtccaagagggattttttttatacggtacaaggacgccatacactcacaccactacacacgtatacacacggcatgtccttacacaccaaattcaataccactgaatgcatattctgtacctatagaaaaatctcaggttattggtgcgtatcaaaaaaaaatatcggcttatattggattttatgactgagataatggtgataatttttttttcttttgaatatgtctaagatggtcttgtattaccaactcaaattctataactatctcgacaaaatctaagaaattatgatttgtatcattgtaaagctcttcactgcttcct

SEQ ID NO: 196001 - DNA, 297 bp, Zea Mays
ggacgagacacaacgtagtcgaagcgtgcaccagcaccttcacgccaacactcatgcctcggttagctgaaatgaaatggatcacaagtagtgtgaaaaatcatccaagatcaccaagtaatatttgtaaacagacacgctagcggcgggagatgtccacaagtcacaatgcacaagatcaaactgatgcgcggtacaagaagaagacaacgaaaatggaactcgtatgtgatgaccgagctagcaagtgcaacaaagggtaacattcgtgcccttattacaagagatagccgacga

SEQ ID NO: 196002 - DNA, 429 bp, Zea Mays
agcatagtacgtgtgcatggcgaaggctagcaccacggccggcgtggtcgtcacgctcctgtgcgtcgtcctcctcctgtcgtccgccgtgacgacgaccgaggccggcaggcatctggggacggggaggagggacgacggcgcggccgtgatggcgggggcggggcggccgctcggtaacaaggtaatacgggaggaggagatggaggcgtcgacgacggacggcgccaccggcgccgccggtgtcggcgagtccaagaggcggagccctggcggcccggatcctcagcaccactgaatcgaaacaagacactgtcggtgctgtcagccggaccgcgtgcgtgcgcgatagacctgaatgtacggttggattcgaagagctctagcttatgtgctcgtatacaaataagaagaagatgatgttgtttt

SEQ ID NO: 196003 - DNA, 407 bp, Zea Mays
atcatcttctctaattgtggattgtgctgtatgttattagctggcagatagtctggtttacttatgccagactcacgtgttaatatatactagtgagctgcagcccgtttctttttctcaggtaatcaatgcaagatggaggtgatgaagtaactattcatgccagcaattttcttcaggttaatttggatctgacaaaatatctatgtgatcaaatcagttctctcatgtgtaaactttggtattctttcaatatggcaatatatgcttgctaacctattccttattttaaattatacttctaagtgcataacaaaagttatatatatctagaaaacctaaaacaacttatagttcagaacactggtagtaaatagtaacttgggagaacaacaatttattaatag

SEQ ID NO: 196004 - DNA, 406 bp, Zea Mays
aaaaaaaagacaaataacatctcacgactcacgtgttcctttgcgtgacctcatgtgaactgggcatgttaatttcttacatatgctcattctccagttcaactctggacgctggatgatagatgcttgttaatgaataatgcaatatttatttggtgctgtttaattaaaatcctgatgtattaattatgctgctgtccttctagtcattgcaaaataaagctgcgaaacaaaacgttgatttattgaacaaagttgaaagtcttataattgagtttaaacatgtaagagacgactatgacagtttactgtcttatattgcaacatgcaacgaaatgactgaaaaatgtcattgaattagacagcgtgattaaaaaagtctctaatatttaggtatgactatgtg

SEQ ID NO: 196005 - DNA, 448 bp, Zea Mays
caacctttgacatactctctgaccaaacggctgctgtgagagttaaagaaggataaccgaagacgatagagtgtcttctgaataccctcatgtcctgctgtatgtgcattctccagtagctgtggccatagaggagatgaatcgggaacatatgctttgccctgaaataacagcagtccatccacctctgtccaccctgctggtgcagtgccactggctaactgggcccgaatttcttgtgctcttggatcagcaaggagttcttgacgaattgcgtcaaaaactgcaaaggatgttgtcgatagggcatgaatactgaaggcctcctcatcccgacgagataaggcatctgctgctgcattttgcttccctgggcggtacaccacatccagatcataaccaaatagcttcgtgacccaagtgtgctgtggaatagtggtcagacgtt

SEQ ID NO: 196006 - DNA, 361 bp, Zea Mays
tgctattaagatctccatcatgatcgtgacaaaggtaagagctgtggttgagaagagcttgaactttgtcgtggttcagtttgatttttaactttttcgtgcagaatactcgagtggagccgtgagggtggggtgggctctgagaaaggcagaactccagagggcaaaagtgacatttcgcatggggttgtgtggtccgtatccttgaccatggcttcaacgtttgtcgtctcgtacactttcccctctctccgggggcggcgggcaccgcattgacggacctcaccctgttgtgctgccccgatcacctcgtcgactgcacggcccccttttgccaccggcgtttgtcactcaacacatt

SEQ ID NO: 196007 - DNA, 443 bp, Zea Mays
aggcgactagctgctccatggaggagaaggcatacatgcaggaggcaatggcagccttgcgagtggctaaggaggtgcttgggatgcaggaggggtggaggaaggaggcaattagggagatgaacagaactgggcgattctcgcgctcattggccaattcggctactgactggccgtgcctgttgctggatgttctgtcacgtgcggcagaggaggaattcttccaggtagatctgatgttatttcagttgggtttgtggtggctttgtggcagggttagtgtaacttgacattattgtcttgatgctgctgtcgtttttgtacagccaaagctgatcctgaacaatgtggatgtgttgaggaaggcaatttgtgaggatgagacgatggtgcctgcagcgatgtaccatgatagcttcatttggagggtgattgcacttggc

SEQ ID NO: 196008 - DNA, 420 bp, Zea Mays
gacatttttgaagatctcattggaagccttcttgagacatcttctgaagaaagtgttttcaattctcagccatgccgtgataatatcttgtatcttttaaatcttagtcatgaactctttgttgaccaaattggaattaaactcttggtatgtctgagtgatacttggtaccaaactgatttttttccagctgtggtcctcattcactcatcctacccttttctttgcagtttccttcacctgacatgtctgcacatttgtcatctgatgacatcaactcggcagttctagaaattatgaatactgagggcaatggtctgcttacaaggtaatataacagtaatgtagcctcacaaattgctacttctgaccaaaacatctaggtttgtcctaagtcaatcttttttgaactttgaccac

SEQ ID NO: 196009 - DNA, 622 bp, Zea Mays
cagcagcatcgtcagaacaaccaaccaggagggaatcagtatcgacgtcagaacaaccagttagctcgccttcctgccccagcagccaactagaacaaccaagcagccccagtgcaagtaggaggccacgcatgcttctattgtaaggaacaaaaccactgggtgaagcactatccgaagaaggcaactcagcagtcaccagtagtcaatgccctagcaagacaaggagcaccacatcaagcactaggaggccatggtcaggcttacaaccttggaaaggtaaaccacttggaggccgaatcaatctaggatgctcaagacatggcagtcggtatgtttccagttgaatcctatcaagcaaaagtattatttgacactggtgccacagattcttttgtttctacatcttgggtagaagcacataacatccccatagaatcaatgtttccacctttaagagttaattcagttgggggaaagttcagtttgataggatttgtccgaatctaaggattgaattaagggggatagacttccccgctaacctagtagtaatgggtactcaagggttagatgtcatcctagggatgaattggctatataagaaccaagccaccgtcag

SEQ ID NO: 196010 - DNA, 397 bp, Zea Mays
gaaggtctaacccatccccgttggttcctgagccatctgtttaggatcttcaagctccgatgcccgccgaggatcaagccccccttctgtcccaggttgaagatgatgcgtccacccctcgtggttgcgtgctggagcgatcggttgcgcttgacagagaggagttcagactgcagcgctgtgccttgtttgtcgtggtcaccggttcgcggcctcaggtgactttggaagttttcgcagcagaggttgcggctgggtttggtttgaatgaaggctccttctcagtgcaccgttcttccccagaagattttgtcttggttctggactctgagcacgcagcaaatgaggtgtacaacaatggttcggtgttcaattctccctttggttcgttcaagtt

SEQ ID NO: 196011 - DNA, 349 bp, Zea Mays
aactgtattgcgtctccagatcgaaagagccttggccgtgcgagtcatcttcacatgaaggcgaaggattgcatcatcagagttaactgtagaattccatgcttgatggactacctcattgaacccctcaatctgtggccagaacgattcgaatctgaacccccggtagaatttgaccgtagagtggccttgtattaacagtgggcagtggtccgacgtcatggtgcacatggagagtagatcagctgcggggtacagatcatgccattcagttgtcgcgaagaatctgtcaatcctagtcatggtagggttagcttgttcatttgaccaggtaaatgctctatcggtg

SEQ ID NO: 196012 - DNA, 1343 bp, Zea Mays
gacagaagagatgatgaaagagaaggagatgtctatgttgattctaacggcataaaaattagaattttgtccaagtgtaatgatgtacctttggtgttgagggatgaccttggttcgaggaaagttgcgaagcatggaactggaaaaggtatactgatgagcaaaaagatgctgaagtcaaagcttttgaagaataagaagctcaagatgcatggaaagaagtacaacaagacaagccctttgaactcccaggtagtgtctttaactcactctacatgttatttgtcactgtgactccagtaccgtgtttatcgattggcgtaatgcgatcttggaccattagtacatggagagcatacccattatttatcagaccttagaccacactttataatgtctgcactgatgcagcttttgtttcatgaatgaatgtgctatgtactacacatcattttaactccatgtgtcataaaagatttgtaagaacagatgttaagcttggattatgtttagctttgtaacttatttctttgtgaaagtatgaatgtggaccataatcagatgttaggcttgaattgtgtcaggtttcgcagtcatgggttagtttatgcttgatattcatcaccatatcaatgttcttctatggagatgcaagggtaaaggcaacttgtgtatattaaatatagagctcatttcttaattattgctgagtcattcgtttcctagaagataacagtgattatggcattttaccgaaaaacacttttaagccctaggaactgagccgtagctcagtggtaaaagctctctgtacgagctggtcagtcttaggtttgattcctatcgttcccaggatttcctaccattcaggtggggggcctctctccccccaatgacagtaaaaaaacacttttaagccctggagagaacaatctttaaatttaatttttgtgaacctgtgttagttttccatgggttagtttacgctaggttttacagttgccatgttttttggtggatgtcaggatcatctcatatgataacagtttgttctgtggttgaccttaaaaaatgttttatcccttaattttgcacctttgacttatttctatgggatacacacaggttcaagcatatccacatgatgatattaacgaggaaacctccgaggaggagtggcatgcgcggaatccttttgaaagcaccagcaattgttgttccaggactatgcagcagtgggtgtgctccaaacgctcagatatcgccaagagtttaagcagaaaccatagtggtaaagcatttgataaagtgatacctggagcacagaaatcggataggaacaa

SEQ ID NO: 196013 - DNA, 369 bp, Zea Mays
tcgtgcaccactactgtgttaattgtcttcactgtgtcataactactatgtacatcatattgcccctattgtcaatgacacctcataaagtgataatgccattttgaatgttctgcagctctgggaagtgtcaaatagtacactggaggcaaggacataaggaaacatgccaaaaatggcttggtagtggttctagcagctttggtggatctagcactgaggctactgaacagatgccgttcttggctaacttgaattcacctcttccaggtggtgacattcacttgcgtgacatgaacttcgatactttatcagaaccatcctttcccacaactgatggttacaatctagatactgacccatttccgg

SEQ ID NO: 196014 - DNA, 318 bp, Zea Mays
cgcgtttgtacgtggaggagttctgcagcacaatcaaaccatgggggatcggagatgacggaattgctcatcgtagctaaatcgccaccgccaagccgctatccatcgccgccagcaatccatgtcgtctctagacaccggtaagcattccctctggttttgccatgctgcccgcttcatgcagcactgtccggagttttgggtagagcactagagaaactggtatgctctgcgcaggcgatggacctccatgggggagcctcggcgcatgcccctgctagcgtgtcgttcccagcccctgcacctgtagaggcccgg

SEQ ID NO: 196015 - DNA, 335 bp, Zea Mays
gtgattgtaagatcattacaaatgaaatatataatagttacacaattgtacgtgtttgcctcaattcagtgtgtgccaataatctgtgacttttcttttaaacaaaaaaatcatcatcatttgcgtctcgtgatgagtccacaggtgctacatatccatcatcaatgtatgtgttgtcttcttcatcctcctcatctgctaacccaatatcatacgtttcttctataaattcatcaagcgctttctcaatgacacaagcatcaccagttacaccttccatgtcagaccttctccacttcaccaatacttcatcactgcttgaaacactcatgcct

SEQ ID NO: 196016 - DNA, 734 bp, Zea Mays
ttctccttcgcttttttgttgaggatactggttttccaagtaaggttctatcataatcatatattaattacaactatttgagtatttgacaactctcattagattttatgcatgacgatatctttgtttatgtacatagagggttgggtggtcgtaatggagatcattcctggattttcattgtaccgaggattatacgagtttggtcaatacgcatctgctggaaactcaatggggaccactggtatgaaatggagtaatctagatgactctcttaatggaatgcgtgttgtcttgattattatggttgtggaatgggcaatagttctccccttggcattttatgtggatcaagtctcgccactggggggtggattcaggaaaaatccctttttcttcttgggctgctttaagaagagtcctctatcattgcggagatatagctttgggagacaaggatctaaagtagtcgttgaaatggacaatcctgatgctgttcaagaagtaagttactctcttacattatctctcgatgatattttcggtatttcttattttctaaattatgttcagagggaggtggttgaacaacttctgctggaacccattgcaaaccaagcgatcctctctgataacctcaaaaaggtttaccatggtaaagatggaaaccctgacaaacttgctgtccgagggttgtctcttgccataccaaaaggccagtgttttggaatgct

SEQ ID NO: 196017 - DNA, 357 bp, Zea Mays
gtttgcaatctgcccttgagtcctacagacacgacaatacaagaatcgaggaagaaaacacataccttcgatctatcttgagttgggtgtcgtgcagtgagccccagttgggcatgatggtcaggcagttcaagaggggaactggcggaccggggttaggctttgctactgaggatgggagtgtcactcgctttgggaaggttggtgagtgcagtggtttgacaccttcagagaaaccttcatccactcccaagcttatcaaaaccacctttgctaagcctgtcacccttgtgagagatggtgtgattgatgaacctatgagaaatcctcctcagaaacaagtgtggcttccaaaac

SEQ ID NO: 196018 - DNA, 352 bp, Zea Mays
catccttatctagcaattaaagatgaggaagatatacccatggaagctgcacgaggagaagtagcagaaatggaacaaattagtacttctgcaaagggaggtgccgaggagcatggggacttttctgaacttgatcacatgggccgagcagatgctaaattgcatttacacttaaattctgaagtgcctgagaaaattgatgaaatagagtgtaaagaagtcgctggcactatgagactaactgggagatattctgatcagaagcttggagatgtgcctgaagttgggtacacagaagatgaaaacattagggggctggtagtgaacacaagtgataggaaaccttcagaag

SEQ ID NO: 196019 - DNA, 330 bp, Zea Mays
tgggcgactcaaccccgatagattgggcaaatgatataagcaacaacaggtgagaaccaatgttaatggagggcgacagggtaggtcatcaagaggtgtcttttggttacacatgcaacatggcccacatgtgggctcaccatgcggattagacaaatctcgtcgacgcgggagggagcggtagtgtagactgtagagacgacatggatcggcggtggggcaggttggcgactgtggaggacgccgaagcgcatggttggggcgtgacctggctcggccgccaacatgacagcacaaggacagttcacaactaagcgtggccgcaccacg

SEQ ID NO: 196020 - DNA, 1139 bp, Zea Mays
gcagttttattacaacgtccaccaaacttcgatactgcttgtgctcttgcccaattgcaggaggaggtctcagaaccgtctcggtctgagcaacgcaagtatggatctatgccggccatcaagacttatcaatcagcattgcctctacctcgccctcctcatgccgacacgtcagctgctgatcagtccaggctgactaatgctcctcgcactcggcatactgatgataagttggcatctctgaaggcctaccgtcgtgctcgagggctttgcgacaagtgtgctgagaagtgggctcctgggcatcgttgtgcacctacagtacagcttcatgtcttggaagaaatgtgggagttgatggaggcgccgtctgaaacaacacctattaatgttgagtacactgcttcaggagaattgctgtccctgtctctctcagccgtctctggtaatccctctcgccacaccttacagttgttaggggagtgccagggccatattgtggtgatgctaattgattcgggcagttcccactcgtttgtcagttccaacttggcagcgaagatgataggagttactttactaccacaacctgtcatagttcacgtagctaatgggggcaaggttccttgtacacaagtgttcaaatcagctggctggtcagtgcagggctataaatttttcacagattttcgagtatttcccctgttaacttatgatgtggtgctcggaatggactggctggaacagttctgtcccatgaagattcattggagggagaagtggttgtctcttccttaccagggccgctcaatagtgcttcagggcaaatttcagcatccacctaatcaagacctgtttcatgtggtgtatcttctgaattcagtggacaatgattcttcagaaacaccagtggatccccgcattgcatctgttttacaacagtttcagaccttgtttgaggctcctcaaggcttgccaccaactcgttcctgtgaccactctatcccactgattcaaggatctcaacctgtattcattcggccctatcgttatgccccggctgtcaaggacgagatcgaacgtcaggtagctgaaatgctctccaacggcatcattcaacacagtaacagccctttctc

SEQ ID NO: 196021 - DNA, 333 bp, Zea Mays
ctgggtgccaagcaccaagtcataccctgcaagcggtagaacaaacaggtcgacggcgaaactgaaattgttgatggtgattggggcatgccggatgacccccggacatggcaccttgtcgccgttagccaccgttgccgtgagtcgcggtcggggtaggatgggcagcccggatcgtcgcgccgcctcttcggcaatgaagttgtgggtggagccagtatcgaggagggcaatgagagttgtcgcgcccaccacgacgcggatctgcatggtcttgcccatggacacgcccgccactgcatggagggaaaagatgggcgcgtccgtctcccc

SEQ ID NO: 196022 - DNA, 345 bp, Zea Mays
tcgggcctgctgcgctaggtcattgcgaagccgaagcacccgttctcatcctcaattaaccaccgtagccggagaataaccctcttcccccaattcggtcgactgtgccgccgtaaatcgcctgctcgcgactagatgattccaggtccgtcctcgccctcgttgttcgtgtttcagcacccacatgtgcttgtgatcgttacctgcccagcccttggagcttgacttcacctaatcaaccggaacaccttgatctgagttcagtatccgcggtcaccgtggtcaggcacatcctggcccgaattagtccaaatagagcatgttctagggtcaccttgggtcggt

SEQ ID NO: 196023 - DNA, 799 bp, Zea Mays
cattttttgagcctggccttccatctggttggaggtggacctcaccgtggaaaattgaaaggttgaattttgtagataatgatggatgggcatatgctgcagattttcaaaacttgaattggccatcatcatcctggagatcttctaaatcaccacacgacttcgtgagaagaaggcgttgggtacgttctagacagcagtcgcaagaacaaagtgcagaaattcctagaaaagtacttgctactgtcagtcctcattcatctactgcgttgccttggacatcgatgattagggatatggatttatgcttgcaagttcgcccatattctgaaaaatcagaggaatcatatagctggagccagatttgttcactaggttctgagagtatacctaaacagcagcactcttcactttctaggcaaagcaccgtaaagcagtcagtggtatcatcaaggaattctgttcttaagcttgctgaactcgagaaaaaagatgtgctctcatattgccatcctcctgttagcactgaaagatatttctggtttagtgttggaattgatgcttctgttgttcatacagatttgaatgtacctgtctatgactggagaatttctttcaattcaattcttagacttgaaaataaacttccctatgaagctgagtatgctatatgggagatttccactaaaagtaatatggttgaaaagcagcatggtattgtcccttcgggtggaagtgtatttatctattcagcagatatacggaaaccaatttatcttacattgtttctccaaaacgg

SEQ ID NO: 196024 - DNA, 742 bp, Zea Mays
gttgaattagaaggcctcggtggtggtggaactatagagatagaggtacaatccttagcattttattttcctgatcatcaaatgcaaaggtgcatcctctaacacatccttgcctcagctgagggtcagcaaaatgcttacttttgttttcgttttttttaaaaaatagtatgcagttcttatagaagcaatagcagtggaacaattttcatattaggaagccttttggacatgaactaacagactgacctttcaactagccatgagtacagtggtaatttactcacataagaatatctagtattagagccacgttggtaaacaataggctgtattaactgcacatcgcatctgttctcgttgcccaaacaattatagaggtatataaagagtctagctaatgattctatgatagtgatattttagttgttccactatgttcaaggcttgtaatattgttgtttcattctaatcagtaaactaagtttaagtacaacatgccaggtcaaatataagagttatgacgatatcgagcgtgaaaaacaatggtggagaatacctttcgtgtctgactttcttgtgaagagcagcctgggatctgctcttaggatggttcttggatctgaaagtataaatgctagtcagtttgtgaagtctgcatttgggcaactgagttctttcacatacacctatcttccaaagccatcatcattggaaagtggagttgatgtttctaaaagtg

SEQ ID NO: 196025 - DNA, 343 bp, Zea Mays
ccgctatccaccatagcctttagaaccttagtagcttctttcatgttgttaccttggcaaagcccatgaatcaacgcattggatgttgcaatattgacacccaaacctttacccaatactaggaaccaaatttcagctgcttcttcgtgtttccctcttttgcaaagctcctggatacaagctgtcatcacagcatcatttggtttcagaaatctcgcaaccatttctcttataagccttagcaccacatccagtcttccagttccgcgaagatgccatgcaaccacactattaaacaagctgcaatgaaccgtcattccagccaacaacatctcatccaata

SEQ ID NO: 196026 - DNA, 640 bp, Zea Mays
gaaccagttcacttgctataaactcatgttctaatttccaacgttcaactggaggaaatgatgaatgggaagaagcaccgtacccaaataaagtgtcacctttggcgggcatgacgaatcgcaaacgttccacacattcaaatgcttcctcacctcctattgcctgggtagggcaacgcccacagaagatgtcacggacaagaagagcaaatgttgtttctccagtgtcaaattttgatgaagtgttatctgaaggatcaccacttgacactgccactagatcagcacctatagagtctggcagtgtcttgctgacaaagaacacatcaacaaccaaaatggatagcatcccatctcctgctgggttgtcagaaagtgagggatcggctgtggctgaaagcaagtccaaggagaaaaccatgcatagtggtgaagtggggaacgagggtgcaaatacagcccataatgcaatgggattaatatttttgtcaaataaaaataggattcctttgaaagaagagctcgaagatggtggtgttcgtcgtcaagggaggagtggaaggggtgctatgcatgtcaaggggtgttctctaatgccaaaagaaaaactggtcactgcagaaacaagaaagccaataaa

SEQ ID NO: 196027 - DNA, 337 bp, Zea Mays
ggaagattcataacatgtcatctagtttattgcattattactgaaggatttcattttgcatcccaggttttagggaggacaattgatctaagaagcataattactcagagaatgaacaaaatattcagggaaaatattgactttctacttgagcgctttgaaaatggagatctttgtggtgttgtggtaagaatgttttacttttgtttaacaatataattgctggtgctgctactttattgttttgggaccactttttttgtcttctcaaattaggaactgcaacaactgctggatattttggagcttacacaccaatcaatatcaagatttcttg

SEQ ID NO: 196028 - DNA, 383 bp, Zea Mays
cacgacggcggtgagaaccctatccgaaagatcagtgcgcaggggaggggcacggcggctagccggagtggagtccagctcaccgacggcgatgcactttcaccccgcgacgttatctacttgccacccgcacgaatccaaacaccagcgacacgaatcatggcggaggtatcgtcggcggtgagagttccgcgctggcagcctgatccaatccaggctactgtaccattgcgagtttcagtcagatgaacctgacagccaatgttgaactcgaatttcctccaaatttactgtggtgactgatttaagtctctatactaaagttatagacctatagttcatcttcaactttgccacggagctcaccataaaatagttaccga

SEQ ID NO: 196029 - DNA, 419 bp, Zea Mays
gatacaacttgaaatcggcgcagcatacttacccgactcagggtgatcactataccctactaacggagcaatcggcttaagtcggaaacaccttaagtcgggctcacgcttacacgacttagggtaatcactataccctactaacggagcaatcggcttaagacagaaatgccttaagtcggtgcgacatgctcacgcttacacgactcagggtgatcactatagcctactaatggagcaatcggcttaagttggaaacgccttaagtcagtgcgacatgctcacgcttacacgacttagggtgatcactataccctactaacgaagcaatctgcttaagtcgaaaacgccttaagtcggtgtgacatcctcacgcgtacacgactcagggtgatcactataccctactaacggagcaa

SEQ ID NO: 196030 - DNA, 318 bp, Zea Mays
tgcttccctgatggatcattgcatgccttacaagatggatgtcctatctgatgatgattgttggattttgtttaagagaagagcctttgttcctggaagggatgatcctaggatagaagtgattggaagggatatagtgaagaaatgcaatggtgtgcctttgtctgcacaagctttgggtttcatgatgcggttcaaggaaggggtggctgcatgggaagcagtgagggacagtgaaatatgggagatagaagatcagaatattatgccatctttgaagcttagttattgtctcatgccttgtcacctgaagttgtg

SEQ ID NO: 196031 - DNA, 298 bp, Zea Mays
atgttagtgatgaaaaaatattctatccagtgcatccaaatattaatacaacaggtacgtgactgaattggagatatctcatgttatagatgtagttgcagtaaactttctcgttcccacataactttactttagaataaacatggcagatactggtagtccaaaaccaagctctagtttcagatatgacggagtagcatcatctgccggtcgccatgatcgctcaggtatagtcgtgaaaaggtgtaacgaacatggtaccgatttaatgttcactggtacgcggcttctctccttt

SEQ ID NO: 196032 - DNA, 388 bp, Zea Mays
cacgaaccggaccaaggttgtcctgtcggcaaggtttacaagtgaggccttccaactaggcagccagttagctatcttgtccacccactgcaagaggtccctcctccccaacttcttatcagaaacaggcagccccaaatagttgcatggaaaagaagccggagtgcactgcaaaatgttagagctgtcctgaacagtctgagcatcacaactgatagggatagtgtagcttttgtgcaaattcacaactaaacctgaggcctctccaaagcaatccaggatcatcttgacacaaactagatcttctgtaggcttgacaaaaagaaccacatcatctgcataaatggagagcctagatttcacgttcctgatggccaaatcatgcagc

SEQ ID NO: 196033 - DNA, 290 bp, Zea Mays
atcgggtacacgtcgctgatagacgaataggatcggcgaagcgcggtgtggccgcgcatggcgcggtgggggcctctgtggcctcgcgtggcacaggagatcagggtcgcgggtgtcacggtaggaggctctggggccacatgtggcacattaagtggcaaacctacaggaggaaagtgagaaggtggcgctatcgaaggaaccacatggccaagaacaagaagggaatccaactcattgatagagatgggctaagaggtgaaggggaagtgcgactcgtcgaagatgac

SEQ ID NO: 196034 - DNA, 288 bp, Zea Mays
ttcttatgaagccgtacaactcttttttcctacaatggtaacctaatgattatctgagcacagtacttattactacaatggtatatatgtgctataggtatcacaagtaataccaatggtcacatcaattagaaatccttacacatatcgaactcaataacctggtgtgccctcgcccaatgtatacgagcaatgcaaaggacgagagcctaattgataagcaactaacaattatttctggagtgggatgtacgcactacatccgtagtggaaataagattaggtcat

SEQ ID NO: 196035 - DNA, 2212 bp, Zea Mays
tgatctagaggcaaaggtgaaatcgagaaaggtagatacaaatgagtacaaaactgtgattttgcaagcattgaatatcagaaaccagtcatatttttagcgctgacaatcttcatagttgttcacatatgtgcacttcttattggtgaaccattttaggctatgtgagatgattgctttgtatagtgaccaaagtgcatgccattttgaggatattaaacgctacagaagtacagtactatatgttttaagttgaaaagcgaaatccttaatactcctacttgttactaacctttggaatctgagagtctgtcttgtcccttggggatgacaacaatatatagagaactcatgggccatataggcctagaatatatatgggctaatggcactgacatacttaacccccaccctccccaccctttagtaagtgaagttgatgctgctctcgactttgtgctgtagtgaagaaatctttgacttgcgattcagagggcacatattgaagagcaattgttttgtcatgacgggcttctctagatatatgctatgtcatttcggcttttctagatatacactatgaatggatacgtagtttaaaaaaccaaaatgacttacaatctggaatggagggagtaatagttaatattaaattgatgggctgcaaccatatgctgtggttgttgttgcagcttacctatttttgaatatactgcaacacagaaagcactatgtttagtttttggagtggtgatgctgatgtattcctttttgtaaatatttccgaacaaataatgttagatttttcatcaaaattactttcataagattatattttttaaaagttgtattagttttttaaaaaatatttgtttaaatcccatatcaggtatcttgccagtttgggaaaatataaaatatagtatggaccgcagtaataaaaatgttatctatctggtaggagagggagggcatgatataagacatatccatcatgtgttgtctgctgttcatggccaaattttaaaaatggccacttcgaacctcgtacaatcataagaccagatcatatgctgtattagaaagatcattaccatgtaagctcctaattgtgctgttattctatcaggccatttcaagggatggttgccatgaaatctcagccgcatctgaggtgagctatttttgttgttgttgtatgccattaactatgtatctatgggtttgttctccaataatcttgtatctacattctgcggggtaattgtaaggactacagtgttgacatttagattaaatgggatctatattttttatatccttgtctttccatgttcttctgaagcatcaatgcaccattgaatctttgcacaagtcattgccgcacccctaccctcctgtgccaagtgttactttatgcagctcattgtgtattaacttgctgattgcctgacacttggtgtcttggtcaccaataggagaatgatgaactattccagttgaaagaggagttagaaaaatacaaggaggaagcacaagcaaataagaactacatggttcaggtgcctgtctctcaccttgttgaagtccagaggatcatgctttacgtagatgtaaaaatgtttctatgcactgaaaaactaaagggaaagttaaaatgacctttaccactattagttcttaattataaagcgttattctatgtttcctcccttatctttcctgttaccgatctgagtgccctgttcataatattttaaatgagagggcggcttatttatgatgacaacaccttaattttgccttctatgaaagttgcttattcactatgtatggatctcctgaatcatgcaacatgaaatcttgtacagtacaaagaaatcgcacactcaaatgaagttgcgttgaagcaattggaatctgcacatcaggactacaaggctgaggtactaaaattttgcatatgttacattgaagactctattatgcatatgcacattgacttaaggtacttttcatgtatagaccgaggttggcaggaaagccttggaagatgagattgttaacttgagggataagttatcagaaatggagaagagttatgtcattaagtgtgaagaagctgccaatgcaattgaatctaaagagaagcacatcacttctctcatgaatgaaatttctgttttaagaacagaagtttctcagaaactgt

SEQ ID NO: 196036 - DNA, 455 bp, Zea Mays
agttcccaattccggtggtggacaagcccttggatgagctttatggcatcaagtttgtcacgaacctagatttacggtccagcaaccaccaggtcctaatgcacctacaggatgttgaaaagatggcattccgcacgcacgggcacttcgagttcgtcatcatgccattcgacctctccaacgcgctagctacgttccagatgttcatgaatgacgtcctccagcccttcctccataggtttgtgcatgtattcttcaacaatatcttgatttatagcttatcatggtatgagcacttgcagcatgtgtgcctcgtctgtgtgcctcgtcttcgacaccctgcacacccacatcctcttcctcaagcagaccaagtgcaccatgttgtgccctcagtggcatatctcgaacatgtcatctccgctgacggtgtcgcaatggacagcaacaaagtg

SEQ ID NO: 196037 - DNA, 510 bp, Zea Mays
agcaccaacagatagaaagaaagaaaaaaaagtttcccagcctttgacaaacattagaaaacacagcactgtgcacacaccggcacccatttctcttatggcttgtgatgaacagtatgatcaagatcagagctgtgccattgtcatcgtagtactgtgcagcggcgaaatccaaatgttccaactttacatgggtaccgtagcagatattgctttctgatctgatgcaagtgtagtggagtcctggagtggtgaaactgacatgtgggataatagatttggtatatgtgccatgttgctaggaggcaggctcacttccacacactacatacactgtggtggccggtgggatattctgatggaatgttatggaccacaaatgatttgaatgagtatgatgtgtcggtggtcgagccaataggattttctcctttttgtttctttgtttttttcctggctgaaagcgacaggaaacaaaacaagatgtggatttgaataaatagaactgca

SEQ ID NO: 196038 - DNA, 302 bp, Zea Mays
caattatcaaaggtctcgatatggattatgaaaagattgatgtgcgcaaaaataattgtatgcttttcatgaaggagcatgtgggagagaaaaattgtctgaaatgtggacaatctagatttgtggaagttgttaatgatgagggtgacaatgtgatgacagatgttgcacataagcagcttcgttacttaccactaactcctcgagtgaaacgattgtttctatctaaaaaaccgccatgcacatgtgatggcgcaaagaaggtgtccgtgtgaacgatgagctaatggtgcacccttcag

SEQ ID NO: 196039 - DNA, 320 bp, Zea Mays
gctcccctctcgccaacttcaccttcgtcgacaacgcccgagaggtctacttcacctacaacatcttcgacgagagcacggtcatccgcaccacgctgcatgtctccggccggaaccaggtgcgcgtgtggaccgggcaggactggatgacggtgaacaaccagccagcgcaccagtgcgacgcgtacgctgtctgcggccctttcaccgtctgcacggacagcgcttccgacgcggatccttcctgcgactgcatgagggggttctccgtacggtcgccggcggagtgggcggtcaaggacaggacgggcgggtgcgtc

SEQ ID NO: 196040 - DNA, 600 bp, Zea Mays
ctaacacacgtgtctaatcactatcatccagttctaaaagagataaaggagtcaaaagaccacaacaaaaactcccctaaaatttgtgtagaataaggtcgttcttcatgttgatgtcgtgcacggttcgtatgacagttgcagtcatctcaggtgttgttctatggtctaccttactgctccgaactatgttttttctctatttttcatgtgaatgtgatggtttctgcttcaactatgcttttgttctaattttcatgtgaatgtgatggttagttcctatataatgttaaatatattcgaagtgattaacatattctcatgttccaagttttgtaggaaggagtttcattttcacactacataacttgcgaagcacgattttatctttgagtccagcaataggtacatgtaattgtggggggttttcggggcggtgtgctggtcgctgacgagtctattagtttcagtgttccctttgacacctgctcgcgacggtgttgtaaggaaatgtagagaggatttggttgagatggattattcaactcgcttcggtttgtcatctgtactttctaggcatagttcaaacgctccagtttg

SEQ ID NO: 196041 - DNA, 532 bp, Zea Mays
taccatcaccattgacaatgcttcagctaataatggcgcagtttcgtacatggcaaaggtcactaacaaatcaaagactagcatcttggaatccaagttacttcacatgaggtgtgcagcccatattgtgaacttgatagtccaagagggattgaaagagcttgacatatctatcaagcctgtctgtgcagctgttaaattcattaagagctccccttctaggattgccaaatttaagaagtgtgcggagctagagaaggtcaacaccaaggctttcttggcacttgatgttgtcacacgctggaactcaacatataatatgctcaaggtagcagtagcatacgagaaggtgtttgagaggtatgcagaagatgatccatactatgcaattgatttaaatggtgaaaaacagcctggagtgccagattctgatgattgggctagtgcagcgaagatggccgagtttcttgagcacttccacaagttgaccattcgtgtttctgccactcttcgccctacagctcacatattc

SEQ ID NO: 196042 - DNA, 492 bp, Zea Mays
cgcgctcccccgcgacagccgccatgcgccctatctccgccatgcctgcgcctcctcccccgcccgcccgagaaccaccaagtttcccttccttacacagcgaggtccaccatcaacgcccccttccctggcaagccacagccgtccacgttcctggccaccagcgacctcccttctctagcccttagcagcgagcaacacctcctccccatggctgcccccagaccccagtcccgtccgcgcatccgctcccccgtcagcgacgcacctattctcctcgacgtcgcccatggcgtggacggcgacctccctcaccctgcactctggtatgtcaccgtattgcccgcctcctttccccgcaccggcgcagccccctgttgcggcggccccttccccaaacagcacggcaccacgtgctccccctgccgcgcccgcactctccttccccaaacagcacggccccacgacgctcacactctccttccctggcga

SEQ ID NO: 196043 - DNA, 372 bp, Zea Mays
gtctacgtgaaaagtgtatttgttttatgcatgtgatcgatgattgggatagtcgaggcgaatgaggagtatgattaatcatgttagagtcactatgttgttgatgccttgtgcataacgtggggacacgtatgtgcgcgtgtgtcgtggtgtattatagtggtggtggcgtaagatatttgattgaggtgtgcgggtatatgtcgtaatatggttatactcgtgacgaagaaagatgtatgtattgtgtaacacgacgcttaggtctctattatataatcgtgtgaaggatgctcgtgatggttgtgtgattgaggagtgatgtagtggcaagcgagaagtaagtttagtttttcaacggttagtggatag

SEQ ID NO: 196044 - DNA, 517 bp, Zea Mays
gacaagggtaaaggtgataatgatgaaaagcataatccgtggacagagttaaggcaagattcacaaaatgactaagtggagaaaacaatcaaggataagataagtgaggttccaacataagagttgaagtaaaaattcattgccgaaggaagttacaaggaaacaacgagattatcacggttgtgcaaaataaaatgatcgctcatggatcattaagaaataggggtggtcaaggacatgttaactgaaatgtctaagtaggcagtagaaatttagaggcaagtatttgaaacaagagtattaaagggatacaagcatgtcaataccaaagaactagagttcgccagatggtaacaacttaatgacgaaagaggaaagaatcccaaaaagacaagaaggttatggtcagggggcatctacaaagatgttgcaagcacaagagtgagatcagatctaatagattgagagaagtatagaccatactagaataaaatacttttggcaaggggcatatagg

SEQ ID NO: 196045 - DNA, 358 bp, Zea Mays
ctagtcggcatcagagtatgcaattaactcagcctgagaagaagggcgcaactgaagacccaaatgcagagtgccacgaacataacggagaatgcgcttcaaggcggcaaggtgaggctcgcgaggatcatgcatgtgaagacaaatctgttgcacaacataggctatgtttggtcgggtaaaagtgaggtaatgtagagctccagctaagctgcggaaatccgatggattagaaacaggagcaccagtagctacagaaacctttgggtttgtgtcgacaggtgtagaacagggcttgcaatctgccataccagcccgatccagaatatccagcatatattgacgttgcgaaaggaag

SEQ ID NO: 196046 - DNA, 407 bp, Zea Mays
cgggggagtacgcatcggctgggggctttcactggtgctcggtgatggttggctggggagctcggcctcgccgccggacgtgagtacgggagagagaagaggagcagtgggctgctgccgccatggacccttgtcgatggtgtccgcttgtgtgtgagggagctgtcgctcgtgccaccgtgggaaacactgccccattcctgatgaactattcgttggagtcctcggaccaccaccaaaccgcctcctgccatgattgttggtctccgcgacgtgatctccggtaataccctgaccagcgtgtccattcgattccccgctttgttttaagtcggattagattcccggtagtgcaccattcggggcggatcgacacacaccggtggcgccgccgccgtgaaggttcg

SEQ ID NO: 196047 - DNA, 603 bp, Zea Mays
gctaaattgaccatggatggtttggagcagctgttttttcttcttctgccttgacatgcagcaaatgttgcgatttaagtgaccttgtaccaaaaattggaatatagttgtcactaatatttttttcctagactttcatcattctccttggaaaataagaagtggagttttattgctacatttattgagtagtctcttttttgggggtagggtggggtcttagattcttgttattgctttcatcctttgcctatatatttgttcaattgccaggtgttgctacattttgttaggaagttaagatgtcctattagttcattgactattgttgcattgaatatggcaatgacactgccaccgttaaaaatgactgtcctgtttctcctagcatggcaactgatcacctagatctagattcttgggtacactcaaagtttaatattatttcctaccaactagttgacctattaggtaagttagagcatctgataccatcaccgtcactgggtattttactttaatcctatgtataagtggagcactcctttcaatggtcaatcaaacgaaaaattgaaaataaatacatgaacttgagaaactgcg

SEQ ID NO: 196048 - DNA, 389 bp, Zea Mays
ctcaagttgaaacttgtacatattgagctactcgccctaacagtgccctcattctgccttcttgagaaatttgcaccaccacataagctgacgtagaagctggtcacattcaacgacagctgctggaggcttcccttgcccccacccttggggtaactcgcatgccaaggcataggacaccacatgacgtagaagttggtcacattcaacgacagatgctggaggcttcccttgcccccacccttggggtaactcgcatgccaaggcgtaggacaccacatacaccaactctcatggcaattgcaatagcccccataacacctacactagcccctgaggtacatgttgcctcgaccctcaaagcacacgacatatcagtcccaggagaa

SEQ ID NO: 196049 - DNA, 944 bp, Zea Mays
ctactaacccgactcgttccaaaacttggaaaggacctgcatactttggtgccagcttgttgtgtgctttgtcaaccagggagcgcattggcctatgtaggagtcgaagccagacccagtctcctacctcaaaagtcacttcccggtgatggttgtcataccaacgcttggcatgctcttgtgcttgaagaaggcggtcccgcacctctgccaggaaattgtctcggtcttgtagcaggtcttccacggtttgggattgcgccgtgccctgttggtatggtaccagtgccggaggctcacgtccgtataccaatttgaatggtgtagtctgcagcgctgagtggaaggatgtattatagcaatattccgcccatggaagccagtccagacaggaacgaggtcgatctcctgtgatgcatcgcaagtacatagcaattgtgcgattgacgacttccgattgaccatctgtttgggggtggcacgcagtgcttaaccggagtttgctgccagtcagcttgaataagtccttccatagatggctagtgaagactgggtcccgatcactcacaatagatgagggaatgccatgaagacgaacaatttccgcaaagaagatcctggcaacagaagctgcggtgtaggggtgactgagtgcaatgaaatgggcgtatttggagaatcgatccactactgtcaggatcacagattttccatgaactcgtggcaatccttcaacaaagtccattgagatatctgcccacacctgtgagggaatgtccaatggctgtaagaggcctgctgggtgcagatgctctgttttgttgcgttgacatgttgtacaagacttaacaaactctcgaactcgagctttgtcccgtgggatatagaaatcagcccttagtctggtaagtgttttctgaatcccttcatggcctgcattatgg

SEQ ID NO: 196050 - DNA, 504 bp, Zea Mays
ttggaggtgagtggtaaataaaatgccatgtcaatgactcatgtgttagtgacacatgattaagggattttcgtaaggatggcaaatagttaaatccccattatccacactacaaacaatgtcattcgctccttccttttccagaccagtgttcctcctacgttttggctgcaacacttagcactcccacctacctttgaattgccttgattgtcacacaaatcgtcttatcatctcttgtcatgtggtcttcgatgaattcttctctcattcgagcgacttttgatttccggaaggatttcactaatcttgtgtcagttccctttgcaccatcaccatgtttgttgcttgtaggggcattccttaccgcacgccatgtgcagcttttggcgccacagacacgtgcaacacctagtgccctggactcaccacccctaatgcatatgttggtcagattgcaaccgccttggctccctagtctgcgttcgcgctaggtcggtggga

SEQ ID NO: 196051 - DNA, 301 bp, Zea Mays
gaggattgaacccgatggaactgtgcgtccgcgccggcatggtcctggatggactcctgcaacacctaacgtttccatatgatgcagagacgcggtgctcattggcctgcactctgctggggcagctcctcggccatgatcagcgcgcggatggaccaagacattggtgtagtggcgtcagtgtcgagttataccattgttattaccaggaccagcaccagcctatcttaaacgatcagcagtgatgaagacgaataatagtgctgataccactgtgtgtaccatctatatatgttcaggg

SEQ ID NO: 196052 - DNA, 591 bp, Zea Mays
ccaacctctgtttaacaaggcttcttcatttggctagcctctattaatcattgttggacgactgatcgtctagcccgtagaggtttgggccacccccagtgttgcttactttgtgataagcaggaagagacggtgcaacacttgttggtgtcttgtgtttttgcaagggaggtctggttcagaagtttgggcagaatgaggttgcagcactcggcgcccattcctgattctgctgtgttccaggattggtggagagaatctgaggaattggtgcctaagccacaaaagtaaggattcaattccttggtgattttagtggcttggcaaatttggaaacataggaacacttgtgtttttgaagctgcttctccgtatatcagcaagattttgcatgatattcatgatgaagctgttttgtggggtatggctgggggtaggggcctatgaggccagtaaccatccctctccttcctgaggtctagtgtgtttggattggttgtgtgtgtctgatggattgtttcagttttctgtgtttttgccctccgtaaggaaacccatgtatttgcctatttggtcttcttagaccttttc

SEQ ID NO: 196053 - DNA, 388 bp, Zea Mays
cggcgccaacggcttcacggggcccatcccggcgagccttcccgagtgcaggggcatggccgcgctcaacctgggccggaacaaactcaccggcgagataccggcgtcgttcgccaacttctccgcgctgtccttcctctcgctcaccggcaacagcttctccaacgtctcgtcggcgctgcagacgctgcagggcctccctaacctgaccagcctggtgctcaccaggaacttccacggcggcgaggagatgccgtcggacgacgccggcatcgcgggtttcccaagcatccaggttctggtcattgctaactgcgagcttcacgggacaattccgtcgtggatcgccggcctccggaaactgagagtgctggacctgtcatggaac

SEQ ID NO: 196054 - DNA, 3632 bp, Zea Mays
agaaccaagggaggcactgcaacaaggtacggcgcctacttgctgctatctttgcacaccgttcttcttgacgatgcgtttgagactcgtcgttcttgagctcggtcgtattggttttcggtacagcgagttctaggatcgatccatcgggttaattgactcacgcgtttttcactagactagattgatgttcatacgttcctttcacttcattttccccgttaacatcacgaaacattacgtatatatgcaaggaattttcaaaccaaaattcagataggcgaccggttgcgctccttttctctttagttactatgctatgaagtgcagcaatatacccccttcattctatactactagttacctatatattatataggtaaaccttatttaaactatcatataattcatgctatcgctacgattctagagaggaaaggagagagatcgatgatgacggtggcacgagtgagggaagggagagggggtgggggcggtagggtcatgaggggaggctagggcggtaggatcgtgggatgagggaaagtgacgagggatgatctaaataatattgttgaatgtatttgagtaagagagatatagttatatagcaatctaaaccgttgattttcatgatgtgttaaatctgagtgcgatttgtttggtggatttagtggaggttatgggtgtgggggtgatttggttgggtacttgggtgggttttgtaaagtttaaataggtggattatatagtaatatagaataagatagtgttccaaatctttactatgatatgtactccatttaaactaatcgtgtagccgatctcaagcttctaccatataacttgcataaatatttcatatggcaaatgagaaaccataattctacccgcaccgtcttccatgagatggctcgaccggcaccaaaccctacacactgccacctcttcccatccccacactactaccaccatactaagtagccgaaagtcccgaacgacatgtgaggatagtggtattgaagtcctcgcgtccttgtgactttaggctctcgtgggcgtagcgggtgtcaggtggtggtgctaggaggggtgcccaccagctccgacgtctctcctctccttattcaatcaactacagtctcgaattaaacctaactaatctaaacttaccaaatcaaaaaccaatgtacctcaatcgatgacaaccctattatgctaattgtagccctgcctgcattggctatggtcttgcttgcatcattgtttgcctgtgcgggcatatcactagtgtacaggtatacatattcaagtggaccaccactggacttgtgtcgtcctggcccattgtccaccatggtcgtgccgacccggtccaatcactatgttatgattgggcgttaggtgtggcacggtccgattttattttttcccctattttactcttgtttgttcttacatttatgtaccgtttgtttttctgattgttttgtgaaaactaaaagtatataattgttacgatggattaggtttaaaaatgcatagtttatggatttagagtaacacgcatgctataaacacacgaagtcagttttttcgcatattaacaaatctatggatagagaaattaatccataatatagagtaaagacttatctagatttcgaattctttgcttacttgaaattcgggtagggtgtatagtatgtacttggttgtcatggtaacagctagtttccagattagatgattgtgttttttttttcaccttttgatctgatttgtcatacatcactatgcactatgcagtagactgtctcgtgggtaaacattagaataccgattttatttgtagttcagtattgatctctctacctaaaaaaatatttcttgttttttgaggaataaaaatatttaatcaaaactgtagaaaaagtgctacataatacaaaaataataccattaatgtatttttacaataaatagatgttaatattataattttggtcaaacttgagcttgtttgaccagcacgaatcctataattacattcttttgaataaggtggtaattccgggagacttcaaataaacttgtcagtaaaccttgtttgatagcagcaactctgtaatcagtaactttttaactcttctgtttcagaatatgtttgatagctacacttcgtagaggaagaagtatccgggaagaatggatgagaccggggatgctcctctgaggtcctgcatgttccttgtcggtgacgagaaagagcggcttataattgaagcaaccaataagatctcttttgaagatgcaaagcttgatgagatggccatcgcagaaaactacaacctttgcaaaattgttgcctcaaaggagaagatgatcaaagagctgaaagaatcaaaagcgcattcagaccaggagttgaccgatgcaactgcaaggcttgaattttcacaaaaacaatgcgcctccctcagatatgaggtgcgcatgcttcaggaggagcttgagattcggagcaaagagcgagagtacgacctcaaatcaatggatgctggtcggaagaagcagcaggagagcatgaagaagataactgcactagaagcagaatgccagaggctacgggccatggtccagaagcgtctgccaggccctgcggcgttggcaaagatgaaagatgaggtcaagcgacacggttctagttctgctgagaatggaacaagaaagccacgtgcaggtgcaggtgcagcagcgcagccacagcagtcgaagcattccatgtctgaaggtcaccttgtcaagctgcaggaactgggcgatgaaaacagacagctcaggcagttgttggcccagaaggagagcgacctgcagtttgtgttgtccaagtacgcagacgcatgcaagctgtcaatactgcaaatgcagcatgaagaattgtatggtagtcatggtttaacagagaatatccatccaaaaccaatggtgagcgcatttgccaagccggagcactccatgtctgggaagcaactggtgtctaaggttaggagcaggagcagaagaatcacaggatctgacatgcaattgcttgttcatcctctggatattgagaaactagagagggcatccagaccttcaagtgccccacatcagtctgtggatgcatttgatacggactcaaaaatgactgattcagacacatttcacagagatgtcacccccgatggtttatctgacaagtgtcccgaatggatccaggacgttttgaatgtaatcatacacaagcatcaaagcagtaagataagcattgctgtcattattgatcaagtaacacatgcactgaagaatgtgatatctcccaaaggagatgatggtgcaaacttttcctatggcagcgcagagatagaaaagatggtggctactctgataggaagagtaagcagcatggctgaaagatctagcaaagacaatgttatgagttcccgatcactctctcatgaaaagtctgaactcactttgcgactcgagcatctagttcatgtctgcagtgacgtactagatggaaaggctaaccatgaaaggctcactgatgaagtttgcttgatcctagagtggatggtgagacgatg

SEQ ID NO: 196055 - DNA, 452 bp, Zea Mays
gcttcttctcattatgcataaaagagtagtgatttgttttaccatgatgcacggtgtccttatcaaattgccatggtctaccaaataacatagagcaagcttgcataggtaccacatcacaatcaatataatcatggtatgaaccaattgtaaattccacacggaccatacgtgttaccttaagctcaccactgtcgttgaaccattggatgtagtaggggtgtggatgtggaagcgtttttagcccaagcttctctaccatggtggtgcttgctaagttgttgcagcttcctccatcaattataatacgacaagatcgttccaaaactacacatttagtttggaacaaattgtgtcgctggttttgttcagctttaataatttgggcactcaagacacgtcttacaacgaggctctcatagtgttcagcatgttcagccccaatatgctct

SEQ ID NO: 196056 - DNA, 297 bp, Zea Mays
ctgaccggcccatcgccatcgccatagcatcgggggtcgagcagctcggcgaaatgacgcagctgggctgaggagagcggtcgatcgagagatcatccatcggggtcagggactcagggtgtgagcgagggtgtaggtagggtgggtaaagatggacaagatggagagctacctgaacgagaacttcgggggcgtcaaggcgaagcactcgtcggacgaggcgctggggcgatggcggagcgtcgtcggcgtcgtcaagaaccccaccaggcggttccgcttcaccgccaacctggg

SEQ ID NO: 196057 - DNA, 478 bp, Zea Mays
tcactataaacaccttacacataattgctttaggaacttattagtttactcgaaaacatctattcaagtcataaacacaagcatacactcatttgtgaagcacaatttaaggaacgcctaacgtgtaaagactcgacttataattatagaggaagtgatgactacttacggcatgtcatcacctctctacataagccaaaacaatttctactatcgaccaagtgttctaagtattaaacacactgtcactttccacgcgcaaatcaacctcaacttaacattagtgacaccgatggatttttactaaacgcatcaggcacacaaccttgtctcgcatacaaccatgttgtggcgtgtactcgagacacttcaaccaatgtggcgcgaccactaatatatgaactccgatactcatgttttaataattcatcctctacgcaactagcattttctaactactcgtcacatcaataaatat

SEQ ID NO: 196058 - DNA, 556 bp, Zea Mays
ctatgctacgcctacgagaatgaagctgctgtcctcagtcctgtcatgtagattgtgggcgccatgtgcgccaaaagattcggaaaccttatccggagtccgggcaacatgtctagtcgccaacaactagttgcagctgcacaacgacagtcacagtcacaaacagagaggcgacatggagccaccggagttgacccacttcttgcccgttgcattcgtggcgtgcagtgctggcctctcttcgccggtgacacttttgtcctgttgccggcggtggttgggttattgcagtggccacggcggagcacgaggttttgtctttttcagcatgtgctacgagggttgggccgttggggattgtaagcgtgtacggcagaaaggagagatccataatggacatgcgtgggcctggactttacatgtactcctacttagggagcataagtgggccacgagcccatggacaaggactcgtgattctgtcttacgttacgtatacctgcttcgatgcgtaccggaaatgattcaaacttgcgctcccttccctccaactcca

SEQ ID NO: 196059 - DNA, 287 bp, Zea Mays
gtagaattgtagacaaatttcattacaacgcatatggaactgcaacaaccaaaactccacatacatcaggacatgcattttgatacatatgattgtccaaataacgattgatacaattcaagaaccacaagcaacaaagaaataacacacttctttagtgggttaacatgagactagcatttacactgtcatgcactcgaaaactcaatgtctaggaaacaaattaaaaatgtggtcctagatttaggatttcattctttaaggtactccagtaaagcaggataatc

SEQ ID NO: 196060 - DNA, 345 bp, Zea Mays
cgaagaaatgctgtcaaccaactctgaagctcctgataagcaggatcttgatgccagtgcatctatgtccttcgatgagctactgaaggcctttggttctcgaggtgaagggaaagaaatgcctgaaaatttgtcaggtggagttgttcttgatcaagtttatgctgttgcaccgagtgatttgaacacacttcttttctctccaagttcagactttctgcaatcacttgcagagattcaaggaactacaggtcttgaaattcaacagtggcgacttgaaaatgacggtgaaatcctgaggagggtggtaagctacacaaaagctcctaccaaactagttaaggc

SEQ ID NO: 196061 - DNA, 357 bp, Zea Mays
aatttcaacaacaatagcaacagcagcaacagcagcaagtaccattgcctccaccaccaccaccagttccacctcgtgataagcaccaggaatttatgagccataagccaccgaccttcgccaactcgctagatccactagatgcagatgattggttgaagtcagttgagaagatgctcaacatcgcccaatgttctgaccgggagaaagttctttatgcttctggtcgtctgacaggtcctgctgctgattggtgggattcatatactactgcccatgatgccgctgacactattacttgggcgaaattcagtacacagttcagaaactatcacattccagctggattgatgaaga

SEQ ID NO: 196062 - DNA, 373 bp, Zea Mays
gcagaatcttcagtgctgctgcgtgagaggagactacgggatattgccaagatatttggaagcctgccctcttggtttagctcatttggaattttcctaaggaatgctcgcagcaagcgaaccaaggcaggaacacatggtggccggtcccaggtggcattactgaggagaacaccaaatagctgcatatagttctgcgagagaggtggtcggctcaaattgacgagttgtgcaaatatctgaaaagcatatggccagaactctgagatgtcctcgaccaatatcctctggagcactgggaagaggctggcctcaaaagcagggagtagcgctgggtcctgctcaccagtccggccaataactgctgccagag

SEQ ID NO: 196063 - DNA, 430 bp, Zea Mays
ggacaggaaaaaaggtggtgttttagtactctcaagctgttatgtggaacgttctactcattcatatttccagaggttgaaagacagtataaacaatgtggagagcgacttctgtataggacttagcccagatggtccatgggaaagttttactgcagctttgccagtgaccgtccttccaaaatcgcttaataataaccgttttgcatttgaggtcactatgaggaatggaaagaaacatgcaaccttgagaggtcttgcagttattgccaatgatgctgacataaaacttgaagtgtctatatgtcctgtaaacatgcttgataactctatgttaaatactagattggcaagctccaccagtgttattgatgaagtatttgaaaatcagtggtaccgaccaattgcagggtggggacataacccttca

SEQ ID NO: 196064 - DNA, 590 bp, Zea Mays
aaaacgccgccctccggcatcggcaccacgcttgaggagtgcctcgccatcgccgaggacatcggggagctaccgctcattgtgcgcccggccttcactctcgggggcacgggcggtggcatcgcttacaacaaggccgagtttgaggacatctgcagggccggcctcgccgcgtcgcacactcagcaggtgctcgtcgagaagtcgctcctgggctggaaggagtacgagctggaggtcatgcgcgacatggctgacaatgtcgtcatcatctgctccatcgagaacatcgatcccatgggagtgcacacgggggactccattaccgtggctcctgcgcagacactcactgacaaggagtaccagaggctcagggactactcggtggccatcattagggagattggtgtggagtgtggtggttccaatgtgcaatttgcagtcaatcctgctgatggggaggtgatggtcatcgagatgaatcccagggtgtccaggtcgtctgcacttgcctcaaaggcgacagggttccccatagccaagatggctgcgaagctctcagtaggctacactctagatcagattcccaa

SEQ ID NO: 196065 - DNA, 497 bp, Zea Mays
actagaatcaccaaatttcttcttagggaaattaacaataggttgtgttggtcccttcaatatgtatgcccttttaatttggtcacgaatctctggagcatactcatgtataggttttctaagtgcaggatcgcttacaatctcatccaaattgatctcgttgccacctctagattgagcttgtggtgggtttggttgtgttgctattgcactttgaccttgtggtgcagacaataaacttctatcaaccaagaacctcctcattttcttctacaaatttgatagaagtacacaattaaatataatcaatctgtagacaacaattaataaagatgaaatcacaaattacaagttacagttagaaattcaaaccacaaggtgatggaggtggactggtcactgttgaaatcacaactgtgttgtctgtgtatgctgctgggatcctggcctcctggggacctgactacctgagcacttgacgcctggagccctggaca

SEQ ID NO: 196066 - DNA, 607 bp, Zea Mays
attcgcctgagttccttggaataaaagaagatttgcgatccttaagcctcacgttccttgatctgctggtgtggaagttgatcttgatcatgttcccgttcgtcgtcttcatgggtacgctccagggttccttctctgttttcttgtgttcaccttgatggctactggtgcgaattttgagtttcttaaatgtttcatggttcctttttttaaccactggggccatgtcgcaattggtgtatcatcacggcgtgtattgtgctgaattgggtgcgggtttgctatctaatatttgcgcatggttttgttgttgcgtgaaaagattggtctttgatgtgattgttgtggttagccatcagaatcaggaaatggataataatcttctgttatgtttgatgattgttagacaatttgatttggagatggggccggaaatgatagagcaggatggatggtaggaaaaggaaggggaaattcaggaattctctcaggcgtatggctatggagtgcctgtgctctggtgagcagttgaaggcgtcagatgagaccatgcggtcatctgattctacgatcacaaaggatttctcggccagtgggtactcttctc

SEQ ID NO: 196067 - DNA, 346 bp, Zea Mays
cacacacccaccagccctaaaagattacaaatctaaatgacccagggccaacttcttgatcccactggcccctttagaacaccacacagcgtactctgaagagatgcgctgtaaagccctaccaacagcaggttgcatcccattaaacacacagtcatttctatgcttccagagcccccaggcgacaatagtaatgaccgtattcaatcctttccttgattccttggaaatctgcctctttgatctgctccaccaggatagaaaacagtcatctgtgggtcgcggaaccaaagatggaagccccagcttttgaaagacagcagctcacacttgcctcgcaaagaca

SEQ ID NO: 196068 - DNA, 293 bp, Zea Mays
cacacatcctaaagtccaagcgtctggacagacagctctccaggaggtatcatttgcttctttaccatggcaattgcatgctattattccttgtctctaatggattatgctttgttttcatttttcaggttggaagtgtcataaagaatcctgaaatttctgcactagtccctattcttctgtcagctctgatggatccaaatgcccacactaaacactctcttgacatccttcttcaggtaataagacctacgatagcgtacagccgaactgttggtttccgattgcttgca

SEQ ID NO: 196069 - DNA, 317 bp, Zea Mays
tgagactttgggcatgtcagcatcagctgtcagatcggtacaggtaacctgcacctcgtgacttctgaaagaaattaccgacggtgggtactacccagtgcccatcaagctatcttgttgccggtttttgtggtctacttaggaccctttgatgataaacatacaagttggggggttcattttgaatagtactgtttcctgcaaagatctgacggcggttatatatgatgctttgtgcagttttatcaagcagatcatgtaccctgtcttaacgattaaggaaatgaaaaacaaatctttggataccttgaatattg

SEQ ID NO: 196070 - DNA, 1116 bp, Zea Mays
ctttaatttttccacagttgtaagtttagtttacaatgtccttatcattttctgtaagactaacatgtttcttatgtcattgtaaacgtgttagtcagtttcatttatctaaataacgattaaattatatagacatatagtcataactaaatattagagacttttttaatcacgctgtctaattaaatgacatttttcagtcatttcgttgcatgttgcaatataagacagtaaactgtcatagtcgtctcttacatgtttaaactcaattataagactttcaactttgttcaataaatcaatgttttgtttcgcagctttattttgcaatgactagaaggacagcagcataattaatacatcaggattttaattaaacagcaccaaataaaaattgcattgttcattaacaaacatctatcatccagcgtctaaagttgaaccggagaatgagcatatgtaagaaattaacatgcccagttcacatgaggtcacgcagaggatcacgtgagtcgtgagatgttatttgtctttttttctccttccaaaaaatggtatttatgcattcttccgagtttgaatcgacacatccacgaggatggtaacagaagatacgcaggcaacggtataatgttctaactgaagcacaacatctagggacgagttgaactgggcatgttaatttctgtcgtatactcattctctatttcaactctatacgttaaatgatagatgacagataatgaaaaatgcaatccttatttggtattgtttaattagaatattataatgtcttaattatgttattgtccttttagtcttttcaaaatgaagctgtgaaacgaaacgtcgatttattaaaaaagttgaaagtcttaaaattgagcttcaacatgtaagggacgaccgtgacagtttactgtcttatattggaacatgcaaaaaaaataactgaaaaatatgtcattgaattagactgcgccatgaaaaatgtctctaccattaaggtatgactatatgtttagataacttgatcgttatctagataaattaaactggctaacacgtttaaatgacatcgaaaacatgttggtattagagaaagatcataagaac

SEQ ID NO: 196071 - DNA, 584 bp, Zea Mays
acacgactcctttttaagctggatatttctaaacctttgattctatttcctaggctttcttgattgaagttatgaagaaaaatgggtttcggagatatttggagagacatcatttgtgggctgcttggttcctcctctactcaggttattctaaatggctgccccgggaaaagaattcagcatagaaggggactaagacagggagatcccctatccccaatgcttttcattcttgtcatggatgttctaggtgtccttttctccagggctgaggaggctggtttacttcaacagctttacttggggaaaaatcttcacagaatttcaatttatgcagatgatgtagtcttgttcctgcaccccactcagtcggatatctccattactctggatattcttgaactctttggagatgcctctgggcttcataacaatactcataaatccaatatttaccctataaggtgctctgaggagactatcttggacgtccagcatatgttaccttgtgatattgcctccttcccctgcaaatacctgggcctccctctatcccttcatagattatccaaccaacaactctg

SEQ ID NO: 196072 - DNA, 615 bp, Zea Mays
acgggctgctgttgtgcgggcagctgcgcaatacaactggagggagagccttgcagggtttggagaggcagcagttgaggttctcaagacggaaggggacatgttgccgagggagggtgcctctgttgaagacatgaggaggattgagcaggctgtgcttggtagtatggttatgtgggtaaatgaggctcagccactctgcaccacaggcgatgtaatgttttgcttgcttatgtctgacatgaacgtggcaaatgccagtgccatggactacaatacttcttccctcccatctgttgctgctcaagttattgcccaaccagacgcggggaactatgttactggttcaggttcaaatttatcagtttctattaccaacccacagactggcgttacattccgtggaaaacttaccccaatgccaccgggctcttatggtgctgtaaaagctgattcgtcaatggcaccagcaagcctcaatgtgtcaagtaccaaaccctcggtgccgggcaagactcagtgtgtgataccaaatattgagccaaaagaacaacctgttcctatacatgatcattcagaggaccaaccatttgttgctgctgcgacacaatctgt

SEQ ID NO: 196073 - DNA, 392 bp, Zea Mays
ctcgtcctgcacaacaccaaaaacgtggggctggcggaaggcgtggcagaagacgtttgttggtgtctgaacccggtactgttactgatgatgacaacagctggacttggtggaccggaggaaatataataaaacgtactttgcagaggggggctcttctacattcaaccataagaaaagctgctcgccaaggtattatgtgttttaactattagtagtcttatctgatcctctatcagtaatcagtattcagaacatgaacaagttcccgtgattttgtcacctacttaggtggtaagaaaaggttagcaggtttatcttatcatgaaggttctaattttccaagacgatctcggcaacttttctggagagcatgtgttggactaagccag

SEQ ID NO: 196074 - DNA, 350 bp, Zea Mays
tcattatgttctttgtaccaatctatcatctctagaaaattacccttatttagagaggacgaggattcatcatgcccacgaaaagccatcccttgtcctataagaaacctcaagcactctagagatgaagtcaaacgcgtctgatataattcttcagcttctctagttgcacttgagagcttacttgatatactttgcctttgatttttaaaatcatcgcattgttcaacacatttgttgtgaccactatttataccaccaacatgctcaggcaatgatttatatgccatcttccaattgttaaatcctagtttattgaatacatcaaatccatgaaattctgcccttcc

SEQ ID NO: 196075 - DNA, 336 bp, Zea Mays
caagcacattctcgtgcggcttcatatagtgagattatttctgagtggttagtagacgtcgttactaatgtctgtttgcacgatctccaggatacagcagtgccaccgcatagaaatacaaagccagtctgagatataccattatggggatctgactgatatccagcatcagcatagcccaccatagtctggtcctgattctttggaaaaaacaggccaagatcttgagtgcctttgaggtatctaagtatagtcttaacacctacccaatgtcttctggttgggtctgcactgtatctagctagtagatttaccgcgaatgcaatatcaggcctg

SEQ ID NO: 196076 - DNA, 326 bp, Zea Mays
gtccgtgtctttcgaggacgggctcgacggcgtcaacgagcgcctcctcaccgaggagcggcactacgtgaatctgagcaggggctgcatccccgtggtgcgcggcggggacggtgcctatgatatctcttaccagaggatttgcatcgccctggaggacggtggggtgatcgcgctcgattggcctgataatttgtacttggacaaagagcatggactggattccacggtgcttatggtgcctggtacgcacgaggggagcatggagaggaacattaaggtgttcgtgttagatgcactgaacaacgggtactttcctattgtaa

SEQ ID NO: 196077 - DNA, 583 bp, Zea Mays
gcactatactatttttctctaaactacaagttacaggggaactggaacctgtactgcttctacacaagttgaaactcaactaaaactcaactaaagccattagaaagtcaaattcagaataggaaaaggtggagctacacctgtgtcaattcatcaaacgatctatgttatctgctagtgctgattctgttcagaatagcagcaaggtgaagatcagcagcaacatctgctcattcatcagttcatgctgcctacaagcctcagcaccaggcctctgtaatttactgccacaacacaagtaatagagtgaacatgtcaaacccagaccatataggcggatcatagacacacaagccttctgtgtgcataaaaatgaactcaggaacagacactgcgagcaagaagagtatgttccatcttccattcccataaccgcagcggccattcagttagagttaggacttctggacagaaaatatggaaccatcgttcaggggcaggagactaaaataggacccattctcatcgacacagcacgcctgccactttatctgataagagccttcagggaacgaggagacat

SEQ ID NO: 196078 - DNA, 746 bp, Zea Mays
ttcgttagttctgaatgttaagaggacacttttggacagggtatcaaggtgcacaggggcacaaattgcttcatcagctgacagtattgcttcagtacggctaggtcaatgtgaagcgttcaaggtgcaaaaagttacagaattcccatcagctaaacagacaaataggagatcaagcaagacactgatgttctttgaaggctgcccttggcgtttgggttgcacggtaataataactctgctttattatgagcacctgattggaataacatcaaatactgtagatgctcaatctgttatgaagagtattagcactaaaagtgtattttttagttgatattcaatttacagttttacttttctaactctattataactgcaccaatttatgtaggttctactgagagggtcatgtcgggaggagctcaagaggattaagcgtgctgtacaacttgcagtctttgctgcttatcacctttctcttgaaacatcattctttgcagatgaaggtgcaacacttcctaaattgccctcgagacatgtggtagttgatccagatacaaggaattgtacaaatagcaattcagctgcattgaccaatgttggtatgcctcatggacgtaaatcagaacatgacaaactctcacagactgctatggtcaacattatgtttgaaaatacccctgtgtcacctagttcattgccatcgaatggagaaggccacatgtttgtgggtgcatgtcagc

SEQ ID NO: 196079 - DNA, 690 bp, Zea Mays
cttctcaaagatctgtgattgctgcagcaattgtagttcagagaataaatgttgtctttggagatgctaatcaagcaactaagtccccacaggttggattagctgcatatgtttacccaatgttgtaataagtctaggcactaggcaggtggtcaagctctgattagtgcctaggattgcataggagtttcttcacaattgtacttcaattagtagagttacagtataatgttaaatagagaatgttagcacattaaaagaaacaatttggcattatcatccacccatcacgagttctatgatcataagtcaccttccatcatctccaatgtgtttgaaattcatacagagatcaagccctaagccactcttgatgggaaaacacctaggtgctaggaaaggcatgcatcttgcctattgcctagacgctgcctaggatctatttttgaaagagggcttaccgcataaacctaaactaaaggtttttctttccattttcatttggccagccaaggattaccttctaattcagatgtttatctacctctgcaaaatgaaatttggttacaggatcttgatgcaatggaaggggctcaactggggcttgaagcagttgtcaatgctattttcgatggctcagttgattgtgggaaaactgatttggatacgaaatcccaactgcacaagatt

SEQ ID NO: 196080 - DNA, 521 bp, Zea Mays
accatatgctcactgatgaaagtggaggaactgcctgaatccaccagcataagcatcacttgtttgcccacaatagacctcaccctcatactgtaaatactgtcagaaccggatatagcctgaaaagatagatgacaacatatctctctctgttcatcttcttgttccaatttctgtaacaattcatcagacagcacttccggttcctcctcatccctcatgacattcagctgaactcgccccctcttagcacatttgaggatatggccaggctcgaacttctcaccacaggcatagcaaagcccattgactcttcggtactccctgagttctctttctctcgataaatctccaccaactggctgtacctttccttcccccttattgccaggttggtactgttttggcacataaccttggcgaactcctctcggtttgctcttctccaatacttcctgttgcatctgagccagcaacaccgccttatccaccgtagcaggttgatgcatttgaaccacact

SEQ ID NO: 196081 - DNA, 616 bp, Zea Mays
ggagaaggaggtggcggagttggagaaggccgatgaggatatgcaggaagccaacagcgacaagttttgcaatgatgaaaaggacgggaacgagacaagagaggtggaagtggaggacgaggtggcagaactggagaagaaggccgatttggagatgcaagaagttgactacgataaaatttgcaatgatgaaaaggacgagaaggggggcaaagaagaggtggtggaggaagagggagttgaggaggcatccaacatcaagattggcaatgagattaagtatgagaaggagtcaagggaggaggagcaggccagtaaggtgaatgagcaagatcctgacaaggagatgcaggtggttgataaggacaagctgaataccaaaggtgcttttaaggcttctcaggacaaggagaaggatcaggataccaacatggatgagacagtgaccaagatggcgtcttcagtgcagcacaaggagggggaggaggcttgcgacaggaagcagaaggaagcacagaaacaggaccttcatgagaaggtggaaggtaccaaaaatgctaaggaccagggtaatcgagctcttccacgcagatctgatgattgcactgtagcatgt

SEQ ID NO: 196082 - DNA, 492 bp, Zea Mays
cggggaggtgggtaagcacgggtgggggtaggggataatggtggatgggttgatttggtcggagggtgctcgggatggccggtccatggcgaggtggtggtcgtccgcggcggtgagatcgtcggtgaggttgccgggcgcaataggtgaaggggaggggtgtgtcgtgttcgtgacggagcggtgaacctaacaggccaacccaattgtactctaagctaccagagaagggagggggcattcaccggagcggaggaagggcgcggcggcgcgattcgattgagctcgggggaggggtgtggagaagccgaggccggtgtgaggagttgggggagctcggggcggtccttttataggcggccgagaaagggggagagagaggtggcgagcaccagcgagcttgccgcggcggcgatgatggcgcatagtggtggtgatgggatggctcgggcagacgggtgacaggattactcgggttggcgcaaggagaca

SEQ ID NO: 196083 - DNA, 955 bp, Zea Mays
gttctgccacatctggatccatgtcgtggcctctggtccccttcccttctccgagactagccccttcctttgtcgtgggtgcatacctcatcatatatgctcgacaagctgcacctgggtgtggtctccgccttcgactgcttcatcttgccagcacccacaacctccctcattgacaaaggcgctggcaaggcctcctccaagcggcgtaggtcgctaagggagatgaggagtggtctggaggggagcgagtgcagctccagcacggccaaggtccaaggtctaggaggaggaagacaaatgcagaccacagtgttgggggaggttcggtgacgggctacactgccgtgtgtggcatgaccgcgagaggcttgggtgaggggctacatcgccatgcacgagagaggtatgagagggctatgctgccatgaaggtagaggtgtggtctaggggatgcaccgccatgcgaggagaggtgctgccatgcaatgatttgagaagagataggagagaggaaatatttatgtgctgctcttgcttgcagcaataaagaaggtaatcgttttattgtattacgtatgaagtcgctgaaatccaacatagccataggaaggaagcaatagggaggaaggattagggtggggccacatgacaagggcacaatcatagtacatgaggtcaatgccgtcgagtcgagtgccatgaggtggaataggagacaggacatcacatgctactcattggcagtggtgcaagcttagaaagagtagggagagggacacaacagatgggcctgcgtgcaagcatgggtactcaggccagtgttgtgggatatggtgtctaaacagccatacaaaaccagggggggcatttgaacattattatatgctttgagggctacaatatcagttttcatagttatgggggttatgtagtcaacccttcacatgttagg

SEQ ID NO: 196084 - DNA, 289 bp, Zea Mays
cccgaggtggcggcggagtggaagtggagccgaggaccaggggcgtggctcaaggtgggacgacgacagggaagccaagaggtcggggtgggacaggaggagccacagctttgatggaaggcgtaaatgcaacgatgacggtggcggtgatgctgaccgtagcggccgccggacacgcgactacgatgagtcgaagagaccaccgatgtcaaggtcctattcgcataacgatcgttgggcttcagctgatgccagagtagatcgaaggaggagaagtaggagcaggacc

SEQ ID NO: 196085 - DNA, 364 bp, Zea Mays
ccagcctctgcggtcatggagcgtctcgtcggggtgcctgggttcacgcccgtcgtaccctatcgtctatccagtaaccggcatcgcacccggaggaaaacaaaattagtggcgggctcgccgtgcgcagtacctgcaacgcacgagcaccgcgtcttcggcaccgacgtgtgatcaccgtctactcgctcgttgcagggcagacattccacgatctcgtctacggctgcgccggtgtcgtctccatccctctggtccgtgccccgccatggcccaacccaagctacagcgacctccggcaattgctcaccgtcagcacagttccgctccacccgtgactggccctgtgatcgcccaaatcagc

SEQ ID NO: 196086 - DNA, 389 bp, Zea Mays
agacagctttctgagttggagatttggatgttaaacagactcaagaagcattctttggcattggcgtcgctcattcgtacagttgctagactccgctctagggtgtcttggttgagacatggtgatgccaacaccaaggttttccatgcatgtgctcgttataggaagaagaagaacttcatcgccaagttgtctaatggtgaagggctggttactagtcatgatgataaagtggaggtgctgctcaattattttacggagctgattggtagcagcagcgacagggagtcttctattgatcttgaggcccttgggatccaacaccatcttctggatcaccttgtcagctcatgttcggaagaagaagtttgggataccatcaagctgat

SEQ ID NO: 196087 - DNA, 1533 bp, Zea Mays
ctcggcggcggcgtacgggatagcagaggtggccatggcggcggtggccacggtgagctctgccagtgggctccttgctatgctgcaggagccggcgccggagctgaagctgcacgcactcgacagtctcaactccgtcgtccacctcttctggcccgagatctccaccagtgttcccaccatgtgagcccggcctcccccctcctcgcttctgctgggcgtacgcggttgccgccgctgtagctgcagtgtttgcgcgatttgttcaggcgttggtttggctgaatttctgaagtgtttcgatccgcttctcttattgatgatgatgactctggaagagaccttgacctagataccgtcttttttgcgcaatttcttcagagtcagtcgtctgtgcaagctgaacgtcgtaggtcacgggttggttctgacacgtggattccagaggcccaattcgcgtccgtgtgcaagagtgtgataactatactttcgtacattgattgtagctgaactggtgtgccactcttgtacttcttctgcccttacttggatttagcttgggttttgatgggaaggctaagctattcgaggcaacctataaggaaagggtacagtacccagtaggagtgagctgagtgtaggtacttcagattttgtttttgaaatttcatgggtggacaggtgtacatttacgattgtggttatgtcttgataggaaatattgtgtgaaactgtgaagtgagaatgtgaaggcttggtctttacagatgaaaggaaaaatgaatgcatgcattatctcccttcaacaattttgtttagggtattccctgttcggttccgttatgtataattcagttgcagtatgataagcttgtttttggtggttatgtatctcgatagtagttgctttcttatatattataaacctcttgtttctggaatgcctgttccgcatggtccctttgtttgaaatattaacctcaatttctgtttttattaatctcaatttctatttttaattgatatatagctagttagatttcattacattcctatgtttgtttcatggtagctatcagactttttgatacaaatgtagcttaattttaattctcatttagtttgtggagctactctgccccatatttttcatggtgaagatgattggaccatcaattaaagttcatgactgcagaagcacacaaagtgtgccttttcttgtatttcctgttttccaataatttaagtcactaattagtttctagctgttatctatctgcagcgagagcctgtatgaagatgaagagtttgagcagaggcagcttgcagcacttgttgtttctaaggtattatgcctcaattttttttatttctatgaaaagatcattcttctgtattgttaaatgttaatactgaagtgtgttgtatatcatataggtattttactacctgggcgagttaaatgattcactgtcatatgcacttggtgctgggtccctatttgatgtttccgatgattcagactatgcccat

SEQ ID NO: 196088 - DNA, 501 bp, Zea Mays
gcgcatgcgttcaccattcctctgcgtgctactccagccataagcacacacagctagctaattaaggtattttagtctgtaaataatggactgtgtagtcgtgtgtgtgtgtgtgtgtcgtaactgtgaaagtcgccgatggatgcataatatatatgtggtttttcccttaaacaaattggatagatcctttggttctatttgtttcttttgccatggatagagaaaacactgtacagtgaactgcgtcagttttggttagagctgggagtgggcactgggcagaggagcatttcgctggcgcctgctcctgcattctaaagaggcccttgggtccaggtgagattcggcccggccgcgtccgaagagctgccggcgccacgatctggagcgttcgttcacggcatgtgggcctgatcactcccgccgcaaaagaaggcccagcccacctgtgtgttccccggagggagaaaccaattcaccaatccattaagcagggga

SEQ ID NO: 196089 - DNA, 348 bp, Zea Mays
aaattattttggaaaaacttaagaatatgatcaaatcctgatagtcgaagtgcaaatagtatatagttaagataaggactataaggtggcttagtttaggatgctaaccactaacccacaactataatgtaattttctgcaggtacactaactaaaccctaggaaagtgcgactagtgttcaataacggagtgagtaggtatgccaccgccatagaacgtgatagccactatatgttggcaagaattgtcaggacgaataggtcgagcatgcatcatgacatacaattttaagttaagccccctatatagtagcttagtacatgtttcattcatcctattcatgctac

SEQ ID NO: 196090 - DNA, 331 bp, Zea Mays
tttgtatgcatctatacatgtgctggctgcctggctccattgtgttgctcaactcgacgacaaaagtagacaaacaagatccaatcacgatgtaaatcgaggacctctcaagtgtaacgtttgacagggaagttcataatatatataagcttcttcctaaatcatttccgaaccaaactctgtgctctcgcaaaatctagtcctctttacgtgccaggatcgaccctgatatcacaataacaccacaacccaatctagtactagtagtagatctggtcctgaacggttaatttctctcgctggtcaaccagtgaccacacccacatccgtc

SEQ ID NO: 196091 - DNA, 589 bp, Zea Mays
agcaacctaaacccaaaccccaggagcagcagaaagagcagcaacatatacttcaggccccagccttccctccgccctcctacccaccaggtttgtagctagcacgatgcagcacgagctctagatttggaataaattaatctacgtcagtcacattattggtaatgttatcttgttatggtaggattatcctgtatggagttgatgatggctgaccttgaagccctgaaactgtacatcaactactattcggccatcctgactacgccgctcccccagcattatgatcctgacctccttgcccagtacttcgcctcacgtccgcatatccttgcctctcgcgtcattcaggttaactatgagctcttcctttgcttttagtactaacctacactctcttccagctattctatctaattggtccatttgctgtcaacctttgctctgcagatactcttcacatttctctcagctgtggtgaagatgcggatttcaaaaagagctcagttaaccacagatgctacctatagtagtggtaacagcggcaacgggtttgatgatactcaatatatggtcggccaacttctca

SEQ ID NO: 196092 - DNA, 470 bp, Zea Mays
agtggctaactcctatttacaagacactcatgctcaggacctgttggctaaattgtcgctggacggtgcatcagtcccacatttttccttacaagatggcatcctccggtacaagaacagagtttgggtaggttctgatgttcctctccaccacaagctggtagcagcatttcatcaaagcccagttggtggccattcgggtgtgcccgttacttacaggaaaatcaaacaagttttcgcatggaagggaatgaagacctttgtgcaaaactgggtagcttcctgccttacatgccaacaagcaaagccagaccgatccaagtaccctggtcttcttcaacctctgcccataccaaagacagcttggcataccatttcaatggacttcattgagggattaccacgttctcagcgctatgattgcattttggtggtggtggatttgtttaccaaatatgcacattttgtta

SEQ ID NO: 196093 - DNA, 1022 bp, Zea Mays
cgcaggataagcatcggtctgaggaggggccgccgcaggctcaagctgaggctttgactcagaagtcggctctgtaagctcaagagcaggctctggatgtgaagtgttttgtatgtacgaaccactaaactgttggtgctgctgaacactaccgccactcgcaaggtctgccacagcaccaccagtatcacgagcagcataagtctgtgtgttgagggtatctacctgataccactgatgtgtggcctcgtcgtacttccagccagggtagaggctctctagatatctgggatcagtgtactccacctgcgcatcagcgctccgatccccgtatccctcagcagtagctctggaatcgaactgggaagtggcattgctctccccatatcccacctctgtatgcatcggcttgggttcacactgtgcctccccctctttctgtggtgccactgcaggctgattgccagcctcagtctcaggctgagaagccgtctgcctgtgttcaagcccagtccctgcgtgtgaagtgttttgcaggtaagaaccaccaaacttctgctgaaggtcaccatcactcctatggtctgccacagcagcaccagtattctgagcagcatagctctgcgcgctgagagtatctacctgataccactgctgcgtagcgtcatcgtacttccagccagggtagaggctctctagatacctgggatccgtgtactccagctgcgatttggcgctctgatgcccagacccctccgcagctgtgctggaatccaactgggaactggcattgctctccgtgtggccagagacggtgcgatccggcgcgctgccatcgccggtgcctgctgagagagacgacgacagcgacggctccaggccctgatgatcctctggcacagccgcggccccggagaagggttctccgtcttccggcaggaggtccccggccggatctgccccgacggtggcagcgaggtcggggggcggatgcagcagcacggccgcaggatacacctccg

SEQ ID NO: 196094 - DNA, 484 bp, Zea Mays
aaaaacagtgcatgcaccccaaaacagcaatcagtaaatcccagtttctatataattcaagaattgcagcattctagagacttgaatcattctagcactttaccacttcttagagttaaattaattacatgaggactagcaagcagccttacaaattttatccaaatcatttagtgcactaaaattacaacaaccaattaacaacgtattcttcacgataatcacccaacgatttgcgttttcaattagacctcacatgagcactactactttttacccgtgcccataaccatgcacatttagaccaacaggcaaatcgtcatgactacgagcctaactaaagccatctaacaattcggctaactagagcaacgacctagccctgctatgcaacctactcgtcggatagcctattgttatcacaatccgagacacaacatatactacaacgtttttataaacatatatattcacaagtattttc

SEQ ID NO: 196095 - DNA, 276 bp, Zea Mays
tttttaatttgtagtggtttgaatcaagcagctacaaacttctattcattcgaccaagggcgcattgctgcttatagactatatgagatgattagtcgttcaacttccagcaccaatcaagaagggacaaccttaccccaggtgcaagggaatattgagtttcgaaatgtgtactttagctacctgtctcgtcctgaaatcccaatattaagtggtttcttcctcactgtaccggcgagaaaaactgtggcacttgttggtagaaatggctcgggg

SEQ ID NO: 196096 - DNA, 367 bp, Zea Mays
gagcgacagctccctcacacacaagcggacaccatcggcaaggatccatggcggctgcagcccactgctcctcttctctctcccgtactcacgttcggcagcgaggccgagcacgtacacaggcaccccggcgaccaaacagagtgcccagtcaagaccttggagacgacgaatcacgcgaccgatggaagaagtagccagcaccgagcgactgagggccagtggccatggatcagggagtggcacgacggagcgcagatttgtgaatccacagcactaccgacgagggaggagatggataaaaatgcactgccgccagcaggggctggacgaggcgcgaggcgagctcgggaggataaactcctag

SEQ ID NO: 196097 - DNA, 393 bp, Zea Mays
ggacaaatgatgcactcaaagaacattggagaagtcctatgaaaagaaaactggattcatatttggcctcaggattgctcgaacatgttccagacctgcaagatgatgtatcatttccacagacacagaacaatcaatcagatattccaaaggactgcaaagctgcatctgatagaaatagattttcatcacgtttatcaacagaccccaaacttaaacaagagctcacagaactggatgaaaatggtaatacatcagcaagaaaaagctctgacttattctatgctaaagcacctgatacccattcagccaaaatctcagaaatgagaatggccaaatcacagcagtgtgcaggaacaagaaagaagctggcttttctgtcaactccagtgg

SEQ ID NO: 196098 - DNA, 455 bp, Zea Mays
gatttgatccggtctcagccattaaatatttccacagacattaagcaatctgctgcgtgctcagaacccatcattagtgttggtctggtgaagaccaaagatgccggttcgtcaaacgagtatacaggcgatatcaacttccagtcatgccagccagtagatgagtcacctggaccttcgccatacacatcaccggaggatgggaaatccggtatcgaccaagtgggaagtacaaatgaatcagatcatactgacgaggctataccaatagatctgcaagataatagctgtacaagagcaagtcggcgaactgaggttgctgtgcccttgcggcggttgagaaatcttgactcatcgtgcgagccatctgaaaagaagtgcaaatttgttgtcaagttaggtgcctcggcagatattcggcggccagaggatatagcatctaactctagctcagt

SEQ ID NO: 196099 - DNA, 279 bp, Zea Mays
agagtcaggtggagcagtccctacgacaatctcttccaagaccaaatcatcccgaactttgtgaaatgtcgggaagggaacaaaacgagtgatgatggtctggagattagcatacttgggactcaggcctcgaaggacattgagtaccaggatgcggtcggtgaccggggcgtcgaggtctgagagagcatcaatgaagcctttcatcttccgacaatactcaccaacaatgagatcgccttggacgaagttgcggaaggtggtgtcgggatggagagc

SEQ ID NO: 196100 - DNA, 653 bp, Zea Mays
gccccatcgacaacacgcgaaacgaacctcgaaagcaggtaccaaatttggagcctgacgcaatggtgtccatacctgtcgcaatcccaacccgccgccatgctcgctcccgagagcccagacccgcgcaccgaagaagaagaagaagaggaagctactgcgctcctctccccccacgcctcaatccatcccctaacccttggaccatggccagcagcaagctcctgagttcaaacggctccaatccctccgaggaagcagaggccaagacgtgtagcaccaccaccaacaacaccaagtcgcaccaaatcacagcccggagcagttgaacactggagcggtcgtgtgcccaccggtatttcaagtggcagtgaggacgcgagggggcgcgagaggacagagagccactgggaggagtgggaggttctcgctgggtgctcggcggcttgctcgagtgggcgtggtggcggtgccggtaacgatttctacggtgcgcgagcgcaaaggcctcgcctttccggtgccgcgcgcaattcttttggcttcttttatttagccgagggcgcgcctaattgcgctgcgctaatgggatcccatcccccaccctgccacttttacgagctcgcgtgttcttcctccactctccctttttc

SEQ ID NO: 196101 - DNA, 520 bp, Zea Mays
cctggcccagctcctcgttgaggttggacgtcctggcgtgggctggcgtgtccgtctcctcgtggtacatgtggatgtcgtggttgatgaacagcgcctgcagcagcttcacgatctcgatggagatgtacagggagatggggatgaagtagccgtagagcattatggccgtgaagaagtggagcaccgctgccaccgctggccgtttcgggtcgtagtagatctcagtgtcgtcgggcctaaggtaccatctcctcatggtcctgccgtggtctctggtggcgatgccgaagaagacggagctgacgaccgagatgacgatgagcgagaagaggaggaggtacatgacccggtccatcttcttctccacgttgctccgcttggacgggaccttcatggagttctgcatcaccttggtgtcctgccccgtgaacacgacgacgccgtacacgaagtcggtgttgcggagcttggagtccctgagcaggagctgctgcggcgacagggggtgctgccggcc

SEQ ID NO: 196102 - DNA, 521 bp, Zea Mays
cggaaaccgcggtgtcaatcccgtgttctcaattatccacgctcggattggttaaacggccactacgaggagcttcatgaacacatagatctgctaaaacaaggcttgaatcggacagggacttaccagagagggctggccacggagcgcagggctttacgttcgccggagacagagaaagggggaaatcggtgtcacggcggctctggttgaaattggggttggggattgaggctacagggtcgtaagaagctgtgttttcattgcgtgcaatcaatttgggcgaagatggagagggcagtgcgaatttgactttgactgagcttcactggtggagatgaaagcacctcgccgtggcaccctactcaatttataggcacggcggcccaatagatgacccccggccacagatagtagcgcaagcgcatgcctaccacgtcggaaagagatacagtgagggagatggaggcatgggcgacaccgcggcaaaattcaatggtcacggtggccgccggtgaaga

SEQ ID NO: 196103 - DNA, 298 bp, Zea Mays
gcacaccaaccaagtgttgtattggtagagaaatctgtgtctcgttatgctcaggatttatttctagagaaaaatatctcccttgttctgaatatcaaaaggccactgctggaaaggatatcacgttgcactggtgctcatatagttccctcaattgattgtttgtcatccgagaagcttggacgctgtgatttattccatgtagagaagtatgttgaagagcatggaaccgctggggaaggtgggaagaaaatgctgaagaacctcatgttttttgaaggctgtcccaaaccgttcg

SEQ ID NO: 196104 - DNA, 705 bp, Zea Mays
gtcaagaggctttggagtattatgtgaatctgcttaaacaccctctgtctcaatgccatgtggatgctctctctgccctgtttggctggaatactccagcagacttagtgcccagtagagctccttcccctcccccctattctggtaaccaccgtgtattatgttttaatggatccgtcaaaaatattgttctagaatgtgagagggctgaattcctctgttcgacaagctccgttagagctttagttgattcttctcgggctgaagtggtttgtcttcaggagaccaaaatgcaaattgtccccagaagcactatcctctctatgcttggttcagagttcagtgaatcagtttttcttccatcggctggtgcaagtggaggcatccttgtggcatggaagcaacacctgagatattcaggacaaaacaggattgctaatcatagcatctccaatcagttctgtaaggatggggatgtgattggtggctgacttgtgtgtatggtccccaaggcgacaatggaaaaatcatgttccttcaagaactcagaaatatccaagctgcatgtcctgggcattggctcgttttagaagactgattgatgatctggctctcaaagagattactttacatggacgcaaattcgcgtggtccaatcaacaagatgagcctgtcctggtcaagctggatcatgttttctgcttg

SEQ ID NO: 196105 - DNA, 295 bp, Zea Mays
catcgacgctcctcctcctcctatttgtagactcgtctagggttcgttcttgtgggtgcgtatccaagtgaactctctcaaattgttctcttcttcttcgtcctcccccttgcctagggggtagccctcccttttataggccaggagaagggttaaccaacggtggcttcataggaaggagtcgtaagacaaggataaaaccaacgttctacctagggtaaagccacgcgtagttgtgggccctagggtcgcctgactgtctcatatttactgtggcggacgacgcggggctgtg

SEQ ID NO: 196106 - DNA, 324 bp, Zea Mays
ttccccgagactacgacgacaaggcatcgatcttatcatgcatataaaagcatcacaagcgtgttcacggaacctacctgttaacttgatcgacacactacgtacccctgttctttgcctttcaaattttatcgcacaacaagaatcatccccatttgccaacgacaccaataatacctaccgacctatggtttaacacccgagcacagttacacgccgcacattagtttctaacatgattctcgcataactcgtaattcaactactaactaacaataaatcacgtacgacaactactatatcgaccagttaatttatttggac

SEQ ID NO: 196107 - DNA, 736 bp, Zea Mays
caaatgataggcaacctctgttggactctggtattttgtgctgccttatatatatcctcaattctctattgagccccaatgagaactccacagataccttgcctgttcaccaagaaggatccagaaatgagaaaaacaaaaatttggatcctatgcaatcacgacggcttgaggtaatctcagtcttctggttctcatagaaacagggccctatttgcaagattactgttgaaatacacaaaatcgtaaattgtttaacattgagttgctgctttgtctgtattattacatgtttttttcctttgtgtcatatatgtatatggtgactatttcttcccttcattttctcctggtcaacttggtttttgatttttattcttttttctgtctatggagattgagggaagtgtaatacatattatgaaagcactggcgagccatcaatctgctgcaccaagtttaattgaagatgatgccttacaagttcttttccacatggttgcaaatggttcactatctgtgttgtcacagttcagggatggtattgttccccttcacacaattcagctccatcgccatgcaatgcaggtaatttgaaactatgtaacattacgttttggagggtcatgtttctctgctgcatcaatagttgctaaatatattaagttcataactggacaggtccttggtcttcttcttgcaaatgacaatgggacttctgcaaaatacatcagga

SEQ ID NO: 196108 - DNA, 403 bp, Zea Mays
tcaaccttccatctgaaggttttccacttggcggcctaaaagacgcagagccatcacgtttcctcagtgcttcattaagcttctgtgacctttgttggactcctatgagctctcctgggttgtaggcacgtgcagcatttgtgttcccaacatcgtgaactctgtaagaactgatattttctactccaggtctgatgatccttgatgctgcttccattatatcagctgcattcctgctggatatatggttagggtttttcatgggagacagcaacttatactgtgcgacagatagtgtcctcttggcaagtcttggaggcagtgcttccattttaaaccgatcaataggactacccggcatcttaaggggactaccaacataacttctgccgatcaaatcctc

SEQ ID NO: 196109 - DNA, 326 bp, Zea Mays
ttttcgggaagctcccactactttttgttaggacaagactcacccccatgccgtgtcatgccattgccacccatccttgggagctgcagctgcctatataataccaacagtgccgaagcaagaacatccaccctgcaccaccaccaccgggcaccagcgtcgtcgaagctgctcactccatcgccgctccaagctgtgagtccgagcatcagcacaagaagatgcgctatccagctcgtccgagaaatctccgcgctcttctgtccatcgctctgctgctcgcttgtgctctgcagcagcggccggcctcagctaccaaaaaggcg

SEQ ID NO: 196110 - DNA, 321 bp, Zea Mays
tgtcataatgaacatgtaatcaagttggatctttgtaatgattgtcatcaaggtgtgggtatcccctgcaacttggtgtagttattaataaagtcaattatttagttgggtaatccatttatttccattttcctctttatctgagaagctgtcagtgaagacgatcaattgttcattgctgtgaagatttccgtacatcttttcttatgctgaaagactgcagagtcaaatctgatatatgtgtgctttctacagatgtctgagaataggcgcagaggtgcaaggcgtgctcagccagaacagcaggcaccccacgaagat

SEQ ID NO: 196111 - DNA, 340 bp, Zea Mays
ggcctaaggcgcactgcattaaaggattggtggtaggttgcaatgatgctcatgtcgcattggaagttgctcccggagccttagctaaggcacctttgccttcggtcaccgggcctactcaatcttctgttaaaggtgccttttcgcattctgacgaggtcaactattcggctcccatccctgaaagcgtttcgcccagccttccactggctatagttactaggtcgtttgctatacccggttgcaggcgccttttcgattctaacgctggctactcctctcttaatgttgttgagaaaactctttcgtcttcattctctcgctctcaacaatgttgcgg

SEQ ID NO: 196112 - DNA, 515 bp, Zea Mays
agcggccggttgacagctggaataatagaatcagcatgcacatcattagcagcattgggcaccagctgctccacggtctcgagtacatcaacaggggccaagggaccctggatatgctcagaggccggagccatggtaccccagacagcaggtaagttcgggacagcatcaagatctgcagatataccagcagtgatctccactgccgaggactcctccaatatctcatagtttccagctgtctggacacactgactggcatcgccttccttcctaggctgaacttcggaccgtgggcctagacgttcaagagcagaacgtctgcccaaaagtacgctgtcttccgtagaaccccttcggccatcacggtcccctggtggcgaacgcgaacggaaacgccgcctctgacgtgtggaaccattcatatttgttgggatttggacggggtcagggacaacacgtggtccatccaacaccttaatctgaacacgataggcaagagatagcctttcagc

SEQ ID NO: 196113 - DNA, 411 bp, Zea Mays
cctatgcccgccccaaccggcgaagacaacaattctcgttttccaacccggtctactcggagacggccacgctccatccccatacgacggcgcctgccacttcgcgaaaattcacccacactatgttttcccaccacccttcgccgcctacacccagtactcgcaccaggaacatccccagcaccctccacacatggtgaagtctccgccgcagctacatccaacgcaacataataatccaagccttcattcgaggactcctccatccatggaaacgagctctcagattcaccatcagactcaaaacattcagacacagaaccaaacaaactatcatcggtaggcactacggttgaagtctccgccgcaaaatcagtattgccagtagcggttgcttgcgcaggcccaaac

SEQ ID NO: 196114 - DNA, 593 bp, Zea Mays
tgacagatctggctcctgagccacgcgatgtgtattggtcaaacctctggatcccctacagacagatctggctccggaagctagcgacactcgcagctagtatcgttttcatgttcgtgttcatcgtccccgtcgcgtttgtccagagcatgatgcagctggagcagctcaaaaggatgttcccgagcttgacaggtctcctaaataagtaagttgagaagaccaccaccggtagctgctcctgctcttgactcttgagatctggggggttttgctgctggctgactgaggtcgtgcctgacttatttcttgccttgtaggtccttcttcgccagagtgataacgggataccttcctagcgtcaccttgctgctgtccctgtacaccgttcccccgctgatgatgctcttctcctctatagaagggtccatctctcgcagcgggaggaagaggagcgggtgcttgaaaatcctcttcttcaacatctggaacgtcttctttgtgaacgtcctgtcgggatccgtgctcaaccagctcaacgtcttctccagacccaaggacatgccgacgatgctagctgaactagtgccgaa

SEQ ID NO: 196115 - DNA, 1154 bp, Zea Mays
taaagaggctgtagtgtcatctgacactgttcctggagcaaaaatcagattgtggcgtagaataagggagtttaatgcatgtgtaccatacactggagtgcccgtcaatattgaagtacctgaagtggtcgtactggccttgatcagtcttcttccaaccataccacatagccttcctgctgatgctcctcctcttctgcctccatctccaaaagcagcagcaacaataatgggttttgttgcatgcttacgcaggctacttacatcaagaagtgtggcatcacatgtgatgtcgtttcctgtcgctgttgggagaataatgggtttgcttaggaatggttcggaaggagtagcagctgaagctgctggacttgtggctatgctaattggtggtggtcccggtgattcatccatcttaatggatgcaaggggagaatcccatgccacctacatgcatgcaaagtctgtactgttctcgcaaccaatgtatgttccgatccttgttaacaggttgaggccaatatcggtgtcaccgttgttatctttgtctgttgtggaagtccttgaagctatgctttgtgaaccccatggtgaaacaacccaacatgctacatttgttgagctactgcgtcaagttgctggtttgcgccgtcgtttgtttgcattatttgcacatccagctgaaagtgtgcgagagactatttctgttataatgcggacaattgctgaggaagatgcaatagcagcagagttcatgcgtgatgctgccttgaaggatggtgctcttctgaggcatttactaaatgctttcttcttgcctgctggagaacagcgtgatgttagtcggcaacttgttgctctttgggctgattcctatcaacctgcacttgatttgctatcaagaatacttcctcctggacttgttgcttacctccatacacgttcagatgaagaatcacagagccagtatgatgaagcaccgttgagcagaaggcagagacgaatacttcagcagaggagggtccgtggtagtaaaagtatgtcagtacaagaacaaggggtaccccccaatggtgttgaggatggggaacccttcaggcacaccagtgcgggcacttatggagtagcagatgttcatcagaggcatgttggcc

SEQ ID NO: 196116 - DNA, 336 bp, Zea Mays
tgaccactgaccaagaggctgaaactatggatcatctccttgtgacctgtgtctttgcaagagaattctggtatcttttgctgagacagtttgggttacactctctagccccgcagatggcttgcttcctccttcctaggctggtgggaagaggctacaggagcagtgaatggacctatcaaaaagggtatgaactctcattttgggtgcttgggcgatttggaatcaccgaaatagatgtgttttttatggttggaattccaatatttctttaacccttcgctgggcaaatgaggagaggcaccggtggaaaatagcgggggcaaaaggcctttc

SEQ ID NO: 196117 - DNA, 510 bp, Zea Mays
tgcccatcagccacgttcacgcacccctccagcctccaggcttcatctgttcgccagttcgctcccccctccctcacaaagtctcaagacgtctgatggcccctgagtagtgtaaatgtccaagaaacaaacattctctttcgagtcatattctttccgcggaaagcaaaggggtgacagtgaggggatggcgaggcgcaaggatggctggggcgacggcgacaagatcaagattggtgtctgcgtcatggaaaaaaaggtgagcggttggacgttggagaaactaatgattcgatgcttgtgtttcttcttgctaatttgattggttttccctgtggaaacttcgtaggtgtcgtgttctcccatggaacagattcttgagaggctgcgtgcgttcggcgagttcgaggtatggctcagaaatgtgttttcccggcggattatcctttgcgtccgttgcttttcttgctgattacttgtttgtgttttttaaataaacaaataaataaa

SEQ ID NO: 196118 - DNA, 272 bp, Zea Mays
cttcttccagcgccggtgcccagctcggttcgtgtgggtgtgcagcggcgtctccggtggcctctactctgctctctttggccggccggagctcctgcttggcgtccctctctgctcgttctccccagccaagcggatctcgtccatgctgctctctctctcctgcccctcccatggcgctcgcctggctcgccgcgcgcccaagcatccgctcacccctgcgcgtgcttcttccccatggcgagctcacccatcctctgctcgttcccatg

SEQ ID NO: 196119 - DNA, 600 bp, Zea Mays
aagcagcggagagatcaaactgagagatggagagagaaagccagatgccgctgctgtgttggccaccaccaccgactggggcaagagagaaggagagaaggaagatgccgtggtgaccggcggtacggatcttcttcacgcgcgaggtattgggatggatgcactcggttcgttggtcgacggcgagcttcgatgcttgcgttgtcgtcggggggacggagaaggacctcgtggccaccagaatttctcacccatgccgctgctccgccgcggaaccactagcgccgtggtcggagaatatcagcatcctcaccattggtacgtgaacctatatctgttgttgggatctcgtctccgtgtagcgctccccggattgggatctagagcacaggaccgccatccagtaggctcaccggcgatgcctcgtcgtggcctcaggcagcgccaccgttaccaggcttgggcgatgggggtggaatatgggccgtcaatcccagatgaagggctgggatttgatcccggattctggtttggcctgaactcttctcggtcgtccgatgtggatccggcgcgtgataatcgacctaaggacttaaaatc

SEQ ID NO: 196120 - DNA, 582 bp, Zea Mays
tgtcaggttgaattggttaaagatggaggacatgcatattttattaagtttcttgacagtttggatgctttcccagaacagcgtgcaatggccgcttttgttatagcagtcattgtggatgggtataggatgggtcaagaggcttgtatgaatgctgggcttatggatgtttgcctgagacatctgcaacctgagaattctcatgcacaaacagaacctttgcttttgcagtggctttgtttatgccttgggaaactatgggaagatttccctgaggctcagttacttggtctgcaaacaaatggaccagaaattgtaatatgcttattgtcggagcctcaacctgaggtatgatgccttcatattctgtgtactctctttttcctgcttcacaagatacatattaaacttttggtcttgccaggtcagagctgctgctgtttttgcacttgggaatctccttgatactacatcaaatagtcatgatgatggttccgatgatgatgaaaaggtgaaagctgaaataaatgtagttcgaagccttctgcagatctcttcagatggcagtccccttgttagatc

SEQ ID NO: 196121 - DNA, 552 bp, Zea Mays
gttaaattatgttttgcatatagtgtaatggagttagttgttttgggatcattattaaaatgctctgttcatatgataaatatgtatgattgcagaaatgttgaagtgtatgtgttgtctcggattgcgatgagaagaggcaagccgacgtgtaggatgtatagcggcctatgttgttgcgctagttagccgaattttagatgacttggttaagctcgtaatcaaggcgaattacttgttgtggtctaaatatgtatagttgtggtcgcgggtaaagagtagtagtgctcatgtgatgtctaattgaaaacgcaaattgttgggtgattatcgtgaagaatacgttgttaattggttgttgtaattttaatgcactaaatgatttggataaaatttgtaaggctacttgctagtcctcatgtaattaatttaactctaagaagtggtaaagtgctagaatgattcaagtccctagagtgctgcaattcttgaattatatagaaactgggatttattgattgctgttttgggctgcacgcactgtttttattg

SEQ ID NO: 196122 - DNA, 3991 bp, Zea Mays
ccgcgaccggggacgtcgagatcatcaggccccgcaacgacaagcgtgggtaccgccgcgtcgtgctccctaactcgctcgagtgcctgctcatcagcgaccccgacaccgataaggtctgctacaccgatcgtgctaggatggaccgaacgggggttttggcgacgggttttggattttggtgcgagatttcgaggttgtgaattgtgctttgttttgcaggcggcggcgtcaatgaatgtttcggtggggtacttctgcgaccccgatgggctggaagggctcgcacacttcctcggtcagtgttcggtttcatcttgctgcatctgaagtcctgaactcgcttactgcttgaactggactgagcttcagcttgatcctgttttttgttggtagcttttctctgattggttgtgagtagtttggaagtgagaaatacgtgaacactagtatttttttctgtgctatctgcatgtactgtcgtagtgtcgtcttatcgcaacttaggtctcaatgcttgttacactgcatttgaatgtgcatttggttgtcaaacagatattacttctctattcctctgatcatacatggaaatcaagagcgctatactattaggcattaggtgcaaataaacatgaaaaaggaggatgagcgttgagcgatactctaggtccagtcaaatatgttactcctcccctccccccctctctctccttaaacctgctatattccattgagcattcaagtatgtactggtttctgagaaaaaaacatttcaaaatgaacttttaccaccagccgaaatatcattgaatttgatgagtggagtgaacatgctgtgctgaataaagaacttccttggcatttttcactatatttcaaatttacagaaagtatcggttgtttgatgatatctggactgggatactccagtaaccctgaaaaaacgtgagtcgtagagtcacttagtttggagaaactaagttttatccataaaatctgcaagtatcttgtggcttagtggtgaaaaagcatcaagacaacttactcatctgaaaccatgcatgcatgacaacaaaacaaacgtcaataatgtgattgatgctgggagaatacctttacatgttgtcattttgatggtatgctcccatttatggatgatatgctagttgaaagttcagttgaattagttttagttgatgaactctacaagttgtctgacattctataaagttccctgaattttatctatgcattttttgcttggtttgatgctttacccaattgccaggatcatttaaggtgataattaaatatctgtggacttgattaataatatataaacaatatatctaatttgtatttctacatatatagacacttattgttctgcttttatactgctttagttacagttttactaacatattgatgaaaattgaatattatgtgggttgttctttttctccctatccttatgaatgtttccaattttacagagcatatgcttttctatgccagtgaaaaatatccagaagaagacagttactcaaagtacattgcagaggtatgccttatttcgtcaggttgagaattttctttgtcttgtttatatttcttacaaatagattcctgtaaacagctgtaattgttttattgtaatttgttattggatttagctggttgacaatgaaatccttctttcttctttagctcctggatgcatttcttcaagttgttagtggtgactgacttctttcttagaagctttgctggcacagtggaacttgtttagaacttgacaagtagcagcttaattctagaatagctaaaccatcataaaacatttaattgtagtgtttttggttttccttgtttttagacctgatgaaagcctcgaccattatttggtctggatagactaatacaattgtaaaaaaaatcagctttctctaactcaaataatgagttcatggaaactacttgaacttctcttttcccacaaaagataaaattgaaaacaacaaacaattgaaaattgaaagctggtgatagccaaaggaatattttgcttaatatatcctaaatcctgaactaacaacaacctgtcaacattgttagactgttagtgtgtattgggcctagagcccagcccaagaggcccattagggttgtagccctatctccaatcactgtaatgtgtagtattttttcttcctctatcatggtatcctgagacaggttctccttagagccttgtagctgctgccaccaccatggccgacgtgcccctcttctcccctggcgtcgtgacgtcgtctcttcctcctcctctccctttagccggcgcgctgtccccttatgggcattcgtcgttcactgccatcgctggccttcccactctcactaacgctgccctggctcgacacatgccgttcgcatggctgccgctggtgcgggcgcgtgtcactgctgccacaggcgcgggcacagctggcctagccgcggctgcttccccagcacccttgtacttgataatgtactaacaaaagttaatgttcaaagtttactgttcatgacttctccaatccttatatatatatatatatgactaaggagggagtactatttatcttgttctatactatcatggtgcgcttgcagatttcatacactcaaaagtaaaatacatgagcagtccttgaacttgtcctgggtttcatttaggtccctgaacacccataagtttatttttaggttcctaaacttgtccttgagtgtcttctagggcccaagctctttttttcttctcgaatacgtaggagagctgcatatctttgtattaataggagaagaaaaaaaggcacatggccagaatcatacaaaaaggaaaaccaacacacacacccgcaaacacacacacacacacccaaaagatactaggcctgcacacactccaggccaccagcacaccgcagacgcacacaagcggtgcagaagaagagagatcctcaaatctaaccaggatcaaacatggctcttaagtatttagcccctgccaagcgccatagatggagctcatccctatatcctccttccagagaagaaaagcgaggatgcttcccctcaaaaacacacttatttctatgcctccaaatgttccaggctccaagaatgataatactactgaacccctttctcttgtttttatggaccctgtgaggagctttcctccaccagtccacaaaacaagtatcccttctcttaggactgatattattaagaccaaaagatgataatatatcatgccaatataagggcccaagctcttaacatgccattgttaggtcggacttgtctcgtggtgtcatgagtgtcatctaggtcacctaacttgccatagtatgttgtctaggtccaaatgggccctgatcatctccatgccctgagttgtatgccatggaggtttggtccacacctcattattgactgcggtgagaactcactagcaaagcagccatccgcctaggtgttcggcctagccaccttcactactgtggatgttgtgaccttcgatgtggatgatgatgaaggcagaagtttggatggggatgcagtgccgcttggagtgtggagagaggaagagggaaagagatgtgtgagcatggaggtggacggtagaggcttacatgtgggaccacctttgtttggacctggatgacaccatatgataagtttggaacctggcaatgatattttgagggactctaaaaatacctttttagagttcggggatctggttggtaccctaggacaagtttagggactacccatgcattttattctacactaaatttatgtcgctatgtgttgcttatggtaaagtgcttggataatgggtgttttcttgtagcatggtggttcaacgaatgctttcacatcttctgaacacacaaacttctattttgatgtgaacagtgatagcctgcac

SEQ ID NO: 196123 - DNA, 688 bp, Zea Mays
gagctcctcaattgttatggagcggatataatctgtcttcaagaaactaagatggcacaaccttcttcgcgtgttctcctctctatgttggggtctgattttaccggttcattggccctgccttctaatggttcgaggggtggaatccttattgcttggagacgacacatggggataactggagctaccaggacagacatccatagtatttctgtgcagttttgttcagtggagggacaccagtggtggcttacttgtgtgtatggacctcaatctaatgaagccaagattgaatttctgcaagagctgagacatattagagcagcttgtcagggcccttggatgattactggggatttcaatctcattttgcatgccgaggataaaaacaactcgcatattaatcgggctatgatgggtcgattcaaaaaattggtagatgatctcgctcttaaagaaattccactccatgggcgcaagtttacttggtctaatcagcagaatcagcctactcttgtcaaacttgatagagtcctgtgctctattgattgggaggagctgtttcctggtgcagtgttacaaagtgtggcttctgaagattctgatcactgtcctttattattgggtctcaaagattgcaaaggtgttaaaaggcgcttccactttgaatcattctggacgaaaattg

SEQ ID NO: 196124 - DNA, 878 bp, Zea Mays
gaaatactcatcagttttggctcctggacatcatgaaggtctgaagtaagtcacccatcctgttatgtgtgcttaaagcttgccatcttatgagcagattatcatgttaaaatcatacacaaaaacatttgctcaaagttactgtttactttatgtcctgtgcctacccttttcaatttgcctgtttctcttttttccatatttacctcttgagatctatatatacggaacaacttttatctgtatcaatatattttgttatagttctgccaacttggcgattgaaggtcaatatggaatatacttcctctaggttctaaatgataatatatctattgcaattggtatttagttttggttctagtaaggtactatattggtgggagtggcatgctgatcagattaacaacttggtcaaattttgtgcttttcatgctatctattctgtagaagtaccttaattgatgttttatgcgattttcaggaaaaatagtgactctggaatttcttcatgggactggaatttaagtggtcaacactcgacctatcatgcattgttccctcgggcatggactgtttatgatggtatgccattgtagatctatggtaacatgcttaaatttgcaacctacgcaaggaatttgttgtattttttaagttcttaccaaagagactgttgttttttaatagggcactgtaatgctaatgcaataaggtggcagtgtgttgatagcacagtgatttcgacccctttaagattttcttaatttgttgcaggtgaacctgatccagaccttaaaatctcatgtcgtcaaatatcacctttcattcctcatgattacaaggatagcagtcttccaacatctgtatttgtgtat

SEQ ID NO: 196125 - DNA, 834 bp, Zea Mays
atttggttgatgtaatagcatcctcttgtcccccgaggagcttgtctcgaccaagatctaactctgtacgtgttggtggaaacgctgaaggacatcatatcaagcctgagattttgttaaatgtttgtgaactactgtgcttttgtgtagttcatcatccctacagaattaagtactactctgtacaaacttctttcattgtaccatgatacttctatgatctttatatgcatgtttctgaatgtttgttaatcttgtataggtgcaattttcttatgaataatgctatcgagaaaatccttacattgactcaacggagggagaagtttttggttgtagcagctgttaggtttatgcgtactattatatccagaaatgtaagacttttggtttttttcttcttctttttacattgttaaaacattggaagttcccttgaagttatgcactatcatggttgaagtattcctttgtatcctagctcttgcagagctcattttatggtagatatagtttccagacaatttatttgtcattgtttgattgctttatttgctggattctctaatacaactatcagggcattttttttttaatttatgctaactacaatgcagatatatggctaactaactgagctccattgtgtatgttattgaaacaagcagctagttatcattcttgtatcccacttgatgtatcctttacattttgtaggatgagcatctcattcgccatgttgtgaagttcaacttgttgaaaccaataattgatatctttgttgacaatggggagaggtacaacatgctacattcaggagtacttgaattgttg

SEQ ID NO: 196126 - DNA, 687 bp, Zea Mays
gtatgtgcagcgtcaaggcattgactttgaagatgtgtttgccccagtggcacgacttgagtccgtaagactcttgttagcgctggcggcgagcgaaggatggactgtccaccatatggacgtgaagtcagcctttctcaacggcgtgctgaaggaagaggtgtacgtcgctcagcctccggggttcgtcgtctccggcgaagaagggaaggttctgcgccttgtcaaggcgctctacggtcttcgtcaggcaccgcgcgcgtggtacgccaagctggatgcttctctggcatctcttggttttcggcgcagcatcaatgaacatgctgtgtacactcgagggaaaggccaacatcggctgatcgttggtgtgtatgttgatgatcttgtcatcactggtggagatgtggccgtaatcaagcacttcaagcaggagatgaagagcacatttcaaatgagcgatctgggattgctcagttactacctcgggctggaagtaaagcaatgcaagggcgggatcgccatcagccaaggggcgttcgctcagaagattgttgaagaagcaggcctgaagaattgtaatccaagtgccacgcccatggagacacgcccaggactgagtaagtcgagtacctgtccagctgttgattctactgcatacaggcgcatagtaggtgctcttcggta

SEQ ID NO: 196127 - DNA, 645 bp, Zea Mays
attggaagacgtattgagagcttgtgcccttcagcatggtagtagttaggacaagagtctaccttatgctgagttctcatataataatagttaccaggccagtctgaagacgtcactgttcgagactctatgtggcaggaaatgcagaactcctctattttggaccagactggaggaagatagttctttggacctgaacttattcaagaggcagaagaacaagtccgtataatttgggagaaattgagggtagctcagaccaggcaaaagagctatgctgataatagaagaagaccactagaatttgaggaaggggattatgtttacctcaaggtgtcaccacttcgtggaatgaggagattcaaagttaagggcaaattgtcccctcgctttattagaccattctgagtttttttggcaagttggagagatggcctatcaactcgagctacctgataatctatgggatgcgcataatgtatttcatgtgtctcaacttaagaagtgtctccgtgtccctgaggaatagttaccaatggaagagctcagtgttcagggtgatttgacttacacggagtatccgatcaagaattcttgatactttgactcgagttataagaaataaaattattaaggtgtgcaaag

SEQ ID NO: 196128 - DNA, 1327 bp, Zea Mays
cacaagcatcaatagcactagagattgtaaactcatttggcttcaagccatgcatggtcatcttgatgaatgcatttgtggcaccattgcaatcaccagcttgcgcatagcaagtcaacattgcagaccatgaaacaacatctttctggtcaatcattttgaatatagaaagagcttcttcagtgctgcaaagcttagagtaagagaccataagtgcagttccaacagttggtgtacactcatagtttgtcttgatcacctgggcatgaatttggggaggaaagctggcctctgacactgtcagaattgtcgagtaggttaaatcattcggagcaacaccatcttctctcattctgctaaaaagagcagcagcaagaggtatatcaccgttctgaatgcacccatcaatcatagcagtccatgaaacaacattctgagatcctgacatcaacaaaaatacatccagagccttatccagttgacctgctttgttgtaggcatccatgagggctgtcattacattgccatacgaatgaaaaccatgtttaagaacactactgtggagttgacgtgccaggccaaggtgtttaagatttgcgcataagttgatcactgttgagtatgttgactctgtaagcattgtaatactggatcgtgaatcatggaacagttgtagggcttcaagatcacgcccgttcaacacaaggcccgccatcaatgtgttccacgacaccatgtccctggtctccatcctacaaaacacgaccctggcctcttcaaccagtccacactttgcatacatgttcatcagagaattgcacacaaacacagtggagcagcaaccaaacttaattgattgagcatgcacgtgctgcccaagatcaaccataccctggctcgccaccattgagagaacactcgaaaatgtgaacggattgggccagaccccctcagcacgcatcctgaagaagagtgacataacatccaataacactccagcctggatgtacccagtgagcaacgatgtccaggtgacaacattcctcttgagcattccctcaaacaccttcctgccgtccagaacactgtgccagttcatgtacatgtcaacaagagacgtgccgaccctgatgtcgccatgatcatgtccacacctgacgcacagggcatgcagctgcttccccagtactctgtctggcactgacccacagattttgatgatgcctaacagtgccccaccgccaacacacctgccctggcggcggtgcgcatccaagaagtggtctagcgcctggtggacgaaaccctgccatgtcgtcgagaaggg

SEQ ID NO: 196129 - DNA, 1097 bp, Zea Mays
aaacaaaaaacactatcagtgttaaccagactgacaccgcatacaaatatcctacaaccaagcccaagatcagtgttcaaattccagcttcctatactcccaacatggcaccaccccaatttatgcttccagtaccagggagatcaatgcctgtggcatttcaacagaaacaacctcaagtgcccattgaattcaggggcccaggttttcaaatgcactctattggctctgtatctagttccttgcccgtgaagatggctgtccctctgggtaatgcacctcacatacaaccgatgtttgttcatggtgctcagcctcatgcattccatcagcaatcctttattcaccatggacaaggctttggatgtgctcctccatctaattgttaccttcctcagtttggcaacatgagaaatgtgcaagaattatctcagcagtatcctagaagcggtgatgaacataagagaactatcaagataacacatccagagacacacgaagaactgatgctagatagacatgggcattcctttataaatgttcctgcttctgggcagatgcctttaaacaatataaaccagctacctcactctgttcaaacattttctccacttcagaaagtgtattatcctagaccaggaacgtacaattcagcacatgtctatcttcccaactccactgatgtccctcttgcaagtaggcaattttcctccaaaattcaaccttcgatgcatggttttgattccactaatagcaaccagccatttacttccatcagacctcctatgccgatatctcggcttgatgctacttccgggccattaacaaatttgcatactgcttccgaaatctcaaatttcaaagggatgtttccatcaagcctacctgctccagttcatgttgagctaaagccgcctattacactccctgctgaaatgaatagtgaatctaccatatcaaatcaacaaaattattgcaaaattgggctagaaatgtcccttgaacctgtaaatttagtttatgaaggaaataacaaagattctgttgcaacttgtgacataagttgtaatttaatacctcaaccagtttcaaccccg

SEQ ID NO: 196130 - DNA, 306 bp, Zea Mays
gaagaagcagaagagccactgggattttgttctggaggagatggtctggatggcaaatgacttcacacaggttcttcctcaagtgttccttctataaactgaaatattttgcagctccccatcgttgattcgtaaagcttatttgaacaacttgcttccataacaggagcgtttgtggaaaaatacagtcgcagcacagatgtcccattggatttcttctagaggtcgagcggcatttgaagaagcaagcattcagagaaagcagaaatctgttgctagagttctagccaatggtattatgaactt

SEQ ID NO: 196131 - DNA, 286 bp, Zea Mays
gacagagagatcacagcggcagcatgcaattaagaatccaagaacagcagacgctaggggggttgtggggaggcaacgtggatgctcacacagtgagcagagctgctaggccaggcgcggccgggcggctgcagcgagcggtggcttgagctttataacgggcggaggagtggaggacacggatggatggatggatacaggaagcaaggagcaaccccgcgggtggggtccgagaaaaggcgggcggcgaaggaagaggaagagaaggcagcagggtaagtggtgg

SEQ ID NO: 196132 - DNA, 1201 bp, Zea Mays
aaattgcaggacgatgtgttcttaatttgcagcaatgcgatgcagtacaatgcacctgatacaatttacttcagacaggtatagaatccttaaaaactttatgcgcttacaataccatgatttgattattggcattgaacattttgtactatgcttgggaatgtaggctcattccatacaggagctggcacgaaagaagtttcaggaactgagggatgagggcataccaacagaaaacccgattaagattggacagaaaattagaccaaatttctgcactggagcactggttaagaaacctgttttgaggtatccagatgatgatatagatttgtcccacaaagagaaagttaagagacccaattcaaataatgtggatgatgacatgagcttcaaaaatcaagttaaaaaaaccatgtccaagaattcacaggatcgaagttgcttattacagaaagagcgaattaagaaacccattcccaggaattcagaggacaatttaagttcctcattccacaaagagcgacctaagaaactgatctccagacattcgaaggacgacccagactccccatctggcaaagagcaagttaggaaagtcatttcaaaaaatttagaaaatgatgaaagctccccgttccacaaacatcaagtcaagaagtccactccacagagttcaaaggacgacttcttatcccagaaaaaacacattaagccaattggcagaaatggagaagatccaggtttttcatcccgcaaaaagcccattgaggatccagttcgcacaaatgttgaagatgcaggcttctcatctacgaaaaggctgtctgagaagcccatcagtgtaaacggagaagaggatcgtgaccattgtcatcaggagtcatctaaggaaccgagttgcggagttgagcaggatggtcaaggttactcatgcgatgaagaggctgtgaaaaagccagtttgtatggatagccacgatgcccaaggttcagatatctctgctgccactattgcttctgtgggagatggctctaatggtttaagcatgtcacagcctaatgccactgaacctactggttgtcctcttaccaatggggttatagacaaagacatcagctctccactagatgaaataagatctgagaagactgacgatattttgggtactgtatttttttttctggcatttcccctcgac

SEQ ID NO: 196133 - DNA, 583 bp, Zea Mays
gttttgcttgtgcatgaaaagaaaggagcaaaaaaagtagcaagggtagaatttccttagttgttcaatgttctaggtgttgaataggaggttgctgctattgtccttgagccggtaggttcccgtgcataggacttgggcgacaatgaacgacccctctcatggcggggagagtttgtgcttgtccttggtggtcatggcccttcttagcaccagatcgccgacgattaacgatctaccctggacctgtcggtcatggtagcatcgtaagtcctattggtacttggaagagcacacaacaaccatgttctgtgcttcgtcgaggaggtcactggagatttgggcgtccgtcgttccttgcctgttgctgaaggcttggacccttggggatccatactccaactctatggggagcatcgcctctacgccaaatgccagcaagaaagacgtgcagtctgttgccctagagggtgaagtacgtaggctccaaaggaaggttggtagctctatcgcccaatatctggtgagcttcttcaacttgtcaaagatccatggattaagccttgaagtattaggatgttag

SEQ ID NO: 196134 - DNA, 435 bp, Zea Mays
gttcaatagcttacagtttaccagactggttactttcagcgagctagatgaccccactttattgagagggtaattgcaggcataataatagtgtcaatgtctggggtaaagtgcggttgtttgggggtggcgacagggcagaaaacgtctattggcaagtggggcggatttgtagtggaggaaaataagatggaaccgcacacccgtaactaaaggggtccctctccctctctatgaacgactcttgcaactcgggagtcatacagtatgactactgattgatacttgtattgctggtcaaggcagctaaagcgcataatatccctgtgcgcacgacagacccatttcgttaggcatttactagaagatggtcttacctataggcctccttgggcatgcggcaggcccaggggtattgttagcgttcgacagatg

SEQ ID NO: 196135 - DNA, 443 bp, Zea Mays
gtgcagccgaactgtcttgacataagagaaaaaattagccaaggtagtgaacgtttcagatttgaggtgaagagggaacatccaaagaaaatgcgagcaatcatcaagaatagtaagataatatttgtaaccggacacattgtaaatacaataggtccacagatcacaatggattaaatcaaagttcttgagagctcgcgaagtagagtttgcaaaaggtaggcaagtgtgacgcccaacttgacaagcatgaccgatggaatcactagtaattttattacaaccgacagcagaagtactagtaagtctggacagagcctcatgtccaggatggccaagacgacgatgccaagtagtggaggagacagtggcaacaagggcgcaggacattgtgggacatattggagtagcgagggtgtagaggggcccgaagctattgtacc

SEQ ID NO: 196136 - DNA, 429 bp, Zea Mays
tatactatgcctcgtaggtggagagtgccaccaccttctgcttctgggattaccatgaaattgcgcacaatctgaggaagaagatgatgctcgtcgtgctgcgccgcccgtcgacatctcctgccatctcgctgtcgctgtaccctgtcagctccagtcgtccgcctcctctcttcggatacacaagcccatgctcgatcgtccctgcaatatagcggagaaggcgcttgatcgcggcgaggtggtcctcctgcggatcctccatgaaccggctcagatagccgatggcatagccgatgttcgaccgcgtgtgcgctagatagagcaaaccgtcaacgatgctgcggtagctcgtcgcgttcacccttggtgtcggtctgtcctttgacagcttgagcttctcctccattggggacaagcacgacttgc

SEQ ID NO: 196137 - DNA, 362 bp, Zea Mays
caaaaatgttgcaatgcctcgtccttcgctagagtttgtgtgtgtcagtagcaatgccgacatgtcctatagtttcctcgcctactcctcgactagtgtagccaccatcactgtgtcatcctcaatgtccccacctttcctctcatcccatatatctatccacaacaagaaaacctaaaagtctaatgacctaattaatttacgatggctcctacatacggtttcagacataatgttattgccaacaatcaccccatggcggtcggacattactcttaatttccgatggctaacattgacgaccctcgaaaattgtcctatttacgacggctatgatttaagctattgaaaatagagtaaac

SEQ ID NO: 196138 - DNA, 562 bp, Zea Mays
caacttcatcaactggtgaatcctccaaatgagaccttcccattcggacccttgctcttttgaccaatggcaagtgctcatctccatctgacttgcatacttcattctttgaatttggagaatctgaaaggatttcactgtactcagcacgtaattcatctttatttggtgttgtacaatcttcataatgaggaacaggttttctatctgattttcttattctcctgaaaattacttctgtattcatgggtagattagatgtgccatttgatttcaattctgtctctgaagttccattttcagatgcttcactgttacaagtactatccgccttaacaggaggattcaacattttgctgccgttacaagtagtccccaaagttacaggttggttggaagtgcctctgccagaatgcaaccagacattatctaatatagaaacagaacctgagttagctttgtcatccgcatgcctatgacgactggagcgttccttattttcattaggaactgacccaatagaagacaaattggtatgatcaaaaaaattaccagaaccttg

SEQ ID NO: 196139 - DNA, 448 bp, Zea Mays
cgcgacgccaaaaaggaggagagaccgccacccccacgcccgcacggcccactcagcgctctccacccccgtcccctcgcggcggcggcggagcccgagcctgagtcctgcccccccgggctaggttggtctccgcctccgccctccagtctctttggcacaacctgcagccgctggcgcaggtggacatggatctgccaagcctcgccgtcgtgctgcgcgccgcgctcagtcacgttcctgaggagcgcaaagctgcagaggagagtctcaaccaggtgagcgcctcgtcgccttccgtagtctcgtcacccgatggtggacctcagctcctcctcagtatccaaacccctctgaaggcgtcttgttactgtttgatcgcgagtcgatagctgggtcttcgaggtgatccgcgcgcgaatctgggggctcgatgtgcgcgaatctg

SEQ ID NO: 196140 - DNA, 1131 bp, Zea Mays
ggcaggttcaaatgctttgtaatggtcctgataacccgtgtaaggttcgaatgccttgtgactggattgttgaatgtcagaagtgctataaccgctctgaatacttggcgattcaacgcccttgcgtccaccatagtgatcagtaacagtttcagctgcattaaaaccagcccgttggttcgtagatgaactggtagaatcagcattcctgtgttgttgaaaaccataggaactactagccaggctgttctctgtagcacattcagatcgtacattgttaccaaatgcatcggtaatctgccattggttctgatgagcgaaactattcgagaatgagttgtgttgggtgacctgatcatgggcagcaaggtcctcattttgtgcggcattatagcctgtcagagaggaagttgcagcaacaccgtcgtttgcaataacagtctggcccatgctagctgttccagcctgcatggcggcctgctggtataactcgagggagtgccactgctgggtgttggtgtcgaagtaccaaccagggtactctgcatagaagagcatgttgggtgggtactctgaggcagccccttggccccaacttgagacagcaccggttgcggtagtgccctcctcagcaattgtctcaagccctgaatgcactgaattgtgcagataagaggcgtggagctgctgctgctgctgtgcataccgagtgctgttgtccagcacctgagctgcattcccagttgaatttacactgtcgtcaagctggtaccattgctgggaggcctcatcatacttccacccagggtacatggcctccaaagacatgggatctgctgaatccactgcagtgctgccgccgccctggtcgtgctgaccactgacattatgctgattggaggagttgctcccggcgaagaagtcctggtccgtcacctcggcggccaagctctgggtcccgccaaagaaggcgtgatccgaggccgtctgggtcccggccgtggtcacgaggaagccgtcgtcgtcgccggcgcctcccgagagatgagcaaatgggtcaggaccgtcgtccgcgccacctccgaaggaagcccactgcacctgcttgaccgcagtgtggacgccggcgcc

SEQ ID NO: 196141 - DNA, 633 bp, Zea Mays
atattagaatcacaaagaaacaactaaccagtatcatcatcgtttgcattccttgtcctatgttgatcacgatatgcgtctacttcggccatggaaacattggacttaggaatatttgcatgccatccaagttcacctttaggaaaaaacaatgggtatgatagtgcatcataacatccatggtatgaacggatcccgtggcttgacctatctttcccatgcagcataacactattactgaattgacctctacgttcactcccctcaatccaaactacagcgacctccgaagtgatgggtacaatatataacttctggttcagcgtttggtcaaggttcaaggcgatatggtagttttcaacgttatcaacgtgccccatactcctaaggtgctcagagtatgggtttcccttaaatatttcaaccaactgtttaataacggccttgtctttctcaagttgctcttgacgacatttacgatatctatgctcgagactgggatcatcatcatagaagtaaagttcaaggtgtttatgttccgccccatcttccctaccgaatgaccttacgttgtggtacatcatgccatgtgcacgaaacgtgtagataccacaatccatgtttgtagtcata

SEQ ID NO: 196142 - DNA, 644 bp, Zea Mays
gtttttggaagtatatctatgtgtcaatcttcatagtagaaaacaatatttcgataaaggcatctagaatatgcacttctcttacaattagttctcatgtgtatatacattgcagaatgtgtctctaccttttaaattagtcccttctcagtgtacacagaatttgaggaaacatatttctttgggatattgctcaatcaatcgtttattgccacttacccccctgtgctctctagaaggtgtctctagttaaagtgtagaatcatgatcttcaacatcatcgtcatcatctatcccttgtgtacctgtgtccggggaggctgccaagtatacagtcatgcttaacatgttgtcttggtcgggatccagatgcctaggcgctgtggtggcaacctggtccagggcactcaaacaatcaaatcttgaagacaagataacacttaatcaaatcacaacttaagcaaacaaacataatgaagtttcttatctatgttgatatactcacaatcacatttactatttatctcctccatacctggattgtctgcatatcttgtaggcatagtatgaagtgtactagacaaaaaatgacatttagatggcaaaaggacatcacataaaaccatgttgaaactgtagtgcct

SEQ ID NO: 196143 - DNA, 409 bp, Zea Mays
cagaggcgacagacccgcatgcggcgcaaaagagggcaggagaaggggaggaacgccgactcaatcgacatcgagggaatcaaggtcgggaggagctagcaaaggggaaacatcctcatcaaatgcaacatgacgagagatgatgatgcgatgggtgagaagatctaggcaccggtaccccttgtgatcattgtacccgatcgtggtgaaagtttgaggagcgtggcagaggtgttgggatagcaggcacactcgaaggtgctcataggaggggatggtgtcgaagagggcgaagaacggagtgggatggggaccgccttggagggaagacgattgaggaggtaggtggctgtgttcagcgcctcaacccagtaccgggcaggaagaaaagcttagaaaaggaggcaac

SEQ ID NO: 196144 - DNA, 304 bp, Zea Mays
acctgggtaggagtcaaaacaggtactcttacagaaagtgcccatcgcagttcccgtatatcccgtaaccttttccagtcagacataccagaagcccaacattttattgtccaatcaattgacttctttgaccacagccttcttattgcatccttttcaagtggcccaacttgtgtgccatctttatcaatgtacatccactcttttgaaggttccataaatgcagttgccgcgatgaggttagattgcaaaggaatagctgtccgttcggatgtttcatgtgcaacagtaagcaaatcaacag

SEQ ID NO: 196145 - DNA, 1321 bp, Zea Mays
aataggctggctggacacttgggtgcaatggtttcacccaatcagacggcttttatcaaaaaaaggttcattcttgacaacttcatattggtgcagcgtacggccagatatctccatcaacaaagacaggctcgtatcctcttcaagttagacatttctaaggcttttgattcggtgtcatggccgtttctcattgaggttttgaggaaaatggggtttgggcagatttggtgtgatgttgtgtgtggactgttggcttcttcctccacaagaattttgctaaatggcgttcctggggagatcatttcacaccagaggggccttaggcaaggagacccactatcccctttgttgttcattttggttatggatgttctgaacttgctcattcaaaaggcttccgatgaagggttacttcagcagctatcttctgggactttacatcacaggctttctctctacgcggatgacgcggtggtttttcttaggccggtggcttcagacatcagcttggtcctggagatccttcggctttttggggaagcctcggggctcaagaccaatgtcctgaaaagtagtgtgttccccattcgttgtaccgaagatgatttgatgcgggtccaagcttctctcccctgccccatttctgattttccgtgtcaatatcttggactgcccctgtccttgggaaagctttcaaaggcccagttacaggcattggtggacaaggcagctagtgttctcccaggttggaaggccgacctgatgacaaaggcgggtcgtgctgtttatgttcagtttgttctcacggcaaaaatgatttatgctgcgatggctttggacctccctatttggaccatcaaagctattgacaagataagaagaggtttcctttggaaaggaagaaaacaagccaatggtggtcactgtttagtggcgtggggcaaggtcactaggcctaaagttctgggcggccttgggatcactgatctttggcttttgagcgtggcgcttcgagctaggtggccttggctccagagaaccgatcactctaagccttggtcggttctccctgttcaggcatgtggtgcggtggaagccttgatcaatgttgcagttgtgtctcaattgggtgatggacaggatatcctcttttggaaggatcggtggctgaatggtagaagaatcagtgaggtggcacctgaggttcttgagcatgtacctaagtgtgttgtttccaaaaggctggtaaaagatgctttaacaaatctgaattgggtggctgatataaggggtgcgctttcagttagggcgcttgcac

SEQ ID NO: 196146 - DNA, 572 bp, Zea Mays
cagaggcgtcgccgtcaggatcggtgatgaccggagaggttggctggaggtcggccatggggagaagcagcgccgtagaggaggcgcgcgggggtagagggcaggaatcaggacctaggcggctgataccatgtgagagagttggaagcgtgtgtttgtatattgatgatgatagacagcacatgtacaagtatatataggggaggaaggtgagaggtaaaaggaagccttctacacctaaggaaagatctagagtacaatcagatcctcaatcatagtgattgagatcctcccctaatcctctctatctatatcagagacaatacttccatgtagggcggccggcatatctgccaggcgtcagccaggatacagtttctaacaaggtgaacagccgccagataagaggagataagagaataccagccgccggaacagtagactgcaattggagcaagcagccggcagccctatttagctaaaacccgaagggtttacactaaatgggccttattactagacgtccagcgcacagccaaaacaggccagccgccagccaaccaaaccttaac

SEQ ID NO: 196147 - DNA, 935 bp, Zea Mays
gcatgatctcaacctgggaggcagccataatcctgggaggcttcgttcgctgtttgcttgtttctctacggtactgcagattatgtcttctggtgtggctgagcgaaataacctaagagaacttgtagctgggcctctggaaggtttagctcctcaacttttaaggtgtgcatcagtgatagcctctaaccttggctggtctgagaggatggaagacgcatccaaatgcttggtcttgcttgcagagattctgcaggaaaggtttgctgatttttatgtccattttgtggatgtgttggtccagagcttggaagttgcctcctcggcacagttggcggcagcacttaagactaacctgcaagttctatcactgcaaaatttggggctccatgcagcttctgttggagctttgcttgacttcagttcaattttatctaagtcacgtcttcatccaaaccacagcgtggttgcaaactcagcagctacctacattttttgcttacagcatggattggaagatgtagttgatcaagcaattgcatcagtgatgaatgagttggagctgataaaatctctgctagcggaagggcaagcaagttgccctgatatccatagtccccccttagaattgaacagtgaaaggaaaaacgagtcgaactcaggtgtgcattgttggccacaatattcagaggatcagttgctttgcctaatgaaatttgatctcaagattcttctggcgactattgcactggatacaaaaaagagaaatgagagaacaactaacttgatacaattcatcttaaagaagcttgacccatttggtgcccctttccataatttccttgagatgcagtttcagattttctctacactacacaaactgagcaacatggaactctcaagcaatatgccagcatctgaaccatttgaaagag

SEQ ID NO: 196148 - DNA, 607 bp, Zea Mays
gaaggtctatgggtatcctatagaacaacttcaatgcttgaaatggatctatatttgtcaatattgaaattttcaatacatgatatccgtccagatacgaagtctgagatgcgtctgatgcttggatcttgttcagagactgctaatctgtgcgttgatgactcttcaactgatgcaggggtttcgaacctcacaatgctgatactggattatcgttcgcgttcttcttttcaatcatttgttataagaatacagcagcctcgtatacttgttgtcctggattttctgcttcctgttgttgagtattttgtgccttctttaggctcgataactggcagagaggaaagcttagacccgaagaatgatcctcttatgagggctgatgatattatacttactgagcatgttttcttgcaaaaagaggattttattcaactatctcctgtaaggcagctaatagttgatggttgtgatattgacgagttcatttatgatggctgtgggggcactgtatccttatgtgaggaatttgataagaaaggacaggtatactctgggattataatcataattggttgtggcaaaagacttcgattcaaaaatgtca

SEQ ID NO: 196149 - DNA, 854 bp, Zea Mays
tctggaatagcagctaacttttcaaacctcagcgcaccttctattggcaacaccatttcctctgattccactgtttcagggtcgattagttgccttattttacttgcgaagtcatcctccatgtcctcctcgttttcctgaacaatttcctccatcacaacttcttgactcagattcgttacagcgtgtatctccttcgcaactatctggctttcagctgctgccaatctgtttgtggtttttgatgtatcgttcacagaccaaggttctccctgtccctgctcagtgcatgaaggattatgcttcctccctgtcgtgttattcctctcattcatcttatccatcttcttactacttccttcatgtgcatctgagtcatcttctttgttgtccatatccatgggtgcagaatgaggcgagttgtcttctatctcaactctgaactgaacttcatataataaatctccaataaccacatctactgagtcagggattaaattgggatcaatgaccatgatctgtattcttcctatgccgtgttctctagtgaaaagcatgtcaacatccctagtagtaccgagtatggtccccaccatccacagcacggagaagtcacacaattcacacggtaatccttttacccgtacccagactttaggcagcaccatcttatgctcattatcacctctgcgttcctcaaaaatcatcttggcattgccttgttttgtttgtagaggtccccactcaaccattctctgcagatcagtttgtgaagggaatgcaactttaaaaatcttcttatccacttgctggactgcccaatgccaattacctgttattaatctttccaattc

SEQ ID NO: 196150 - DNA, 626 bp, Zea Mays
ccagacgccgccctccggcatcggcaccacgctggaggagtgcctcaccatcgctgaggacatcggggagttcccgctcattgttcgtccggccttcactctcggtggcacgggcggaggcatcgcctacaacagggccgagtttgaggacatatgcagggccggccttaccgcgtcgcacactcagcaggtgctcgtcgagaagtcgctgctcggctggaaggagtacgagctggaagtcatgcgcgacatggctgacaatgtcgtcatcatctgctccatcgagaacattgatcccatgggcgtgcacacgggggactccatcaccgtcgcgcctgcgcagacactcacggacaaggagtaccagaggcttagggactactcggtggccatcatccgtgagattggtgtggagtgtggtggttccaatgtgcaattcgcggtcaatcctgcagatggggaggtgatggtcatcgagatgaatcccagggtgtccaggtcgtccgcacttgcctcaaaggcgacagggtttcccatagccaagatggctgcaaagctgtcagtaggctacactctggaccagattcccaatgatattaccaagaagactcctgctagcttcgagc

SEQ ID NO: 196151 - DNA, 686 bp, Zea Mays
gtcaatgggagcagccgcctcaaagagttcaggcatgggtaggagctcaaccatggacgtatggatgttctcgggatgggaggccatgtcaggcctgtcgcaaccactgatggagtctcagatcgtcacagaaaccaccgatcctatggaagatgatgccaatgtctattcaacccctcctagatcataaatttagaatgttctaactgaaactgaagaccaaggttatgactcggtggcatatgggtttaacagcatgatctcacatcaatatgccataaccatttcaataaagtagtggatcctagtggacctaatctctggactccacaactcgctacaactgaattcaatttacatgatgatcaggggctcatccaggcctatcccatagtttactccagaaggcgccgtcgcaccagaagctcaccgccaaccgcaagatgttcaccaggttcccatgatgctgcagctgttcaaatgatcttgaaggccaccaaacgcattgatgcgctactgcctccgccggttattctcaagcgaagagctaaagctccaccctctggtgtgtctcttaggcgtagccggtgtgttgctggagttcaaccttgttccccaggacctataatcagcacagctcaaaaaataaaagtcatgagatctatgggatttggcaatcaagaaaa

SEQ ID NO: 196152 - DNA, 625 bp, Zea Mays
cctcctcctctagagcagcagacatttttgatctgatacactgtgatgtatggacatcccctgtaattagcatttctggctataagtattatttactcattctcgatgacttctcgcattatttgtggacttttcctttacgtcagaagtcggacacttttcccaccctgtctcacttctttgcctgggtctgtactcagttcggtcgcaccatccggagcatccagtgtgacaacgggcacgagttctataacaatgcgtcccgtgacttcttcctctctcgcggcatccacctccgcatgtcatgcccctacacgtctcctccaaacggcagggctgaacgtatgattcgcacgacgaacgatgtcgtgctctctctactctttcaggcttcccttcctgctcactactgggctgaggccctcgccactgccacctacctcctcaaccgtcttcccaccaaggcggtgttgcccaccccactcctttgctcttttcggcatccacccctcctataaccatcttcgcgttttcgggtgcgcttgctaccctaatctcgcctccactgctcctcataaactagccccccgctccactcgccgtgtcttcctcggatacttccccg

SEQ ID NO: 196153 - DNA, 412 bp, Zea Mays
ctccagtgttcaatactctgtgcttccattttattatacttgtgatgatgatgcaatatttctttcttcagctttgcagttcatggagactgatgttattgcgatcattaggccacaatgctctcctattgcacatatcatttcgtatgtcgcaaatgagctccaagttcctttgatgtcctttgcatcggatgcaactctgtcatcaatccagttcccgttcttcgtgcggactatgcccagcgatctctaccaaatggcagctgtggcggcagttattgattactaccaatggaagatagtcactgccatatacgttgatgatgattatggccgaaacggcattgctgctttggatgatgaacttactgcaagacgctgcaaaatttcattcaagattgggttccgttcc

SEQ ID NO: 196154 - DNA, 502 bp, Zea Mays
aaagttttcttctgtaaacaagcttgtgagcgtgcggtaccggcgatggcgtgggaccgagctgggttctgcggacacaatgccgaaaaggctgtcactggtgtacctatcgctcgttccaaacttccaatgctgcacggggctgtatgagtatgacagcttgggtgtacgtacgtgtacccaatggttcagctttcatatgattttagctttattagttgcaataaccaactaccgctagctttagattgtatgatatttgttatctagaaggaagacttcaatttatggaataactcaaccatgcggctgttactaaccttagggaatttagaagataattccaataggggaacagagagcctcacatggtatatactttgttcccaaacacctccatgtattcaaaattgtggtattctaaaactgtggtattgaaaactgagatcatgtcatggcatttgtatactgtggtatttgaaataccatggttttgaaaaac

SEQ ID NO: 196155 - DNA, 491 bp, Zea Mays
gaggggggtggagttcaacgacatcatcgagcgtgtacatcccaaaggaggcatcgaatgtgctcgggcgagaaaagatgttctggatcactgagaggaaagcaaggatgtcaaggtcaagccagtgcaattctgacaggggaaaactgtgcttcagttcttagtttcgctgcttacaagtgacgttctgaaccagctgctccgcggtgaaatctagggagaaccagccatggacatcctctccctgcagcttgtacgtcctgtccatcttggggaagatctcagcgacagtcgtcgagttatcaagggtcagccctgtcttacagaagcctatgcggtcgcttgagaattgtagatcacataacagaacgacgtcaggcaagctggtagacaaggcaagctggtaggccatctggctcgagtcaggaaacaaaccagagaatcctcctcgagctacgacttgagggggacgacctgtagtgtaggatgac

SEQ ID NO: 196156 - DNA, 582 bp, Zea Mays
gaaggaataaaatgaaaacatgtaaatccaaatcaagataaagtttcgaaaaaaatggaaaacgcgtcagttatcaatctcctctctccctttctatctccgtccccgtgaacccgcaccctccagcctcccgtgctccactggcgcccttctggaaccctcagccctcctaatctcagccgaagttattaacctctttttttcttatataggccaaattagttcccctcccgcgattccaaggctttgctcttcgatctcagccgcgccgtgttcttcgcggcgagttcggagcgttggtgcccaatccgtcgaggttgtgagttgcttccgctgctgctactgccgccgccaccgctggtgttagtgatctgatctggtgggcggattgcggcgcggaggtggaattgttttggctctggggaaagctagctatgcggattgaggcgtcgccggattgagcatgaggggcggggctgctggcggtggcggtggtaagcgtggcgcggatgatgggatcgccggatgggcggctcgtggagttgttcggtgcggtgaagtcgtggatgccgcggcggggcg

SEQ ID NO: 196157 - DNA, 310 bp, Zea Mays
attttgattcacaggctgattatcaacagctggaaaactaccaggactgtgagttaagagctcaagaatttcatcgcatagcactcaacctatgcatgcaacaagaaccaacattagaagggcataatgctggaattgatgctttgctattagccgcagaatgttatgttaatccattttttctattgggattccagtctaatttagagcctctggacaagattgaacgtattcattcagagttgatgcaagggaatgcttcctctgtatcaaaaaatttgcacttgaaagatttcaacaaaaaaacaat

SEQ ID NO: 196158 - DNA, 298 bp, Zea Mays
tgagccagtttgccacgatgccccattctcgatgccactcaccatccccctatctcgacatgcgatgctacccgaccccttcccgatgcccatccccttcccgatgcccccacactgctcgtcgtgacgtcaaccctcctgacaggtccaatctcgctcgtcgcgacgatgcgactagtccccggtgaccgacgaaccgtcaagcactagctctcaacaggagacatcgtttggtcccgtccctttcttagtgtccttgtccttcgagaagatcgacattcgatagggtatacacact

SEQ ID NO: 196159 - DNA, 340 bp, Zea Mays
gccggcactttgtggcaccaggctggttgagctcgcacgccttccattcacgtctacagtccaagactatgccaactgcttcaacgtcgtgttgtgccatgctggtaacctctccgccactcagaaagtcgacctgtttgtaggcggtctgccagaacatatcaagatagacgtagaactccgtgagcctcaggacttgcagaaagccatgtatctagctcgagcattcgaacatcgcttgaccgctacaacgccagggggcacgtcgccgaccagatcctcaacttcagacgcctcctcagcacagtcgaggcccttctgccggctaaccccggctgaa

SEQ ID NO: 196160 - DNA, 386 bp, Zea Mays
ccaccatgatcaaggaggcaatcgaagactggaggaggaaccagcaggtaccgtactactatccaacttcacttcaatttcttcttcttcttcttctctgtcaaaacaattaatttgattgattacatactcggtctgtctcggtgagtgaaatgaatcatgaaagaatgaatgatccgttccaggacacggaggtgaacaacaggaagactcaggtcttccaggtcaacaacatcggcggcggcggcggcttccgcgatgccaaatggaaggacatccgcgtgggcgacatcgtcaaggtccacaaggacgaattcttcccggctgacctcgtcctgctctcctctagctacgacgacgccatctgctacgtggagaccatgaac

SEQ ID NO: 196161 - DNA, 334 bp, Zea Mays
atttcccgtcctccacttctcttcacaactttgatgttatagtacaaatctataatccatgttacacttgaatgtcgattacaggtgtgattgtgagaagttggagaatgccttgataaagagggaaattaatacaccagaaggagtgattaccacaacagttggtccgaattctgctactattagccgggatggtttagcaaagcagatatactctcgattgtttgactggtaatagatttagcaatgtattccttactaattatgtaattgttttctaagtacatacacgtatactatcgcaggcttgtaaacagaataaatgcatcgatag

SEQ ID NO: 196162 - DNA, 317 bp, Zea Mays
cgatgattgggaattcacggcggcgacggggcaacctgctgctgatcaggatggaggcggaccagggcatgcggatggatttggtaagatcgaggtgagcctgccgcacaagttgtcgtgagacgtttggacctgggagatctcgttgccaaattgtcgtgagatgtttagacttggagtgtaatggcatcgactctatccaatccagtatgcgatccaagctctcaggactgttggggggagatattttgacatttgacacccaattcacatgtctttcaagatttgacaccccctatcacaatgacatacggggt

SEQ ID NO: 196163 - DNA, 621 bp, Zea Mays
ccagaggctaatggttaccatcacagcccccatggtgtggaccagagtcaggttgtggatgctgataagcatataaaccatcattccacagacgacaatgctccctccagcgcttcaggccacagacatggtggtatcagccgtcatgcatccacatcttctgttgatgaccgctccatcaagtctggtgacgattctgatggggccgagagtaccaatggcagaagcagtaacacggagatctcgtttctagaaaatgataccgtctggataccacctcaagcggcagataaggaggatgaggcccagagttttgctacaagcattgcttatgacgacgacgatgacgattatagtgatgggataaagtggggccagtcaagtttcccatcccctggtaagcagcatgacgccggcactagcaatcatagggaggtacgagaaaaagcgatgctagaagctatgaatggccagctgaagatacttgtcagtcggtttctcgcatctgttggcattccgtcttcgaacgaggaggctagcgatagctggcttgacattgtcacctccctgtcatgggaagcagcgctacttatcaaacctgatggtagcatgggaaaggaa

SEQ ID NO: 196164 - DNA, 296 bp, Zea Mays
gtcggtgttacgaattgagctgcctccaaacaaaaggcaaagataaaaggcaaaagctggagagagagagggacgagggagggaggccattgatagagaccacgagctgttctagaagtcaccgcgctgcagcctgcagctcaggggggcctgttccctggatctcgccatcgccattgccgctgccccccacctactactcctgctcctagtcctacacccctcctactccaatccaagaggtgctttggatcgcattgcttcgtgctagagttcggtggtcagcctgcgtgtgg

SEQ ID NO: 196165 - DNA, 1263 bp, Zea Mays
gtcaaactcttgtttctagactcttggatcggatgatgaaatgtgaaaaatatggtgagcgacgtggtgcagcttttggccttgctggtgtggttaaaggatttggaatttcttccttgaaaaaatatggcattgctgcaacattgcagaaaaatttggaagacaggttgtctactttgttacctcgtccactagtgctgtatataatgactttgtaaataaaatgagtatgcattcacctgtcacaaattttcactaaattatgttctgcagcctttgtatcttttcatgttttgttgttctctaggcatttgaatacaatttatctagagtattcaatgggaatttttgattgacaaacatcatagcgctaaatttttccatttgtgtgcagaatgtctgcgaaatctcgtgaaggagctttacttgggtttgagtgcctgtgtgagaagctcggcaaactatttgagccgtaagtgaggcacctcttcacttagaactgttgctctgattccaagtggttcattatgtttgctttcttgtaggtatgtcattcaaatgcttccattcctacttgtgtctttctctgatcaagtcctagcagtgcgtgaagctgccgagtgtgctgctcgggcaatgatgtctcagctcactggtcctggtgtgaagcttgtccttccttcacttcttaaggtatcaatatatatgttctatgctatcaaattgtaacatttgttgcatccaaatgttctggagagtacaagtggccagttcatcttgttgttatacattgaaatctgacaataacttaactttccgccgaatatttaggccatctgcaccagaaaccactagtttgtttccgttaatttgaaagagcagaacatattgaggtccatctggtaaactttttttttaaaaaaagtctacacattctggattttttccacttattgtcatttgcactgttcgcacctttatgttagttgttcgaatgaagataaaataggtattcagatactttacaaaatattatgccagccacactcatttgtaaaagctacatgaaacgaatttatttggcttgtctgatacattcaaaattttccttaaagcacatatttggatgatccttaatatgattttcagggtctagaagataaagcatggcgtactaagcaaagcagcgttcaacttcttggtgccatggcatattgcgctcctcaacagctatctcagtgtcttccaaagattgttccaaag

SEQ ID NO: 196166 - DNA, 438 bp, Zea Mays
gggataagtaagcaactatccgtcttgtaattttataggtttccatttcgtgccgattcccccctttcccgcggtccgtcctagtctcctagagatttagctccgaccattgaacagtgtcctccgccctagtccgaatcggctttatcgcctaggtttaggaattgtcgtttgaggatttgacatctctgttcatgctctgtgatgacccaaggtggtgcgtcggcgagtatggtggaattgatcagcaggtatggagtattagttgagttcttcgggtattagtgcttgggccgtattaatatttctttgggctgtaatagatggattatccagggcattagccgtattagtagttgaattcgagatctataaatactgtaatgagttgttgagaggaggatatgaaataaaatagaaacagatacctgaacaaac

SEQ ID NO: 196167 - DNA, 283 bp, Zea Mays
gcttgatttcctctgttatcccgctttcttcctctgtaagggcaaatgatgatgcaaagtcatgcaccactctgaatgaggggattatcctctctttgggctgacaaacggacttctacccatttttcgtctgagccttgtgattacatccgatttctttattgtctccctggcttttcttttttcttgctgcttactgtgacactgatcttattgcgtttgattaatggagctgtggagtgatctcggagaactagatgatgtgggtctgccgatccaacca

SEQ ID NO: 196168 - DNA, 724 bp, Zea Mays
gatttctcttattttgacaaggttcctagcacttagtataataatgttagtaccataaacaagaattatagtcgcggcgcgttgagttttttccgagagcggcttatttgccggggcaccagcctctccggtgccacaccgaacagtccggtgcacctcagtctggtgcaagtctagctggtcttagccaaacttctccaatccgatttctcttattttgacaaggttcctagcacttagtataataatgttagtaccataaacaagaattatagtcgcggcgcgttgagtttttcccgagagcggcttatttgccggggcaccagcctctacggtgccacaccgaacagtccggtgcacctcagtctggtgcaagtctagctggtcttagccaaacttctccaatccgatttctcttattttgacaaggttcctagcacttagtataataatgttagtaccataaacaagaattatagtcgcgacgcattgagtttttcccgagagcggcttatttgctggggcaccagcctctccggtgccacacctaacagtccggtgcacctcagtctggtgcaagtctagctggtcttagccaaacttcttcaatccgatttctcttattttgacaaggttcctagcacttagtataataatgttagtaccataaacaagaattatagtcgcggcgcattgagtttttcccgagagcggcttatttgcc

SEQ ID NO: 196169 - DNA, 577 bp, Zea Mays
aaattgtcaagaatggatctgcccttaataaaagcactttgattctgagataccatattgtcaaggtgactagccaatctatttgctagaagcttagtgatgagcttagcaaaggagtgaaccaagcttataggccgaaaatccttgacctggcaggcatcgtccttcttgggcaagagaaggatgtaggctgagtttagcagatctaaattcacccattttctgctccaaacagctgtagcagcagccataatatccccttttatgatctgacagcacgtcttatagaatttcccagtaaaaccatccgggccgggagccttatttagaggaagagataggactgttttccagacttcatcttcagtaaacggactgtccagcgatgtcagattatgggcagggatgtcaagctgagccaggtcaatggtgtgcgcccggtcaggtgaacatcccagcagcttgtggaagaaatcactgataacctccaacttatccccatgagatgtcttcaccgatccatcatcagaaatcagattgccaacaaaattcttgcctttccggtatttagcatgga

SEQ ID NO: 196170 - DNA, 293 bp, Zea Mays
cgaagccgacctgatcctcgggacaaactccgcctcgcccgagctccgccttggctatctgctccccacgaatcccgcaggaggccactccttcaactgtgacgcgcacgtctacgaatcctggagcgggcgcggtcactacctcgggcggacttccgtctcgcccgagcccggcttcggcctcgatatctgcaacggaaaggcacccgacgtcaccataaactgcagagttgacatactcagtactatgtcaacaactacggcatgggcaacctccttgtcaggggctcggg

SEQ ID NO: 196171 - DNA, 512 bp, Zea Mays
cttttttgacaagatatggacgcttctgtgctatttgaatggcaaaggccaaaccagattaacaccaaagggtttaaatacagctggaccatctattgggcaacgggcccgcggattagtagagtccctcaatatcccagctgcagaaatggctgctgtagttgtaacaggaggcatcagtagcgcattaggtggaaagactaacaaagttgctgacaaagctatgatgctaagaggggagagatttccaagaattatcttccatctcatcattatgtatctctgcaaagctggcttagaaaacgcatccaaatgtgttcagcaatttatatcactgctccctaatattatctctgaagatgatcagtgcaaaaatagactgcatttcttgatttggtaggatttgtaatcttattttatatataatcattcgcttgatgatggttaatttgacagtttagtaacttattgctgcaggtccttactaagggtaagatcccagtatgggcaac

SEQ ID NO: 196172 - DNA, 297 bp, Zea Mays
gcggggaggcctcttcagctgctgaatcaagagaaactgctcctccgatgcagagggctgaagaactggctataacgccgaaggcaccttcggttgagttagttgaaacgaaggttgacaaagataaggctgaaaggtcaacaactgaagaggtaacaaagatgtcagggactttaagtccttcaacagaagcaacagcgttgagggcacaaaatagttttgccataactcctaggagaaggaggatggtaaatgtattagatgtactggaaacaaccgactccataagtctcgctc

SEQ ID NO: 196173 - DNA, 399 bp, Zea Mays
agctactcgccgaactccgcgcgctagctccggagtccgttgggatgggttcgccggtgcgggcttgggatataaatctccccttccgtgtccttggcaactggattcaagccatatccgagcatcattacatttgccaccgctgttgcgtgagggagcagagtggggagtttccgccgccggagatttcaccttcgccgcagctcgaagctcaaacccgtgggcttatgtgttgcaccgggccgcggggaaaacattggtgacctcagtgggcgggattggcatccagggacccctggatttgccaccggagccattgactcgcggtggagccacccctcgtcgtggacagtgcgactgcgcgcccgattctcggtaatagttgcttgcccgaactcg

SEQ ID NO: 196174 - DNA, 525 bp, Zea Mays
aaattgtgaaactcgagataaagaaatatgcacttccagaactcacagatttggaggttgagttgtactacgacgaaatcgaaatcgaggtatatggcgagcatgagtttgtgaagaaaattgaacaagtggatgaatacctctatggccgtatcactcaagttccggttgctccaaagaaaattggtcagcttcctagcatgaagcaacgcgtggctagctgaagatcacaggtaaactaagacaccaatatagtaccacttgctgttatttcgatttgcctgttcagtatgtacaactctgtcatgagtcgtgagtttattagtgtggatgtgatggcagattggcatgtctacataataattgctggccgcacctgtctacagtatgcatgtattcctaaattgtaaaataagtgaaaaaacgcatatgtgcgcgtgtatcatggtgtgtactcctaaattgtaaaataagtgaaagaaaaaacaagtggatcattgaatgttgaaggatgtttttgtaacc

SEQ ID NO: 196175 - DNA, 422 bp, Zea Mays
ccttatcgagcactgagtaccgatcagcccgactaatcgcgattagtcgtacgatctgaaaacaatggccataactctagcaggtggatcgacacacgaggggtgggcggctgggcatgcgcagcacgcgttgtgaccgaagatgctggggggaatcgagaccaccaacgtaggaaccgaaaaggatgggagagtaggcacgtcggttaccccaccatctgctgaaacctcacgggctcgtgggcccaggcacacatgcatcaggccgcgagcagagtttgatggaggggtaaggtgacgccgctgtcacttgccgtggtctcgcagtcttcatcgaaattggctggtggtggtggaggagcaggaagtcccgcgggtgatgctccttccttcgatgagtggtggaaacaggtggagtgtca

SEQ ID NO: 196176 - DNA, 360 bp, Zea Mays
cgcccctatttccaagagagcctatcgagtgtccggaccagaattggtggaactcaagaagcagattgatgagttgtcggagaaaggttatatcagaccgagtacctcaccttgggcagccccaatattgtttgtggagaagaaggatggcacgaagaggatgtgcatcgattatcgagctttgaatgaggttactatcaagaacaagtaccccctgcctagaattgaggatttattcgatcagttgagaggggctagtgtgttctcaaagatagatatgtggtcaggctactatcagctcagaatctgaccctcaaacataccaaagacagcattcatcaccaagtatggactatatga

SEQ ID NO: 196177 - DNA, 518 bp, Zea Mays
gccaggtggacctggacgccgaggatttcatcaagaagttctacgaccagctgcgcacgcagcaggcccttgccaccgccacgccggactactgcggcgggtatgcgcgaccggtctctggcatcgcctagaattcaacccacgcatccacacgcgtatgcatatgtaatatatatgtacgtgtccatagagtatttgtttgaacatgcatgatgcatgcatggataaagcatgttcgtttgagagctagctactggtggtagagctagtctagagcttggtctttgtgatatgagggagagattttgtacaacatcatcatatcatgtttgcaagctagatccatgcatgtatagtactcctatatatgtgtacgctgtatgtgtatattttgttgtagtgacatgtatcaattttactgcaagtaaggtacatgttgcaaagacattagcatataagaacactggtgtattacatagtataagaattgcgctcgtgtgtgtggttcctgatgtcct

SEQ ID NO: 196178 - DNA, 665 bp, Zea Mays
gccagggtcatgaccgccagcacctcgtccaccgacctcagggcctcttgctccaactcaaccgcctcaggcctttcttgctggtcctcccggccagtgggcaggctcctggccccccctcaggcatatgggccggcccctgactacactggcgctgctccaccccctcctggttgggatctccaacaactcgtcaccaattcccaaaccaccactcttcaacatccccagtagcaagagtggttcttcgacacaggtgcctccagtcacatgacttccgacgctggtatactttcccacctctcctcttatcatcatctaccctctaacattgttgttggcaatggcaaccttcttcctgtcacttccactggcaccactcaactttctcacaattttcgtcttaacaatgtccttgtttcaccgtctctcattaaagatttaatttctgttcgccaattcaccactgacaataattgttctgtggaatttgaccctcttggctgctctgtgaaggatcttcccactcggcgcatgatccttcggtgtgatagctccagcccactctacccactcaggagcacaacatcttctctccatgctaccacctcttcattgtggcatcaacgacttggacatccaggatctgcagtcctcactcagct

SEQ ID NO: 196179 - DNA, 280 bp, Zea Mays
tgtcgcgaatggggtatccgtagatgtgggccgttggattagaacccaagggctaggattagatctcccataaaatgaatcggtatgcaactagggccattggatctaacttcaatagtctggattttatttgaccgagatcggcacgaatccatctgatctcacttcaacggctgggattcaaacatgaagggggtagctaccacttaatcagagccatccgtttacgatcctatggccaacgatcctttccctgcttttccccctcccagcttggcca

SEQ ID NO: 196180 - DNA, 327 bp, Zea Mays
gttccttttgagcacctttgtgggaagatgcttggctactccagccttcgtccttttggttttgtgcaatgtgcttcttaaacctcgtgattgcactaagttgattgctcagtcagctgagtgtgtttttcttgggtatagtgctaagcacaagggatatcattgttgggattcaaccgctcaacttatgcgggtgtctcgaggtgtggtttttgatgagtctcgtcctttttaccctcctattgtttccccaacatctcttgttgacccacgtcctcttgtttatatctaatcctgttatgatccgtgtgttgtttcccgcttgac

SEQ ID NO: 196181 - DNA, 409 bp, Zea Mays
acctgcttgtacttcttctggcgacgcccatcggcggtctcgatgacgaactcagtggagaagatgttagtgagtttggcgccgtatccgttcctcccgccggtggtcttcttctcgttgtcgttgtagttgctactggtgaggaggtggcccaatatcatctctggcacgtagacgccctcctcctggtggacctcgacggggatcccgtcgccgttgttgtatacggagatgcagcagctgtcgacgtcaatctcgacgcggagcgcgtccatcttgggatcccgctgcttgttgtcggcggcgttgacgaggatctcgtcgaagatcttgtagagtccagggacgtaggtgaccgagcggttcaccatggcaccgtcctcgtatatccaaagcgcctgggtgtgct

SEQ ID NO: 196182 - DNA, 529 bp, Zea Mays
attggctaactgccatgtatagcctaggattggtttccatctatagcctaggactgtttccttgtacagggaatagcttcccatgtatgtacttccatgcatgcctactggctatatataacaggctccccacccacaatgggtgtgtggtgattccctccattcttcccttctacatggtataagacttttagatcctgcgcctccacccctcctgctgcgccacacccttcttgctgcgccaccgtttctccctcccaggtcgccatgactgaggccaccatccatgctaccgctgtgttcgtcgctccctatgcgacgatcaacgccaagaatcacatcccggtaacccttgagttaccttgagctggcaaagcccaacttcaatcagtgggaaccattgttcacctctctatgggaaattcgccctcctctcacacatcgacggactgcaggaagcctaccccactgatcctgcttggggcatcgcagatgcctacgtccacagctggctcctcggctctgctgg

SEQ ID NO: 196183 - DNA, 720 bp, Zea Mays
agtaaagtgtgccgaacaaaatttagcgaagtagccacagaattaacaccttgatagtttcctcctgcaaaatccaaatgttttgctatcatatgcccagcattcacaacgattgcagaaacagcagaagcaactattgaaaggtctccatctggatttgcacccccattttgcctgatgcattctactaagcccaaaacaatgtcatgtgcaatttgataactatcttctttctcaaaagtgagtggattcctgggtgctgcgcctgcaagaactttcttttcctttaaactgcgctgaattccatcagcttgccgttgcactatctctttcatattctgcacgagtcttgaactccttccattcaacttttggcggacctgctcatcaatctcctcgcctgctaaaatacccgaagaagataccaaatcaccatcaatggaccgcccattatcaagctcagctaacaggcgttgatcacaagtggtccgaaagtttttctcccacttggccacactagccacatctctatatttcttcaaaaaatatcgaacataagcaaaagctgttgaaccaggatgcctggtagttgctgacatagaatttctgttcactaaagcacttagaacatcaggcaagatgtcggtcgcaagaagtatgttctcatacctgcaagcattgcataatgaagatatcaaattcaaaaccatataacagcat

SEQ ID NO: 196184 - DNA, 417 bp, Zea Mays
attcagtgtcataggcattgagcaaagcattaggcatagatcaaaatattacgcatagagcaaggtattaggcatcataagcataagactggtctgctcaaatctttgcaaggtgctgccttagccaaagcacacaatgtttaggctccatcttcacaaagccatcaccttgccttttgttgtccaataggtaggtaaggcaagtcatcaactcctcatcagtgaaacctggaatactcatgcaaatttgatacagatcagggtggacatctgtggtctggactacaacaggtgcttggacagcttcagccaatttgttcacagctccagtaagtcctgtcataatctccagctcttcatcactgagtcttcttttctttccatatgatccataggaactaccagcaccagcaccac

SEQ ID NO: 196185 - DNA, 522 bp, Zea Mays
ggaaagttgatccagcttttttgaattcaaatgctttatacagaatggaatacatgtggcatttgaaggatctgctgattgtattttgaagtctgtctgtactgtccagtactcatgtgccttaaactgttctatttcagcttctcgatcgcacacaagggccaaagcagcagattggacccgtccagctgattggcaaccaggcaacttcctccacagaagtggtgatatgccaaacccaattagataatcaagggaacggcgtgcaagataagcattgactaagtccatgtcaatatacctcggggacattaaagccttctttattgcatcctcagatatttcatggaaaacaactcttgcaacagtcacatcaaaacccagtacaccttgttgttcaagcatttctttgatgtgccaagcaatcgcttcaccttcacggtcaggatcagatgcaagaattaaattttctgctctggagaaaaaggaacatttgtaaaaaaatagcaatgtgttattaac

SEQ ID NO: 196186 - DNA, 855 bp, Zea Mays
gcatctttgagacacgtttgtggcatttgaccagaacatgaacccggttctccataactgtggcaagctctgccacactccggcctctgtccaaccgcaggagaggcgccacgcacctaggtcattagtgttttaggatgtcgcgatcgtctccatgacgatagacgtgtcgccgtcaccatcgaccatgcatgccgtcagcctgctcaccactagcgaccacggcggccatcccggaggtagtaggaatgcctcccctggctctctctcctcatggtccatgacaccacactgtcgcagcccactctagctactcctaccgacttggttgccgactctagcgcctcgtaccaaaaccacttctggccctagcactgtctctttccaccatcctcacaacctcaccttaacttctcccattgttgtcggtaatgactaatgagtcaactttatctgtcacctcaataggtgactcggtccttcctagttaattgtacctcagcagcattcttgttgactccaacatcatatagaaccttctctcatcccatcgcttcaccaccgacaaccactgctctatggagtttgatctcaggggctcaccataatggatcttaccacttgtggtgtggtcgctcgctacgacaacttggccctctatcctagtcacttgcctaccccacctcccttatcacatgttgctacaccctacgcccctgttgttgttgactatgcccccacatggcatcattgtcttggccacccttatcacgagtcctctcaaaactcgagcacctcggccaacccacagggggtgttagagactgtgtactgattaggataatgggttgtgat

SEQ ID NO: 196187 - DNA, 361 bp, Zea Mays
gtgcgcataacatgaacatcattgtgggcggtagcgttttgggaggcagatacgtggagcaaaaccaggagttggagcatgtggagggaggatctagagaccaggtcgttggtgaagcggtagaggaggaatgcacgacggaggcgcgatatcagaccggagggaaaggggagcgtgacgaggaggttgtagatgattgttccccgctccaacgacgattctgtcctaggctcatctgactccacagccaccaccgtcatcgcagcttccccgttggccgcctttgcccatttattccctccattggaactggcggcaagacctgatgcaccgatagagcggcggatctggggagcatgcg

SEQ ID NO: 196188 - DNA, 1138 bp, Zea Mays
gctatgctgaagatagccgaggtcgacgtagttgtggtcggtttgtgttggtggagcttcaagcacatgagaggcaacagagtgatgaaggagacatgtcgaggcaattacgtgtgggggggatgctgaggtcgatgcagttagggtcgatgtagatgaaaggcgataatgcaattgaggctgacagggaatcagggatggaacaggagggttgatgttgacatcgatgcagtcaaatcgcttgaatcgaggcatgggttgggtttgccagacccagcaatgtgttcggaacgaaaacgtgtgccaatgtagccaataccagatgaacgaggtagagggcctcaatcatatatcagcatccgagggaccaacagagaaggtctcaatgacgattgcggtgtgcagaataacaggtagaaggtgctgatgtagcatgcaactgtcgaagtagatgatgttggtatggacgaggcgacgacactaacaacgtggttgtgctggatatagtgtgggagcggacgaccggacgcgtcaaacccgaaggtgagcaatttgtgtgggcatggtcgagtagtccggacgtagggcatggtcgtagtggtgtagcggtggcctcgcggagggcggcgacgttctcatgctcacaggtagcgctctgagttgacaacaaagactcgatgagtaggacgaagaccttgtgcagatagatggtgcaacaaagattgcacatctgagtcatcgatgcacggggaacgacgatgtaggtgtatcgatgaagcgggcaacaatgttgcgacttgatgaggcaacacaacagaagccctgttgctcagagaagatgcaagtagtactcgataatggacgtcacaggagttgagtggatcagacataatcagttgtacggatcgagtgcgaacgaggtggagcaatgatgggagaagttggctgagccgtccgatatgtgctggcaatgacaaaccgacgttgtagacgtgtggacaggatgatcgagaagcaatgtgggaaggcgccccctcgacattgcatgctctaccagccacatggttgaagaagtatattgcggtgtagtcaatgtcgatcccaatgctggagtagtgcgcgaggtcgacgggcggtg

SEQ ID NO: 196189 - DNA, 363 bp, Zea Mays
aaaactcttgctgagactattggcaaagttgcggtctattgcctgtataataagagtggctgccaatggcatggagagctatccgcctgtaccacacatggtactacttgtgcatatgggaactctcctgttgtttgcaatcgttgtgggacacaaattgtgcatcgtcaagtacaagaacatgctcaactctgccatgtatgtccattttgtcttcagtaacttcttatggaagtcaagaactactgtaagtgacagtttctttttgtctttttttggttatttgcagggcttacaatctcaaacccaacaagctgatggtagtcaggtgcagctagcggcggcaacaactcagccagtcac

SEQ ID NO: 196190 - DNA, 341 bp, Zea Mays
cctgttgcaggaagaagctgattcgtccaagcgacgtgattctcgtggattggatgcatcttggagtggtcgttctcagatgaaacaactccaagcacctcctcccaggtgggataaatcactggggggagagccggttatctccaagcagacacatgccaatgccactcctactgctcctgattcagtaacttctgacagtcgggtggcatcccttcgtgcatatcgtctcgcccatggactctaccggttttgtgctgaaaaatgggtaaagggacacatatgctcttctactgtgcagctttatgcgatgcaagaattgtgggacatgttacttcctg

SEQ ID NO: 196191 - DNA, 393 bp, Zea Mays
gcgccaccgctttggaggaatttgtcgccggtgtaggcgcccaccgtggatccgcttcacaacgtcgtcgagcatgcattgttgcagtatatggtgattgagaagctaggtcctcatcgatctgtgattgctactgttgcctcaatgattcttatgcatcggcagtcatgaacaagatagcaatggtgaatgtttctatgatttctttcttgtgacttatgctgaggattacgaatttacgacttgactaatgaattagcaataaaagtatagatgttctagttcaatgctgataaattagacacgaaacatacaacaaaacaagaactatcatggatgataccaatatcagtttcatgccagcacacacacatggagatggcaagcactggc

SEQ ID NO: 196192 - DNA, 625 bp, Zea Mays
cagcccagccccagcggcctcgagggtcggacggtcgatgttggcaatgtcaaggtgcacgtccgagaggccattgctgagggtgggttctcatctgtctatgctgctcgagacctggtaaacccagcgaagcagtacgccctcaagcgcgtgattgtccaggacgaggagtcgctgaacctggtccagaaggagatcacggtgatgcggtcgctcaaggggcaccctaatgtggtcacactggttgcacacgccatactggacatgggacggatgagggaggcactgctgctcatggagttctgcgggaagtcactggtttctgtgttggagggcagaggagcaggttactttgatgaggagaaggtggcgctgatcttccgggatgtttgcaatgctgtctttgcgatgcattgccagacgccacctcttgctcacaggtgagtccactttccagtcaagcagtacacagtgttttttatgcagttgatgcttttgtggttgcttttccatggaactgtttaacagcgttaatctatctatgttttatgtgaaaacaaaatagatgcaagtttgccttttatactgattgaacataacattgcatctatgtcatactcacagc

SEQ ID NO: 196193 - DNA, 561 bp, Zea Mays
gttcagtttcctttggacacttcacaagggtttggaaaacctgggccccgccaaagtgtcgttttttcatttggcttgctgcccataataaatgttggacagcagatcgtttagctaagaaaggcctaaaccaccatgagaaatgtctgctttgtgaccaagctgaagaaacccttgatcatcttctggtggcttgctccttctcgagagtcttttggtaccagcttttccggaaatttggccttcactcccttgctccccagccggcggtcacctccttcttgaattggtgggaggaggtttcagaggtggtctcaggtgtcaccagaaaaggccttaactccctcattattctgggtgcttggactatttggattcatcgaaacaaatgtgtctttgatggaatgtctccttgcctcacctatatcctagcttgggcagacgaggggagaagtcgatgggaggcagctggggcgaaggccctatgttctctggctgcttctgcagctgctccctagagtggtgtgttgttagatgagttcttttttgaatgtttttttc

SEQ ID NO: 196194 - DNA, 600 bp, Zea Mays
gttaattagtttttcttaaccattttctcaacttaaactggacaacacacaagtcacttaaaacgccatattttaggagacctcacatgtcgagcatcaatttataacctaagtgactcaacctctatcacgcttgacaactaccacatcacccgatttatctatttggaacaccgcctgcctagcgtactactagtactccgcattttgactcgacttataaacatggagtaagcgatgactacttcggcatgtcaccacctctctaaatcaagtaaggacaaattccacctacaacgaccgaacattcccatcgagcacaccttatattttcctgtttagcatacaaccatggggcggcatgcactcgagacatttccgtttaatttaacgccaccactattaccacgcatctcagcacacacaattatccacagactcgcccttcgtataaacttgacaaacatttttaattcttgtcgacacctcagacaaacacaactcgacgaccctcaaatttttctacgcaaccatgccacctaacgcaacacttgaggtaacccacttcggcacacacacgcatacgtgtccccattgcat

SEQ ID NO: 196195 - DNA, 746 bp, Zea Mays
aagcttcctccttcccacatgggcaccgtctcctccttccccaattgcaagctccattcgcgctcctcgtcctccgctgcctccagcctagtcccatctctgctcgattggagaggtttgggccatgcttcctcctcgcgcgccacgttctcgacggaatttctcgtctacacaggagccaaggaacgctagaattagacgcttcccggggtcccttttagttcccctctaacgaatcataggtttgcagtttggtgtggacgtatcctgtgatttgtggatggttttggtgtagagtttagagagatcaagaacttccaacttggggtttcctgtagccttttttagctgttctggggcttttatgggagtgcccgtcgcgcagaagtccgattcttgggtgactgtgcttgcgatgacggacagcggcggcctcggcgttcggcctattaacggaggccgagggagtgccgtggagcagcgtgggctcggactcggagacaacgggcctccagtgtccccaccagagcgtgtttctacgccgcctgcgccgagactagctgcttggtggcgcatgtcgtcgcctggtcctctccggtgctcaaccccgaggtgagcaattgactttcttggttgcctaagccttggaggggataactcgttgatagacttttcactgattgaaattactgggcgcaggagcgttggatgtgaagatggtgatgattcggataggtacttttccc

SEQ ID NO: 196196 - DNA, 380 bp, Zea Mays
attcagtttacaggcttcatggccttcccacagccattgtgtcggatcgtgacaaggtgtttacaagtcggttttggcaagagttgtttcatctgtcgggtactacactaaagatgagctcatcatatcatcctcagacggacggacagatagaaagggtgaaccagtgcttggaggcgtatctttgctgctttgtgcattcctgtccctccaagtggtcggcatggtcgctctgggctgagtattggtgcaataccaatttccattcctctttgggtcggactccctttgaagtactttatggacatgttcctcgccattttggatttacaaccgagaatgttcctacttcgggtgatcttcagtcctggttatctgac

SEQ ID NO: 196197 - DNA, 801 bp, Zea Mays
tggacggacatcgcgatggattttgtggaggccctccctcgcgtccgcggcaagtcggtaatccttaccgtggtggatcggttcagcaagtactgccacttcatccccctggcgcacccatactccgctgaatccgtcgcccaggctttcttcaccgacatcgttcgtctacacggtgttccgcagtccatcgtctctgatcgggacacggtcttcacctccgcattttggcgcgaactcatgcgcctgttgggtacaaagctacacatgacgacggcgttccacccccagtccgacggccagtccgagtcggccaaccgcgtcatcgtcatgtacctgcggtgtttgacgggggatcgaccacgccaatgggtcaggtggctaccttgggctgagtacctcttcaacacggcgttccagtcctccctgcgcgacactccgttccgcgtggtgtacgggcgcgacccaccctcgatcagatcctatgagccgggcgacaccagggtgcaagcagtcgcgaagtccatggaggagagggcggagttcctggccgatgtacgctaccgcctcgagcaggcacaggcgacgcagaagctgcaatacgaccgcgaccaccgctcggtcagctaccaggtcggcgactgggctctacttcgtcttcggcaacgatcggcgtcctcattaccacaagatatgggtggtaagctcaagccacgcttcgttgggccgtatcgcgtcgtggaactcatcaacgatgtcgctgtccgccttgctcttccggagggcgcccgcatccacgac

SEQ ID NO: 196198 - DNA, 409 bp, Zea Mays
cggccaacacagtaagtctggcggctcgttcatgccatattgagaatttcaccagttcaagcaaacaagaaactcccaaacttaagatcgacatggaagccaaattacgagcatggttggaatcaaaggggaaaacaaagagcatccaaagaatggatggtcttttctccccaattgccagcaagactccattgtctgtgagccatatgaagcaaccaacatcttcaagaattccttgtagagttaaggcaatggatcaggatggtggtaaaatcaagaagttagtattttttatcattctctttatatattacatggaaccatacatagttcttatttctttatcttctcctgcacaggatactttttgatccagtagtccatgttcccactgaaaatataccacgag

SEQ ID NO: 196199 - DNA, 469 bp, Zea Mays
ctcttctcacattcatcaaccagtggctcaacaggaaggagagaacggacagagagaatcaaacccttgataaaatcttcaggacactcatcatcaagtagttgccccactaccaatggagcattcccaggattcacctggaaattagagaaaagaattgatcattctcatactcaacatattgcgagaaacggtgcctgaattaacactgagtcgaacgacacaattaccttttgaacatagccttcgatatatcgaagcatgttgtttgtgtacaggtagtgagtgaggtctggcacaaaaccaaagcggtcacaaacattaatcagtggacgggcatcaggtagttttgcttccatcaaaaagttctttgtcttctcagcatcgtagaagtttgactctctggttacacgttcaacttctttgatctgtccagtcctcgcagctgcttctatgtacttgaaatgga

SEQ ID NO: 196200 - DNA, 621 bp, Zea Mays
ccaaccatatatagaatcgggtctcatcattgtagctccggcaagggtgattgaatcaaacgcttgggctttcttgaaaccattcacattccagatgtggtgtgttctagttgttatattcctctttgtgggtgcggttgtttggatactcgaacaccgcagtaataccgagttccgtggacctccaagccaacaaatcatgacagtgtgctggttggtatctgcattttgtacctatttttcgtcctcttcttctggtttctaagcatatcgttttttaatgaagtttttgtgcattttcaggtttagtttctccaccatgttctttgcacacagtaagtgttgaagtgaaactagtaaaaaaaaatatttcaagggttttcctagtccactcccataacctcctttctcatctctttactcaggagagaacacagttagcgcgcttggcagatttgtgctgcttatctggctcttcgctgtgctcattattaactcgagctacacggcaaacctgacatcgcttctcacggttcaggagctgacttcagggatacagggcctcgatagcttgatatctagttcgagtgcgattggctaccaagttggatctttctccag

SEQ ID NO: 196201 - DNA, 364 bp, Zea Mays
gatgcataaaggatattcatgcaatgctatcatagcagcaagctcctttctagcaacttcaggatcaaaagtgtagctctccacggatactttccccccttcttgtgaactaaacctcaaagatgattgtgacataatcttgttctggctagtgagctttatcttgcgcaaaacacaaatcttcaaatgatcatgaagatgctttgttccatgagtacttttcccattaagcttcttatgacaataagaacattgtgccttgatttcactagaacttaacttcaccctcttgaattcattccaaacaacagatgtaagcttcctctttggttctgcaatcacttcttcaatttcatcaacatca

SEQ ID NO: 196202 - DNA, 395 bp, Zea Mays
atcggtgagctagcttttgggcggaaaggaaaaatcatagtagcaatattcttgtacctagagctgtatcttgtggctattgatttcttgatattagaaggtgacaacttggagaaattatttccaaatgctaacttccatgctgccgggctgaaggttggaagcaagcaagggtttgtgttgatgttcagtctacttgttttaccaacaacatggcttcagagcttgaacatgcttgcatatgtcgcccttggtggagtcatggcttctgtcattttaatcgcctctgttctgtgggttgggacatttgatggggttggttttcataagaaaggtgtgcctgtggactggtctggtatgccaactgccatgagcttatatgcgttctgcttcag

SEQ ID NO: 196203 - DNA, 753 bp, Zea Mays
cagcctctgaccatgctactgggctgggtgctgaaaaccaagttgagaaacaggacaatgtcagcgctcaacaaactaaccacagttcgagtaatggcaacttggaaaatggttcacactctaatggtgtgcatgagatctccagcagcagtgaaaccgtgacgaccattgcggacggactcaaactgatcacaaccatccgcgagggcaggcagcacatcttgccaagttggagtggctctcttgaccacgtttctggtggcagcacgagcacatctcaggttcatgaaattgaagttgagaaggaagtcagtaagggcgacgtcaaagttgaagagtatgatcttgagaagattctggacgagcaagaaacccatgacctctattgccccaactgcaaatcgtgcataactcgaagggtcatccttaaaaagagaaagagaacagtaaggcaagaaacaggcaaggaaccaccaaaaagaccacagcttgtagagcctcccgccaatgctccaagccaaacaatcaatcaagactcgccggaagtatttagatgcttgtcgtgcttcactttcttcatcccaacaggtatgtactatacctctcaacatgcctccacgcattatattatatgtgccttcctccttttcatcaactaatacctgagttattatgagcatttagattttttttgtctttttcttcttaatgcaaccatacacaactctcttgcgagtttgagatagatttttt

SEQ ID NO: 196204 - DNA, 372 bp, Zea Mays
cccgcacatatcgatctcgtcgtcgtctcccccggtggcatgctccgctcccgctagatccgatctattatctatggatccccgccgtctccccatccttctctccctcctgcttgccttcttctccgccgttgtcgcctctgacgagatccacggatgcggcggcgtcgtcgaggtcgacgttcctcatgttgctctatctccgtgtacagtgtgtttcgctttggttaggtgtgacttgttacactgatgcgacttggggttttgggtggtttcaggcgagctctggcttggccaagtcgaggaaggcatcggattccaagctcgattactccgacatcacggtatgccgtccgctcccgccatcgtcag

SEQ ID NO: 196205 - DNA, 655 bp, Zea Mays
gaagacagtaaaggattcagccgtcaagctttggacgactacgccaagcctttcaagcatacactttctcgtagtcatgtgcaggctcttgctgctctttttgggtggtctatcccagataatttgggatatgataatggggctggggatgataccgcagcaaacatattatagctagcggttttgttgttcttgtttgtcgttttacctcccattgttcctctatggatccggaaaaaataattgtttggaatgtaagaggactcaactctttggctcgacggaattatgtccgtgagctcctcaactgttatggtgcggatgtaatctgtcttcaagaaactaagaaggcgtaaccttctcagcgtactctcctctctatgttgggatctgattttaccggttcgttggccctaccttctattggagcgaggagtggaattattattgcttggagacggcatttgggggtcactggagctaccaggacatacattcatagtgtgtctgtgcagttctgttcataggaggggcacctttggtggcttacttgtgtgtacggaccactgatttcaagtcgggcgaccagctagtcgaccgacaggaccgaccaggcgcctaatcgcgattaaggcgacaattaggtcgactaatc

SEQ ID NO: 196206 - DNA, 344 bp, Zea Mays
aatcgataaaagtaacaaagtacttcatcccattaatagaagtcacaggacatgtccaaacatcagaatgaactagcacaaaaggagatatactcctgatacctcgactaatataagatgtccttgtgtgttttgcaaactcacaggcatcacacaatagcttgcttttatccaccccacacattacatcaggaaaagctttgcatatcttatcaaaagaaagatgccctaatctacaatgcaagagcatcactgcaacctccttctcttccattcttgttgccagcatagtgcatattgtaccattagtcccctcatgatccatataccacaatccattacgc

SEQ ID NO: 196207 - DNA, 318 bp, Zea Mays
atcttgctatagcaaccatagtcaaacaattactggatcatggtcgaatccaatctcaaagcttgcccaacttcactgttatcccttattcagttcattggctgactgtcagcttgacttaagacctaattatctccaaatcttacatgacaccaaggcttaatcacttaagaaaagttatactcgtacaatagctctacaagtttgatgtgttgaccctaggcaaattcctaatgaactgaaagatacagggttccaaagttggctctatgcactggttttcaaacttaaacatagggatgtatgtggtgtcctttt

SEQ ID NO: 196208 - DNA, 1012 bp, Zea Mays
ggaataatacacccgaacccatcgatgacattctcaacagtaatgagcactatcttcctaaggccctggatgttgcatgtggttctgatcatccagaaagtgccactagacagattgaaacaagggtgcctaatgataagcactcaaagttggcctcagccattgttcatacgaaaaggagatcagagggcatttctctttcagtggcttcttctggatataatcctcaagatgcatcccatgctaatagtcaggaacacttgattcatggtgattccttgtcacatttgctgcctagtcaacctaacaccggaatctcgaaaatttctgcaagggtttcatgtcatgcaaattgcatgagctgcattcacgtgggtaataaatcccatcaggttgcacatggtgagattggggttccctgtttctatgataaaatggtaagttgaccttgttgcacatagcagaagcaacaacaagcacatccatcaaaacggttgttttttacttctttattacttttctataatccatgcattttttttgcaggccaggggccatggtacttttgagcgagttgatgactgcacacatagaagtttgagagctttcacaaaaatcagttgcgataatgggaaatcttgttgttcttctcgtgagcttctacctagcttttgccaaaatgatcagccaacattgggaaaatcgatttgtggatgctgttgcaaaattcaggaagatgcttccaagcttggttttatacctggtcacatgtgcagaactcatttttctagtgatgttggtccagttctagccaataagcctactattgaaggttgctttcttcatctgcaatggttgtttctatgatgaacaactatttaaatgtttctaagctttaattcattgtaaacccttttttgttttagggctagatgaattttgtgcttgcagttgctccacttttacacaacgatcatcattatgttctcgggaatacgtcttgcagtcttcc

SEQ ID NO: 196209 - DNA, 636 bp, Zea Mays
gttcagctgacacgtcacctttccacatcacctaccacgtcatttttccacatcacctgccatgtcacctatccacatcacctgccatgtcatcattcgtgtcacctactatatcgtctctatactccttaatgcgcaataaagcgtcactataaaacgtgactatagtaatacacatgaattatgaatgtatctataatatcgtatctatattttttcacacataatgaaacgttactatatgacgtaacaacaataatagacacatgttatatgcgcatctataaaagcgtatcaatgtgtctaaacatgcatctaacgtgtctatgaaacgtctattcatctaatatatacgcttacaataatcgtttctacaaagtctgatacggtccatacgaagacgcttctaacacgtttttggaaagcgtgcgtacattcatatagagacgaattaaagcgtgcctattgtccaaaaaagcatagctacaagggggttttctagtagtgtttctagggtttgtttttagggttttgggcacattagggttttgatgccaccaaagtacatcaaatgtgatactttatgatcatttctcatgtctgttgaggttttaacttatttgggcctcactcaca

SEQ ID NO: 196210 - DNA, 404 bp, Zea Mays
ctctgccttttggccgtttgaccctccccttttatagttcaagggggttcttaaaaaaggacttgacatcctaaggagcgtgcgacctattgtctatggtggtcttactgatgtagttctcctaacatcgtcctctagttagtgcgtggtcgtacgctcggtatggcggattgcttcatctacccagtatgcgggtcactgtggcaactccggtgttgagttttcctgtagtgatgcttggcaggatccatgggtcaaagttatagcgcatcaagggtcgtacgcgagaacaccctgtcttgttgtcaaggactctcctcatcccaccagtgtgtcgtggcgttatccaaaacaatatttgtgtggcaacgtgtcatatcgtgaccagtgtgggggaacattac

SEQ ID NO: 196211 - DNA, 669 bp, Zea Mays
gttgtaaccagaaatgcttggtagcgagaatgttcaaaggtcacagtggacaagatcaaaggggcaagcggttcgagacatggaagagggtaagggtaagccaatgtggtgtccaagctgacaagcatggcatggcgaggcaaggttgtcatgggggcaagagatggtcgaggtgctcgagagtctggagagaacgttgtggttgggggcccaagacaaaggtgccaagtggagccgagacagcgacagcaagggcgtagggtgtggcaacacgggatgagggaggtggggtggggaaacgaataggatacatgggacatgtgttgtcgcatcgagcgaccaccgcatgtgaaaagatcccgtgtggtgagcccctagagatcgaacgccatagaacagtggttgttagtggtgaagcgacgaaccaagagaaggttgtgtacgatgtcgggggaaacaagtatgttgttgaggtacaatagaccacgtatgactgtattacctactgaggtgacaggcagagttgacccattaccgaaaatgacggatgaagggaaggtggtgttgtggggatgagataaagagatagtatcgaggtcaagaatggtgtggtacgaggcgccagagtcagcaacccagtcggtgggagtagcagtagtgggttgcaaa

SEQ ID NO: 196212 - DNA, 419 bp, Zea Mays
caacaagtgttagaagaatatcaatgctttgatggtactctgaatagttaccttgaaaaatgttggagcataatccattcttttgacgaattcagtattcggcatatttcgagagttgagaatcatagagccaacaatctggcacaagatgcattaggttatcggataaagcgagggagattccacgacactaaaaatctgataaccggtgtagggccaattccccaggtcgcggaccgtccgcgtcgagacgccggaccgtccggggttaccagaaatgttctcttaattgaatcggctgataatgaagccgatgcaagtgattggacgacgcctatacttaattatttatgaaatcccaatatcaggacagataagaacatttggtgtacatctttcaagtatgtcttgatgagtga

SEQ ID NO: 196213 - DNA, 315 bp, Zea Mays
catgtctattgttgactcctgtaggacatgccccaatcgggtcacacaatattgttcccgcataccctactttggcccacactcctagagtatgccatgccctatgggtgttgcaccgcatgcctccgcaagagatggcgaggcgcgaccattcagcacatgccactctcgtaccttcgcgtcaggaccatggcgagacaacctccaagcatgaagattcctcccagcaatggcgatgacgtcgagcttggtgatgcctcaactttgatgttgacaacgtcgttagcctcaatgccacggaagctcttctctgca

SEQ ID NO: 196214 - DNA, 369 bp, Zea Mays
ccatatcataagcagctactggaataacaaaagcatcagcatggaaagttctgccacaactccaccactctagttgtattgccttctgggtgcaacgcaaaacttgtccattagccaccttaacatccactggttcaatttgttgtagctcacaatgtagtctggctaaagtcatattactgacaaatgtattggaactccccgaatccagcaactgcagtatcacttggttgttgattagtgctctgagcttaatgcacttagaattatctgttcctctcatagcattgagagacagagtcacctcatccccatcttggtgaataccagtttccaaatagtccaacacttcatcatccagaattggac

SEQ ID NO: 196215 - DNA, 398 bp, Zea Mays
tggcttgacacagatccaatataatcatgaatggatctggtgtctaggtgtcacacccgatttcacaaagcaaaccaaatacgaaccatgtacatgccaggattcgaatcacgtagacaacgattctagcgttccactgttggtccgcgcgatggcattggcttggcacaaatccaatacaatcatgaacggatctggtgcctaggtttcacaaagcaaaccaaatgcaaaccatgtacatgccaggattcgaatcacgtacacaatgattacacaaatgacatatcattgaataatgcccgaacataaagagtattaaaccgtattatagactattgtctttaacattacatagttcatcatactcatgcgaaagtgtaaactaagataacttgatc

SEQ ID NO: 196216 - DNA, 1298 bp, Zea Mays
ctaggctgctcttgagctgtcactctgcctggacggttggcttctcctctatacatttgtgccatgcactctttttgttgtctcctctcaatctattcaaactgtgctaaacttttcgttacgccttccttttccttttcctcagcctccgtatcctcatgtctttgaagactctatcatagataatattaaaaagtgggtaatgaaggatcctgaagcatctaatgaatgtgagtggaagtatctaggaaaaaataaacccacagatgctgagatgctgagaacatatgcgattgggttgcttgctatggcattgtgcaggtactattagtgtcctcattgatttatcatctggtgtgataatgttataattttactaccgaatacatcatgatattcatccaattcttgcacgtttcattttttcacctcagtggtgggcaattggtagaggatgtcttgactttgggggtgccagcaaagctcatgcactttctgcgcataagagtccttggtgatgcctcatcttctcaaagagatgctaatcatccacaagacaccaaatatcctcgaggcagagacgataataggggtaaatcacgtctggcccaagatggttctcggttggatggaacaagggttgggtatggaatattgaccaacccaacagcagagaaggacaatgaacctggtgttgtaatgaggcaagcatatggagaaaggtcattggatggcacttttgcctcatcagataattctgacgtccctgaggttgattggaccaatgataactcttatggcacaattgtttgtgacacaaagtcaaaatatggggaaaagacttctgtgacaagggctcttaaagatgaagagatcagcgaaaatggtgaactgttgaagagaaagctgagtcgagccccctctcgacttagagtgaagggaaaagcaggagacaacttgcctgaatgtgaaatgacacctttatcaccaacctctggattgagaatcggaggtcgggcttccagagacaggaatgtggtgagggttgatgacccaaagaaggcaactgatgtgaacaatagttctgcaggcctcgagttgtttagcgctatttccaaagaagaatatgaagatcgtttgagggattgcattattggcttgaaggatatatctgacatcgttttgaaggcagtgagagctgctgaggctgaggccagatctgcaaatgcacctgatgaagctgtgaaagcagcaggtgatgctgctgccgagcttgtgaaatctgctgctttggaggt

SEQ ID NO: 196217 - DNA, 810 bp, Zea Mays
agctgcagaggcagccagagaacataggcccttcgccccagctgcctcccaacgacttctctcctcatctgcccaagcaaggatataggtgaggcatggagacaatccatcgaagacacatttgttccgatggatccaaatagtccaagcacccaggatgataagggagttaagaccctttctcgtgacacatgagaccacctctaaaacctcctcccaccaattcaagaaggaggtgatcgtcggctggggggcaagggagtgaagcccaaatttccggaaaaactggtaccaaaagactctcaagaaggagcaagtcaccagaagatgatcaagagtttcttcagcttggtcacatagcagacatttctcagggtggtttaggcctttattagctaatcgatcggctgtccagcatctattatgggcagcaagccaaatgaaaaaacgacactttggcggggcccaggtcttccaaacccttgtgtagtgtccaaaggaaactgaacccatgaacagtccattataagcagattttgcagaatacattccatctgggacaatactgaaaatatgtctgtcttcaactccaggctgcaactcaatggctgaaagcatctcccatagctggaggtaatcaatcaacacacccactgagagagccccttttatgtcagcaatccacttcctgttagtcaaagcttcattcacagttctgttgttcacaatccgcttaggaattgtagctaggagtctaggtgccaggtctacaattcttttaccatgtaaccatttgtctttccagaattt

SEQ ID NO: 196218 - DNA, 353 bp, Zea Mays
gagcaattgagctttaattccaactctaaattcattagacaaccaaacaacagaacttaggaatcctggttccaattcccaattctagacttcaatatctacatccaaacggggtgttaaagcaattggggttggggaattcggtgcttgtgtcacatgctggtgatgaagaaaggtggtgtgaagtatggagaacatgaagcatactattcgccttaacttcgttggaatgtccttgattcaaaagttggcatatccattgtcatggttgtcattgtgtttgggactcatgccaagatactttgacagagcatggtgctaatgatatgagcaaggctgacgatggttggtgg

SEQ ID NO: 196219 - DNA, 564 bp, Zea Mays
cttgcctatatcgtcatccttctggatggcacaacattccacagatttggaagcagcctctcctggatcagcctttttggtattcatctccttcatcaatttattgggcccctctttcttcatattgatttcttcagctgcctttacctttgaatcagagccctttatttgcccaccaacatcttcacattgcttcttcatattagtcacgaatgcatttgttttccctttgttctcatcacattgcttcaacacattcacacaaaagctatctcttttcccaccgatctgcttggcctttgcatcaaagctctcccttttcctgccaatctcatcagtctgcttccccttggcatcaaggtcacctcttttcctgctgatctcatccgaccccttcgccttcgcatcaaacctcgcccttctaccagtgtcatcactaccagcgccagcactccctctcctagcctcggaggccctggatccaacaacactaatcgacctcctccctttctctacagaagaagccctgatcccaccactgacgctccgccgcaagcctgcctc

SEQ ID NO: 196220 - DNA, 651 bp, Zea Mays
ctctttgccaacctatcagctgtccagcacctatttagcgccgtcagccaaaggaagaagtggcatttagagggggcccaagttttccaaactctttcatagtgaccgaaatgaacagacccagtgaacagcccttcatatgcagccttagcagaataagccccatttgcagcaatactgaatgtatgtttatcttccacctctggtagcagctcaaaatctgaaatcaaattccagagatgaagataatccactaagactcccacagaaagagttcatgtaatatctgagatccatcttctatctgtcaacgcctcctgaaccgttcttctgttagtgattcttttcgtcccccaacaaccacacgagccacacaacctagcatgcttcaacgcacccgtcgtatactttgcttcacaagttgagagggccgccatctattgttttctgagattgccaagacacaggcatgtatccccggaacaagatattgacaatggtgctctcatctcatcgatgtcccccccaaatcgttgatcgtgtacccgatgagcatgcagcctgtcaacctgttgccgatgttgcagcacttgggtagacaaggccatagtcaattgtgccaacgatgtagtgcgcgatgtgcttaacaac

SEQ ID NO: 196221 - DNA, 310 bp, Zea Mays
gttcaatagtttatggattagttattattaaatgtgtatgcccactagagcaagtcaattcacccatggcatacaagatccttaccatgatgcacctcattcacagcaggagacaataagaggtcgacgtcattcggttttatttcctgtccaagatgaaattcatagctcaagtaactctagttctaactatccgcctggacacgacccaatcttcaaccctctgcatgacaatggcaaccgagtcgagaactaccgaatgaagtaccaccatcgatcatgtatgggtatggagaagttacccctccac

SEQ ID NO: 196222 - DNA, 1643 bp, Zea Mays
ctggtctggatgatcctattagtgttgccattggaggtcagcaaaccgctaatgtatctattgcttaaatgcttagttctgtccttccatcctatctatatctagtaaaacaacaacaacaacgccttttagtcctaagcaagtcgggataggctagagttgaaacttaacatttgtgtttttttccgtttctaatttctagttgttccactgccactttgagtgttttggatatttacggcatatttttttaatgtctgtagatcagaacaatggatccttagaatataaaagtacagatacatacatatccatgcactcattaattaatcaaattcctcctatttaaaattgcagagcatgataattgatagctacaaatttagtcatttgttggtgtttctctattgaaattctctcaaaactatattctttactatgttgcagggcccgtgatgtccaagtttactactgctttcagggagcttgggacatacaaggaactccttcgttctcaggtactataaatcatacagcatgaaaatggacctataatttctgctgcataggtagttcgtgtaacacaaaaggaatgaagaattgaaaggaaaataacattactgttttgcagtctgagttttcatttttgaactcaacacaagggcttgctcctgtgagtctgggcatgatttgtatttttttattggcatgatctgtattagtttcagtttacaatattcacatcgtttcttttcttatgtttttgagttatttctggaacttctatactcaatctgccacctgcagtttcacatgtttaccacctataaggttcttggattactttgtaaatttcaaagatattcaataaacagaaagcacaagtgataaaataagttggcatttgcagaaccacaacagaaaaagtatgactgatgcattttttatttgttgaaagatatatctaccactatccttatgactgtaatactgtatacttctccttgctcaggatgccacgacgctggttactgtagtgaatgctgtacagttttttttctcctcctttcatgctaggtagcaaatcgttttttccctcctgcgtggggttacctgctagtatttctatgtctataaataacacagataggaagaaattgccaattggggtccttgcgtccagtactggctgcattatctagaagcaggaattttgtgttgaatagaataatcatttgttctgcgatggagtttttgtttgtcctcacactgatgtctgtagatttattaaatttcttttgctcaggcatgctgatatatcacatgtataaacaggacaaatgatattttttgcattctaattataataagcattttccctccaaacagcttgagcacatgcttagtgatcgcctgtcacagttcattaacgtggatttaaatggtgtgaaggtaaactctcctctcttctctccacttgaaaccgcacaacatagcatacttgtaactataggttgtaactgaagtaaacaatatagtagttcaggtgctgattttcaatgggcaaataacctttatgcatgtgggattagacttgaacgctcttgcttctgagttcagataacaacaaccacaaagccttt

SEQ ID NO: 196223 - DNA, 418 bp, Zea Mays
cggctttggttacggaggaggtagattatatccccggcaaggatgtgattttgcggatttcgaccaaaagttgccacctcccatgctgaatgataatggcttcggacaaggttttgtgccagacgaaggccctcaccgaaagtattttgacggtgccaatcaccatttccatcagttccacccagagccattgcctggtgcgccgctgcaccctccactgcctcgctaccctgatccccatggttcacatgcttggcatgttgaggcaggtgctgtgccacggccagcagagcctccattcccctctaaccatgattaccgtgctgcaccgccacggttgactgcaaattcatcattgtttcctgtcctttctggttcgccaacaacggaaaattttccatcaaccgctggtaccttg

SEQ ID NO: 196224 - DNA, 488 bp, Zea Mays
gccgggggttacgggttgagggagaacccgaagaagacgcggcgcctctcgagcctcgacgactgcaacagcagtggccacggtgagctgttatcgtcatgcgtgtcagaggtggaccacgatcgccatcgccaccgtgcgagaagcggtctcgtcatggatctggaactggagcgggagcaggagcaggaggagtacatcgcgctaactcctacgaagccggcttacggcctgatgccgcagccaaggcgaaaacgacgctccatgcgcgtgccggccgccgtcgacacggagccagaggacgtcgcgctttccctcatgatgctgtcgcgtgacatcatagaacgccggcggtgttccagggccacggcggaggaggacaacgctaggcgagagcgagactaccggtaccatcaacacaccgactgcaatgacgatgccaagatcaacaagaggaagcatgatcacagcctcgtcatcgacgagaa

SEQ ID NO: 196225 - DNA, 426 bp, Zea Mays
ttttaaccgtgtttccagaattagttggataaaggagggcgatgccaattccaaactttttcatatgcatgctaggcacaggcaaaggaagaactttgttgccaagattgtgtcaggggtggacacattcactgaccacgatgagaaggccagagcggtaaatgagttttacttcaagcttttgggctgcaaggcgaacagatccttgactgttgatttggaatacctgggtctaccttctcatgacctgtctgatttagatgcgcagattgatgaaaatgaggttctggaatccataatgcaactaccttcagacaaggctccagggcctgatgggtacacagatagattttataaagtttgttggccaattatcaaaagggatgtgatggctgttattgctgcaatttggtgcagaaaatttag

SEQ ID NO: 196226 - DNA, 467 bp, Zea Mays
gaaaagagcgtcagtcgggaagccagtgcatgtgaatctgcaggaaaacccctaactgtcatcttttctaacgatctccacaccaaacatctgcaacatgattgtgatgtgctaattaaggagactggtgaaggtaatattgcattaatatttgttccacaacttgttactgatctgcggagatggtgatgaaaacttgtgctgtttgcactgtgtttaatttaccaattttaaacatactgagttctaagtcaagttgttggctacttgtaattctatatatttttaataggctttatgtttgttgtatctgcaacagttaggcatatgtttcattgtcatttgttgtcttttaagtatctgacatttattttttaaatgtattctttccctttctcagatgttttagctcaggagaattgtaatgaccagcctgttccggcccagactgacctagaaatgaagtt

SEQ ID NO: 196227 - DNA, 826 bp, Zea Mays
ttagatggaggagaaagtaagggagatggttgaaatgaagcagcgaagcatggctgaggatagtcagaaaactctagaagccctgaaagataggtatgcaaaatcatctgtagtactacctttggatcaaaccaggtgctgttttagagttggccacaagaactaagaagttcaatcatacggccattttactctcattttattattacccagttgtgtcttctaattggtgcgtgcatgactgcttacgtgcaacagcacgggaaacgagatatgcatgtggataatttagttaaattatgaaattaagtaggggtaagattggaaatttggctaaatttccctagaaactgtagaatgacatgtatttcgaaggtagtagaagaggctatactacatctatgaaaaaaatcgctctgttagagtgttagtctgttatcacctgaactgccatatagaattcttgcctgacatcaaaggctaattcatgtaccatgactcatactgtatattttgaccttcggcttgccatacttgtagggaacggtcattgcaggaccaactaaggcaagctacagaaagtgtaaagaatatgcaaaagctacatgaatcggcgcaaagccaattgtttgagcttcgcactcaatcaggtctctttccaaccagtgtgatcatgatcatctttgtgacttatattttaaaggttatagtgaattgaagcatttcatttttttccccagaggaggatcgagctgcaaaggaggttgaagtcagccttctgatggatgaagttgaaagggctcaagcacgattagtcagtcttgag

SEQ ID NO: 196228 - DNA, 707 bp, Zea Mays
ctagattcgtgagtttgaagaagagaaacaacgtctgaactcaaagatccaggtaaaaaagaatatcaacttgccaacttggtacatttagtatgatccaaaccgagttcttttcttattgatgtctgtgatgcaatgtaattaaattctgcttaccttcttgaacatcatgaaaaatgcaaaccttttctggatttcataatatgaaatagttttcgccctctttattacttgtgtttttgacttaatgcactgggtaccatttaaactgtgcttacgtcatttgtatcccatggtagttacaatcaaacaagcttacctgtatggttgtttacagttttgtgttttagttgcaattatacaagcttccaccctatgatctgtagatagatggagtaaagttagtttggcgccctgaacaaaatgttatgtcccatttacttttctgtccttaaaagtaagcatgtacttgacaatttatgagtaagcaggttgaggaggctaaggtcgaaagcattaagagagacaagatggcaaccgagaagttgcttcaagaaacaatagaaagaaatcagactgaacttgcagctcagaaggagttctacaccaatgctcttaatgcagctaaagaggctgaggcattggctgaagcaagagtcaacagcgaagccaaagttgaactggagaaccttttaagagaagctggc

SEQ ID NO: 196229 - DNA, 479 bp, Zea Mays
gtcgtttcattgtctagtcaaacaggcaagactcttgctgctgagttgacaggtacaactgaaaacaattctagtcaaaggtgattctcagacagcaaagaagaaagactgatacaaaaacaagagattgcaaccttttaacttatccaggggaataataaatacatacaagcaaatggtcaaggaaacgaagagcgcgcaacctcgtatcatcccggaagaaagaagaacctgcagaaaaatgtattattttaaaagtcatttcatgaaagtatcagtggtggtcatgatttatcccaccagtgagggacacaaaatctccattgatattcccttaaatgagggaaataaaggtgttagacacctgtaaaggccatagcactaggacgtgatagtgcatccatcgatagcatcctttgcaaatccaataccaaatcagaaggaatattagaaaaggcttcacttgttaaatatgtcaa

SEQ ID NO: 196230 - DNA, 586 bp, Zea Mays
gaaagacatatctgagggagatatgacacggcggcagcagcagatccagctatcaccatgacggactcggggaggaggccaccaactaccaaacccatcgcacacgtcctgctcccctccccttctcgtcgcgtcggcattgcattgcacgcctcgcccggcgcctgctcccttgcattttccattgacctcccccccgccccctctcgtccgtctcctcctccccaaagcttcgaattttcccgagccggagccacaccttctttctccccgcgtcccacgattcgccgtcggaaagaggcaaggcaacggaaaccgagccgtcctgcgtgagctggggcggggtcccccgtctgggtgccttccgtgccactctcctgcaacgcggggcgcattgtcttgctgcccccttgagaagggaagattcccgccatctattaatcctcctctcgtatgccgttttctgcctggggaggacacaaacgcagcgccgcgggaaagccgggcgccgcatggatcgaggcatccggtgttcctgtctcaagacccagttttggcgtcttggcgtagcgggacggaggaggac

SEQ ID NO: 196231 - DNA, 385 bp, Zea Mays
ctttgttccactatttttcaatatgttttctgacgtaaaagctgggaaaggcgaacaagtcagagatatatgtttggatacactatctgctgttgctgccaaagtgcagtgggaacactatagaacaatattgaagagatgcttccgagaattaaaccttagacctgataagcagaagatcatattgaggctgatttgttccatattagatgcattccatttcatgaaacctgcaaatgatgcctcaggaaattctgatgctttgagtgaagatattgattcttcccttacattctctttggtcacagtctcttctgataagcaacagtacatgcaaaaggtagtgtttccacaggttcaaaagttgttaggatcagatccagag

SEQ ID NO: 196232 - DNA, 524 bp, Zea Mays
gggcgacggagagggtgccatggcggtgtttgacagtgcacgggtgcgttccggcgatgggcttcggtcaaactccaaattgttgcgtccaggggcaataagagatcacatactaactgaaacaaagagtaatttgatcattactgaccggaggagcgctggccacgatgaggttgggtttcgggtgtgcttgaactgaattggggcgaatgcaaaattagagctcgtagggaatcggctaggagcaatacttggtgtggaggtgcgcaatgatattgcgaagctagttacgagctcaatttataaaaggcttcgtcggtggcactcaatttggtcgagcaacgcggcggccggagatgaggaaggactctggcgccacggtttcgtgtccaccgccgtggcgggctcaccggcatcggtgaggcagcagcggggaaacacgatgacacgacagaggtgcccggatacgtggcgtagggtcggacgacggctatcaccggcgttcttatcgtcttccaccgcgg

SEQ ID NO: 196233 - DNA, 495 bp, Zea Mays
cagagggctgagagcagtatactgtttctgacaaagtcccatgaaggaaggcgttcttaacgtcgagctgatgaatcagccagttgcgagttagagccaaagcgaggactgtgcgaacagtagcaggcttcacaacaggactaaaagtttcatcaaagtcaattccaggacgctgtgaaaaacaacggagaacccatcgcgccttgtagcgctcaagagagccatcagcattgaacttatgtttgaatatccacttgccagaaacaacattgcaggagggaggacggagaacgaggtcctaggtgttgttactctgtagaccagagaattcctcctccatagcctgacgccaatgaggatcagcaagagcagtgcgataagtctgtggcactggagactatgctgcagcatgaaacaaagcgagttgtcgaaatcccaacttagcacgggtggtcatacggtgatgattgaccaccggggataccggaatcgccc

SEQ ID NO: 196234 - DNA, 603 bp, Zea Mays
tgctggatggtttcctcggcctgatcacacagagggcaagcaactggatggggcagacctctttttgcaagtcgatcagctgtccaaaccctgtttttgattgccaaccatacaaagaatttgcatcttaagggggcctaggtctcccagacacgtcgccaagggccaaaagggatagagccaacaaagagagcatcataggccgatttgctataataagtaccatgagcagagaggcgctagatgtgttggtctgcgatgtcaggttgcagaactaccccatcaaccaagttccatagctgcagatactccactaggaccgttacaaacaatcctccccgaatatctaacacccattgacgatttgtgagcccctcggctattgttcttcgctttaaagcccttctagaaatcacttggataagggttggagagtgttcagccacagttttaccaaggagccaacgatcagaccagaacttcacagattcaccactgcctaccattgaggtaatagccacatcaacgaaggcctttgcaatttggtcctccattcaagagttgagaaatgtaatctgtaaccctattcaacttccatagaca

SEQ ID NO: 196235 - DNA, 764 bp, Zea Mays
gaaaaagaggagtcgtctgatgacctgtatgatgctaataatgatgatgatgctggttctgactgctcctcaggaaaacgaaggcgaactaattcaaggaaaaagggtcaaaaacgccgaaaggtaaatagagattgtagcattcttgaaaaaaaggtcgagcttccacttagaaatactgagagcattccggtggaagtgccaaatgaacgggtgccatatccggtacacacaaaagtaccaaatggacgagtacccatgccagtagacacaaaagtaccaaatgaaccagtgtccttggcagcaaacacaaaatgggcatcaccagagctattggagtttataggacacatgagaaatggcgatcaatctttcatttctcaatttgatgttcagactcttctgcttgattatatcaagaagaataaccttcgtgatcctcaaaggaaaagccagattatttgtgactcgagacttcacttcttgttcaggaaagcacgagttgctcactttgagatgttaaagcttttggaaatgcattttcttacgaatgagacttcaacagtaactaatagtagccaagtgactatcaatctcaattcagctcatgtagataccaatggacacaatgacacggctgcaaaagtttcccctgataagaggaggaggatctatagaaagatggaaagagatacacaagttaatcttgaggattatgcagcaattgacatgcataacataaatttgatttacatgaggcgcag

SEQ ID NO: 196236 - DNA, 383 bp, Zea Mays
accccatattttaggtcaacgacaacacctttagggttgaaccacttacaaagaaaaacaacttgcttgaaaagtgtgtagtccaactcccagatgtgttctaattgtccataatacgtgtccttccttagatatgacgattttttattgcgatcaaacacctcagttatcgcgtcgttgcaaactccactattttgtcgggtgcttttaccatcttgttgtactgtgtagaaagtgtatccattaatgtcgtaagtctgccatgtcgctacgctggacgagggtccctgtgccaaccgtctcacagtgtcattctttggtaccttgttttcacaccgcttttgaaaccaatcacaaaactctttgttatggagcctcacaat

SEQ ID NO: 196237 - DNA, 442 bp, Zea Mays
accctgcagatacacgctcaaagttttttagtggacccccattgacatatcaacaatgttatggtcctgatggcagaactgtgtctagtagtacattggcaaacatgggcagtaatgcttcaatgcttatggttgcacaaagaaatggccaagtgggtaaagaacacattgtatatgctcctgacatgaggttcagaccacaaaacccttactgtgacaggagagttgggagtaacacccaaaatagtgttgtgagctctggttttatctcgtctatctcagcatcaatggaaaggcatccattaatgaccaacaatcgacagttagaacaaggaaacactggagaaccatcagattccagaagtgttctcttgaaatctctcgcataccataaccctttagtgcatgaaaacacaaacatgactttgttgcatggaagagg

SEQ ID NO: 196238 - DNA, 489 bp, Zea Mays
gctgctgcgtggcgtcgtaggtatgggtgccgctgctgctggctcaactgcgcggacgttgctcggagacgaggacacccatgcgcgccgatggatagcgggtgaacagcaaaacactagatttagcggtggccggacagacgctatattttagcggatcgtttaccgtgtcttgctggggcggtagcggatgacgaaaaacactatatatagggtagcggatgctttagcgtctcttgctggagacagcctaaacgatttttctacgatgacttagatgcatggttagagacgaacctattagtgagaagcttttcctaggagacctcaatgggcatgtaggtacaagtgcaggtttccaggtggttcatgtaggtattgggtatggtagtaggaatcaggaggaagagtaactattggactttgcggtagcttttgacctgttcatagccaacacctttaggaagagactccaatgtagtgatctat

SEQ ID NO: 196239 - DNA, 340 bp, Zea Mays
agtaatcaagtcatgccaccagaatgaggtgagcagcccaatctaatcttttaacttggtatcgcagagccaagatccattcttccttccatcctccctcgccatgtcaacaaccactacacacagcagcttctcaggcgttacctctgctccttccctcagcaccgccatcaccatccgtctctcccgcaccaattttttcctgtggaaagctcaagtcacgccgatccttcgtgctcatcagttgttcggccatgttgatagctcgcttccaccaccgactccggtcatcaccaccggaactggagccgatgctcttcaggttcccaacccagattac

SEQ ID NO: 196240 - DNA, 458 bp, Zea Mays
gtcgcctaagggtgccgccggataagcgcaacaagtacgtcaatcgacactcctcgcaaaaagtcgcctacgggtgcagccggatcagcacaggcgtgcgaaaacggccaacaggccacattacaatacaagttgcagttacatacacacagcgagggcaccatatactacatcggctcaaccttcggggtgatacccaactctctataattaaacaacattattctcaattcctcaccctcaaaaagatttcgcagatccccctctcctatgctcgtcccaatcggcggggacaacagttctcgtttaccaatccggtctacacgaagacggtctcgctccatcccaatacgacggcgcctaccacttcgcgaaacctcacccacgctatgctttgacaccacccctcgccgcctgtacttggtcctcgcactaggaagatcagccgcctcgccaac

SEQ ID NO: 196241 - DNA, 412 bp, Zea Mays
aatgaagatgtaatgccaataagacttactgcaattggtttgtgccaaagggatacacgcagctaaatctgtctgcagaccatctcctggctgacttaatgggatcaaattggggccagattgagcatcaggaacaattggcacgtcatcgatagcacgatcaaaatcttcagggggacggtctactacaaccggacgcaccacaacctccatgagttgcaaatgggtcttcatagccgaagtaatataattatcccaatccagttgacaatcaattgggatgactcgtcttatgacatttggtggatgaccgatattaagcactccgtcaaccgcaatgtcatcagcttgatggaaacctaacttttgtttagcctttgtaaacacatctctcaaggagggtctaccatcg

SEQ ID NO: 196242 - DNA, 617 bp, Zea Mays
aggtgaagtttcttagagaatcgaatgcggacttaaccatacaactaaacaggactcaagagtcaaatatagagcttctttctattcttcaggaactggaggaaaccattgaagaacagagagttgaaatatctaagatttcgaaggtcaagcagactgctgatcctgagaatgggcttttagtaaaagaagacaaagaatgggctaagaaactgtcaatgaaagacgatgaaatcacagttctgagggagaaattggatcgggctctcaacattggaaatgcaggtggtgctggttccaatgccatttatcttgaattggagaaagaaaatgaaattttaagggctaaaatacaagagcttgagaaggactgctctgaactaacagatgaaaatttggagcttatatataagctgaaagaaaatgggctcacaaaaggtcaggttccacgtatttcaaacaacaatgagctgcaatttgaaaagcttacatcccggattcgtcaactggaggaggaacttaggaataaggaaatgttaagagacgacagtttttctgagtcatcaacgtctaatgcagatgagttacagagaaaatgtgctgaccttgagctgaag

SEQ ID NO: 196243 - DNA, 416 bp, Zea Mays
ataggttgcatgcttatgtttggctgcagtccctgaacttggttgtaccttagagccttcggattctataggtgcatcttgttgaacttgaacagattcagctgctacatccaccaccattacatcctcttcctcctcttgttgctcattatcatctaggaaaatagctcttttccttcttttggattccaagtaatccctcatctcctttctaattgcagtagtggtctttgaacatatctttgtatctccatagccacctgctagatgttgctttagcctttttatccctccggaaactatgatgtcacaaagggtgcatgtcacttgatctctatttgccaaatttgcccaataaccatacttccaacctggatcatttgagctagccttccttgctttgtctgtctttggat

SEQ ID NO: 196244 - DNA, 541 bp, Zea Mays
gcaggttcgtttggatggctcctgagatggtctatcaccgagacgttcgccatcgttgctgtatcctggaccggctgcggcaatggcattgtggcagttggcgcaggtgtttccatgtgggcaagattggagtcctcctggcagctcgcttggaggtctacaccgcaggtgccgcaagcccttgtctccactacctgttccatgcaaggtcctgtcgcgacagtggcagctcttgctccagccgagggcagtgtgcctgttcttgtgtttctgaacgatgccaggagggggctggagcaagctgagcttgtgcatcctcagcctgtttgtatgatccagtggagatcctgttcgttatacccccatgatctgtctgagatcaggagagagatcctcatgacttgctgctttgatgggactgtccggctatggagtaaggatgaggtgtctaggtcgaagaagcagcgtggtttgctaatatcattcagtgtcattgcagtaatagaggtgaacaacactctgaatggagtcctcggagttg

SEQ ID NO: 196245 - DNA, 507 bp, Zea Mays
gagacacaagtcctccctcaaggaagggttgccattctcctagatatccttggaattcttgccggggatcagatgatgttgattctagctttatgagttcacctcggcatgatgatgaagagaggaaatatgatgtgcaaccaattgattttgagagtagacacatctggtatcctccaccacctcaggatgaaaatggtacttttcaatatgatgaggatgatgacaatgatgtttgtgatgggaaggtctttggacatattaaccatgattattgtgacggcgaagatgatgatgatgtgttagggatcaaaggaaaacatagtatatctcacaaagagttcttgaggagtgctttacatgggcatttcagggctctcgtctcacaattgctcgaaggacatggcattgatcctgtggatggctggccagacatagtatcctcattagcttggcaagcagctacctttgtcaggccagacacgagcaaaggtggtagcatggatc

SEQ ID NO: 196246 - DNA, 395 bp, Zea Mays
tgcatgaaggaaatagaatcataaacgaaagtatatgacagaaaagaaagagacagaatagaaagagaaatattatgttgaacggctcagatttaccccaatatcaacacgacacatcctactctaaatgaacttttgagtaggattgttcatttggaaataaactggttgcttgtatatggtacaccaccgccacggcaatgagacaatcagttgcaaactggttgcttgtatatggtacaagccatccaagtttaacattgtattgagcacaataccaaaccctaaatcctaaaccctaaacaattcaagtggatggggcatttgacatcacagccgccgaagagtagttccaaacaagaaaggaagatcaacagataagcgacaaataaata

SEQ ID NO: 196247 - DNA, 660 bp, Zea Mays
ggttagattctatcctggccgtcggtccggcctcggagggaggacgaaggactatcggtgtgcagcgaacctggagataactccctggagggcagggtactctggatgccttggtgacgttgaggaatgtcgtgcgttccggttctctgtggccgacgtcgtctacacctgaatcaccggtataatcacgtttccctaactcgccatcgacccctcttctggtagcatccatcaaatcagggtttggggcgaccaatgcaccgattgcacgtctcaccggcgtgcgccgccgtgctgcctgtacgcgccgccgtgacccggtgtggaggtaggagaagggttgctggccattcgatctagttgtgtggctaggattagaagacgcttaccctttcgcggggtttgatctttggccgttggatcatatttggagggctagggttgtatagcgctaaataaaatcctggtcgttcatcacaagtcaacgactgagattagttatgaggaaacacttcacttcatttggtcgtggttgtcggatccgtgacgaatgggtaagattatatacctgttcggttggggtcttggatctaatctggtccacagattccagatcggacgaccctgtatgctcgataccccttcgccgcggttattctt

SEQ ID NO: 196248 - DNA, 701 bp, Zea Mays
gcaaattgcagcagagattcttgtaccattgcaagtgacattccatcacttctctgacaaggtattatgtttctgcacactgtttttagttaaatgctacagccagcttgatactttctgttgaacatttatggtgtgtgcaaataggttcttttgtcacctgatgggactaacttggaatatgagcagctcctactcatcacatgcaaatgcatgtatttcactgtaagcactgtttttatttcttttttgtttgtcttaaaaatatcatcacaacattttcttgaatcatgacaacaacacaataaagacgaagaagaaaaccacaaattggtaccataaaactaagtatcattctcacagatgtatttagttattaaaaaatctgggatggtaaattaacgaaatggcgggttgagttgtttagcttcatgtatgtttatgatagtattaaaggattgctatattgggcttgactttacccatttgttttctaaatccattagttgcttctctgtgcattgaaacttatggtgcagcactgcagcttatcaattctgtggcatgcatgctattaagtgctaactttttatcatgggtatctaattgttgctcttgcaggtgaggtcatacatgccatctagggtgaaacaaattttgccttccttttgcaaagacatgttccgtatactagattcttt

SEQ ID NO: 196249 - DNA, 390 bp, Zea Mays
aaaatcccaatttaagcattgtttcatatggtagaggaaaaatgagatattaccgaggaaacaaagttggtgatcatgtgggtgctgatggtatcgagcgagtcagtggcttgcctgactatttattagatatagctgtcaactcttacttgaaggcgcaatatgcaatgtatcttcgtgaatttctttacacagaattgcaactcaaatcaccagagtctaattcagcaactgatcttttccttgatccacaagagggtaaatggaaaattgaagaacagatgggcaatgtgcaaaatgacaattttgaatcctcacaagagtcatctaagatggacaatgctattgagccaccctactttataccaggaaaaaatccagacatcgcat

SEQ ID NO: 196250 - DNA, 381 bp, Zea Mays
agttactaaataagctgctagatcatgtcattaaggggatatcaaatgaacaaacaagcatttctggaaattccaaggaccaatctgttctgatcaatgataccttcattcaaacgtctgtcctttttgaatgcagtatattggaaatttgcactgaattgaatgaaacagtggaagttggtcctttattacaggcagaactaaaaggatcctggaactctgttaagttgaatgtttcaaaattttgtcttttctcctgttcaaatgttggaggcctcaacaatgccagttttctttgggtgaatcatggtgaaggtgagctttggggttctgttagtgctaagaatgataaaatccctggagaaagtaaagattttctta

SEQ ID NO: 196251 - DNA, 432 bp, Zea Mays
tggagagtggagccaccggtgatctggagctgtcgctggtgatctagactggagcatgcgagcaggcagaggggcggaggtgattgcaagcgagcaattgccggtgatttggagttctggactcaatggactgggcgcaggcagagggtgtaggcagagaggcgagcaaacgtcaggcgacagaggggcacaagcagggtttaggcagtgctagggtttcggccgaggagaggccaaagtaaatgttcctgtagatgggccgaaaacatcatgtagcccaatacaaaaacctagccactaacgactagaaactacaaaatcggacgactaatcgccttgatcgacgactaattggacgatctggacgaccaaaaaccctgatcgagtcatccggctaatcagtcgttaacaggcgaccaactcgactaatcg

SEQ ID NO: 196252 - DNA, 384 bp, Zea Mays
gccctcgcttgtacatgtgtaaaggattgtgtgatgaagttgtgtgccctcgcacatttggctatgctcgcgaaggcgttacgtgcttggtcaggtgtatttgttatgctgggctggtgcgtatgtattaggtcttggcgcggacagtttggtgtggtcgtttttgcttttgttgcgctttgtccggctgtgccctcgggcaacttaggcgcggatagtctttgcagtggacttcggtttttcgcacttgctgtgctaatccggctgcactcttaggcgacttctgcacggtaagtcttcgcggtagacttcgatttttcgcacttgttgtgctaatccggctgcacccttaggagacttctgcacgataagtcttcgcggtag

SEQ ID NO: 196253 - DNA, 316 bp, Zea Mays
aaagatggagcagtttcctttgattgtaaaaaggctagtcagatctaaccttagaggacttagtagtgcaaatggtatggattcagacattaccttcaaaatttccgaaacttcagcagtagagggtgaagcaggacctatagtcttctctcgcacatcttgtaccttcgtatcggcagaagatatcctaacgagtttacacttcttgggagccgaatctttcggctcctaaagaatcttatgtttcttcgaagctttctggtcctccttgacagatcgggtagcttgcctacctagaattctgacaactcttttt

SEQ ID NO: 196254 - DNA, 513 bp, Zea Mays
gtcgtttaaggagaaggcggcttcggctagagctgcagctttcacgtgttcgcatccagccttctctagaatagctgcaactccccgggtgtcggagaaagcacaaatatcgccgcggtcattcaaaatttcctcaaaactttggcttccccccttatccactcaatgacgccttcggggtcgcctcgaatgaagttctcctcagaggagtaggcacctacctttgcaaagctgtttttcaattttttcacgcaatccaaggatttttcgaagcatctttccttggattcgtggagctcctcaatatttttctctagcctggccttccaccattcacttatttcttagctggctttcgcgacttcacaattttctttggcttcagcaagttgttttcgaaggttctcaacttcggctctttgggcttcggcctaagcgttgtacttagcttcgtcttctttcattttattcaccaatgaaattaaaatcttgtctttctccaaaccttcattt

SEQ ID NO: 196255 - DNA, 428 bp, Zea Mays
gctttttgtctacccgccggcacgacagcagccacctgctgccattatgcctgcccgaggccgagggcctcgccatcctcatttcatattcgcggttgtgtttgttctagggcctagctaggtgttgacatcgtgtgagagcctccttttgccactggagtgagtagagttaagcctgttgtgcagtagtagtggaccagtgttagctgtagcaccttttgttttattttatagtcccgtgtgctcgtgcgtttggtgtaagctgacgcctgcaatttaggcttagccggcgtgatcttatgatgatttttgccttgttaaatgttgatggcctgcttactgtgacgctggtggccacctgttgtacgttggggttaaactatggtttgcattgccttggaacccgatgagtagattcttgagtcttg

SEQ ID NO: 196256 - DNA, 368 bp, Zea Mays
ctagcgacaaattcttcatacaagttcctttgccttctagaaagtcggcaatatatgacatgctcatgcttctttggtaactgtttctcaacatctcttttcagtcgacgcagtataaatggccgaaggacattgtgcaatcgatctataacttctttgtttactttatcttgaccttccaccatcccggaaattggattgcagaaccaatccttgaactcttgatgagactgaaatacatgaggcatcaaaaaatgcatgagggaccaaagttccataaggtcattttgcagtggagttccagtcagaagaatacgtctctttgaattgaagttgagcaatgtctgccaacgctgtgatttccagtt

SEQ ID NO: 196257 - DNA, 595 bp, Zea Mays
actacaagagaagctttaatggaaactgaaaggaaagaaactgaaatgacaaaaaagacactgactgaagctctggatcaaatcgaggaattagtcaaagaagttgagtgtgctaaccacagtgtgcatcagcttcaagatagtatgcagaggtactgcaacatagcagtcgtttatggtacctaattttatttcttagtttttttaccatttttatccatgaacgcagaatggagcaaaccgcagttgcaagggaagcaactttactagcagaacatcaggaaaaagatgcgacatcaaaagcattagcagaggcacaagggaggattgaaggtttactgaaggaaatttattctgctaatagaaaaaatgatcaacttcaaagtactatagaaaggtttgttgtttttattaccagaaaatcacttatgtaccctgtgtttacccccatttgcaaacatcttgttgaatgtgggggctcattacaactattgagtgctcgtgtgctctcgtaatcttcctctcaactttgatagtgttgtcagtggctgtgcctaatatggactagatgttgcagctattagctcatgcctgc

SEQ ID NO: 196258 - DNA, 363 bp, Zea Mays
cacaaatggacgacgagttgaatctaaaatagcatagggtctcttttgcagttttacagggccgaatgggtatccttcgttcagagtcgtccgatcgacaaccgagggttccgattagatcaagcccacacccgaatcggtatgcgatgctatgcgttggattgggaatcaacgacgctgatttaattaaatgaaacgatgtatttccccctctgatcctaggcgcaagctgacacatcaacgactagggttttacaatgcccagatccgatccctaccctcggatctctaatcgacggtcaggattccattactgcaaaggggtatgccattctaatcttggccttcaaacgcagatctaac

SEQ ID NO: 196259 - DNA, 487 bp, Zea Mays
cgcgagtgaaggagagcggcagcggagacccgagaggtagggagagaggggaggctggggttgtaattctgggacgggattgacgatggtggcgcgagtgaaggagagcggcagcggagacccgagaggtagaaagagaggggaggctggagttgtaattctgggacgggattgacaataatggtggcgcgagtgaaggagagcggcagcggagacccgagaggtagaaagagaggggaggctggagttgtaattctgggacgggattgacaatggtggcgcgagtgaaggagagcggcagcggagacccgagaggtagggagagaggggaggctggggttgtaattctgttgtaattttgtacacgtgacgtgcgtacggcgtcatcaggcaggcaggtagccggtttcgacgtggacgtacgtccacatcaattcttgtgtggcaccgttggcgccctgtacgtacgtaccttcctctagctagc

SEQ ID NO: 196260 - DNA, 1419 bp, Zea Mays
tctccgcccttgttcttctcctctctccctctatcttattacctcaagtagaagtagtatatattttttgtccgccttttcaatttttccttttatctccctgcgtctcttcgtcgtcctcctgctgtggcggccgccggcgatccccgatcggcgatactcaggtacccatcgctcttcgactcccaccgatttccgctgcgtggacgcatacgccgctcgaactcgatcgtctcccgtcctgccggtgccgctggttccgattgagtctgtgcacacgcccgcttcgcgggtcgccccctcgcttttcgtatctagtactagttcctgcccgtgccggtagcgaaaagcgtctttggttgttttttttgggtggggggacggacaacggacggggattttttttatctcagtcctgcctgcatgcttggtctgctacggcgccattgctgacggctgaccccaagttttagctcgtactatttctgcgtcgcgtcgcctcaagtagagggagggacactctcgtgcccatcgaatcatttctgttcacctccaattgattactactggaatagtgggggctacttggagcagggcgcagctaatgctccccccacaaaccctttacttctgcttctgctgcatactggttgttgggtgggcgctccactgcgaatctatttatgcagtattgcttactgcagtgggatcacttcattcaatcgaaaaaccgtggtgccgcatagatcctaccttaccatgtttcgtactacaactccgtgctattgctgcagctggatgttccgttgtcagactggctgtccatgcagttggttggtgggaggcaaggccaacctcctccttctcctgcgctgactgattttgctaatgttataagtgtgacccgggtctatagttggctagtccttattacttgtagcatagtaccgttgatttatgcggaccaagagctctcggaagtatcatgacctcaactacgggcctgatgctgttcatgacttgctcttttggatcctccagtgttctgctactcatgtcatatccttcgcactcttgatgcaggaaccgattcatctcattgctactgtccccttatctttgctactctgttaacttattattactgccactgattttatttccatactgaattgccattgtaacagtggtctcttccatatttgcagattctagttgtccattgtgctgcactgcagcagtagacaatcgtgtttttcggtgttttgtctgtctctccttgatcattcagatgcctgtacagctcaactgctatagctagctgtatatatctggttgaagaggactaatctagcaacaatgtcatcgcttcagttattgcaactaacagaacgggggcgcaaccttttgtcttcaaga

SEQ ID NO: 196261 - DNA, 351 bp, Zea Mays
ccccactccacccccaacgcggtcgcgtcaactccacctgcgcccctcaggccctcacgagtcacgacctcgtcttcgcgggcgccgccgaccggatcctcccgacgctatcgcggtcaaccctgcctgcaccctcacgacctcgtcttcgcggtcgcacatgatcacgtggtcaaatcccgctccgttagcaagtaccaccagcagcaagccagcaacccaatgctgtgctcctcccacctcctgctgcgcgcacaagtcaactcctgtctgcggccgccgcgccccacgccggtccccatggctcgttccgctcccactttcgtcgctgtttttctcctagtcctcgtg

SEQ ID NO: 196262 - DNA, 676 bp, Zea Mays
gactgtttctcgtagagctctggaggttctagaagctgttccaaaggtgctggggagagatagctgcgcagctgaatctttctgcacagccagaagagatgacatggctgtagcggatgaatctgacattacaagagcaccagcagaatagaatgcagactcaactttcaatgctagatcttcaggaagagccctgccagccacagaaacagcaccaaatgtaagcccaccaccaacccccagaggtggggacggcctagtagcaacaatttttaaacaggttggcctctgcagaccactgttcaatccaactgaagaaccacttccaccagatgtagtgaggaataatctcttcccatctgataaaacagcaacagcatggagccactttgattccacagaagatacaggtgagatgcaaacaattgatggtcttggtgatcgtgcagctcttggcgcattagacctccgaccaccataaggtccatcccgtggatcaacaatgttcttttcttcagtaatttttgtcaaagggccatcaccattaactcctagatcaaataattgcaacttcatgccctcggtacgcgcatagatagtgttcctctcctcatccatgaccatatcaacaattggatcaacagttgagaatttgaatgcatttggcagtacccac

SEQ ID NO: 196263 - DNA, 385 bp, Zea Mays
cggagaaggtgtggatggaggagatgtaccgggtggggcactgggggttcggccgcctgtccgtctccgtctccgtctccgtcacccctcccccgcccgtctggcccggacgcagccccgacggcgacggcggcggcggcgggagaaaggacgtggacctgcggtgcgagtcgtgacaggggaagccgcgcgaccgttcgtccttctgccggacagctccgtggcaatgccggaagttgtcctctgactttgcacggtgaaatgagagtgcatggtccgtgcatcggagctccgaggagaatctgcttgggggaagaagcgctaagctatgattggacccgggcgtggggattgctgcttgattcgccgccttggcggcaggtcg

SEQ ID NO: 196264 - DNA, 524 bp, Zea Mays
ccctggtgctccacgtctatcaacaaaggcaaagtccagtcaaaacaatgtgtagttttgagaaagaaataaatcctgcaatactaggatcagttaatcaagtttacatagagtttgtaaaagattttcatggttattgagcttattgcagcttacatattctaaccctaaccctataattggtatcatttttttacctttgttttttgtgcttgtccctagtttagcacttagcagtgacctctttgtagtttcatgctttcagtgctcttacaaatgctgagttatctcaaaaataacaaatataatggctatctttttcttagttgttgcactttgaattgatagttaatgatacaccgatgtggatttcatacctgcatgtgaattgaagagcacactagaattgaagggcaatagtaacagcaccgctcaggtgattctcaacctcttcacttgtagcgcaaactccagttctaaaccatgaagcacgcaattgcgaaaacaatggaaaactgtaaaat

SEQ ID NO: 196265 - DNA, 271 bp, Zea Mays
gtgtcggacaaccacaatatcaacaagctagagagcgacatcggttggttgaactgggagctcaactcacaccgcctcactgcaacaccaaactgctgcaccattcaccagtctataactgaaatctaaacgaacgtaagactgttgccatgttgcaacaacatcacctgaaaatagagttgtagccaacacaacgtcaccctcacttgcggcatcaccgcccatgatgattcccacatcgatccgacctttgcatcatgaagtgctggcc

SEQ ID NO: 196266 - DNA, 880 bp, Zea Mays
gaacaatgcaaggaccacatcatgggatgcttccctcatccatgaagccaccatctcggaggcctcttcctttagatgctgacgatactattaagccagagcaacaaaagccaaaggtccctgtcttggaggaacatctagttggccaactaagcaaggaggaacaagatacactggatgcaaagtttaatgaagcttcagtcgctgataagaaagtatatccctctcttgtattgtttcaactttcaagggccttcatgtcttatgaattatgattcgtaaagcagacggaaatagaacatatattggacatttcattactgtcctcactcctcactttgacctaacttcattttgccccaaacatgcagcttgggatcaaagttcaggcatagttgtaaatggtccaaatatatttgaagcaattttgcgcaactggtctagttttgtgtctattagtagttgacaaaaatatatggctaaactaatacataaaaaaactatcgtttctgttgtaccagtatggcaccaaatctttcaaaatgctcctgtgacatgattgtatttcttgaatttctcatttgcaaaaatgtttaaaaatgtagaaactagaacaagatagaattattcggtacacaaactaatgttcagaacattgtttaacatatttgaatccattttctaaatgtcaaattgaaatggtaggctggtagcagtgtttgatctctatagattgtgttgacgaacagaactcaaggttgtgagtgacttcatacaattttactcatcttggctatgttattataacatgatattctgaatcttctatgaaggtccaagagttggagaaggagatccttgattctagagagaagaccga

SEQ ID NO: 196267 - DNA, 282 bp, Zea Mays
tggacttgcaaacaaatgaaggtaaattctctgcagaggtgtgaggttaaaatcttaaagttgtctgtttccccctctatctaattcaagtgtttcaacttgcccatagctggtgggattcggaggggaatggagaaaatgaaaaaatcatttgaaatctatccttattatacattggcactcaaccaccttgcgaatcattatttctttactggccaacattttgttgttgaacaattgactgagatggctctttcttcaagcaaccatggactactgaaa

SEQ ID NO: 196268 - DNA, 1142 bp, Zea Mays
gtgcaactgtagatgatatggatgagtggctacggattttcaatctgaagctgaggcacatgagagaagatattgcatcggtatgtttgaggagttttttagctgtctgatttgaagcggatatatatttcttctctagtttatttgttttactgttagaagcatagctatgaaaagttgaaaacagagactaccagtttgacatgaaaagccaggattagtgattggccctatctggtatatggagtttactgataagtggaaatcagtgggatatagatgttaattgaaaatattcctctgcgcctctgtagatcaaaccccattatttgccattcaaaacccaaaggatcttagcacccgtatgctgaatacacatgcatccagaattatagcccttctgacctgattgtctgactcttctgacgacatatctgtctggcttttggggtttcagaaaaacttaagaaaaagacaacctatcaagctgagtaatactgacaacctgtactagtttggtagttgtaactagcacctgagctacaaggtctgttgaatcaactcaatactcacttggaatctgaaggtcctgaattcttgcttgcttgttatcatcggtttcagaattttggtagaatccttcctttggcatcagcctggcctcttggacttgtcattttgaaaaattaaatattgtgcctgtttttgtggtccactggtcctgctgcagtcatttgttagcagaagacacaattttctagatgctgataagaaagaacttcactaattggtcccctactatctaattttgcagattgaatcacgtaacaatggcttggagatgcagtctgtaaataacaaagggcttatggaagagctagataaattgcttgagcgtctgcggattccacaggaggtatgatggagaggaataatattcatctccctaaattgatgtctaatatttatttatttatttatttatttttgcttatatccaattcagtttgcagcatcattaactggaggctcatttgaagagtcacggatgctgaaaaatgttgaggcatgtgaatggttgacaggggccattcgcagtcttgaagttcctaatttggacccatgctatgtcaacatgcgcg

SEQ ID NO: 196269 - DNA, 393 bp, Zea Mays
ccctacttcggttgaaaccgaattcaagtcctattcaatgttttccccaagttaatttcaagaatgatgagctaatttggtctggccacggtaaccgcgcggatgaaccaaagaaccacgcgttcccggcgattggcggcggtctagctcaattaggtgggtcggcgagcatcgcagacacatgagaatacttaaacggggaagcagaagacatggactgacctgaatcgcgctggccgcggggaggctaaactatgcagtgttcttgagcagattgggggaaatccaaaattcgagttctctggtggaggatttgaggtgcaggtggatgcgctagctgcttgattacatgacggagctgagggcgcggtcaatttatagagcccgcgagcg

SEQ ID NO: 196270 - DNA, 471 bp, Zea Mays
agttttgtccagttttgcagctagcaaacaaaacagatattttctctacttggggatagactcaaattgattcagggacttgatatttagtccagtagcgtgtgaggtctctagaacctttgttgaccagcccaaccacatctcaactcgagcacactagagaaaccagcagggagaggagatcttttcttcaccgccaaatctgattcaaggttcagttaactgaattactctctccactatccccaaatcagtccaaaagtggatatttcgtgggaaaaaaactctagaacctgagttagaccatacatccttatatccatccatatcacgatccatagcatcagatgggcacaacagggagggataaagcttcttcagtttactaaatacaactctgaatttactccatcagtcatgctgctccctctgcatacctccctgtttaagcccctctatcacccaaatccc

SEQ ID NO: 196271 - DNA, 391 bp, Zea Mays
cctgttattcatgaatggacctatgatgcaatgtgccatgatctactcgaaatggatggcaacaaatacatttatgaggtaattgtcatatcatattattagtgatatacaaattctctttaattttcttatatattagtgttattttatattgcaaggtatcaaagatgggttcggaacctgaaaagaaggaatctttattagaggatcatgatcctctttggcttgaacttcgccatgctcacatagctgatgtgagttctatgtattatatttgtgtattccgattgcttaactttattctggtctattattcctaacactaattaaaatactaggctagtgagaggttgtacgaaaagatgaacaattttgttgccaagaataaagc

SEQ ID NO: 196272 - DNA, 485 bp, Zea Mays
aacaaacagggccattgtgcctccagctgtgaccgcctacgccatacccctcagtgcccctattagtacatccaagctctgcccctctgctgcagtataagttgtgcctctgttctagtgcagcatcatgatatgtcacacacaaggatagtgggtgggctatgatacaaccttgtatggcggtgaataattggttgagtacccaaggaatgcaatgtgacagagggaggagtggtttgggataagctgaaaatttaccgaataatactccctttgatttaagtacatgttgtttaggaaattgacactgtctacaaggtgaaacttttacaagtagtttctgtgaaaaatatgtacatttcaaagaaaagtaactattttgaaaatgatttttatgttgaatctagtaacatgtatctatggttttttataatgatgtttaaaaagtttgttcaccaggaatactaaattgacatatatcttgg

SEQ ID NO: 196273 - DNA, 531 bp, Zea Mays
taaggttctggtagctgtggagcaaggggagactcttgtgaaggctctagaagaagctgtacctgaagacgtgcgcggaaaacttacagcttctgtaactgaaattttacattccaaacgagaaactttcagtttaggtgcattgaatcgacttggctggaacaatgtaagaccaaccactaccaagacattggcccaggaaaagctcaaagattcagatcatgaaagcgggcttaaggataccaaaatggttgatcagaacaggatttctgcaaccgcttttgagggggatctgaaagacattaatatgacaaatgatgataaacctggagaaagcatcgaatcgtcacagggaaagccttctcaaacttctgaacctgttggaacagcgacagaaattggaactgaacagccttataaatcagataaagctaattatggaaccaatgatagcagtgaagggcagcatataacagaacaggacaatgaaatgactccaaagcaagtttctgatgatcagtcagtggccaa

SEQ ID NO: 196274 - DNA, 696 bp, Zea Mays
gtctgggcagacagcgcagatgaatcaggtccctgccaccggtgtcggcattggcgttggcactgccgatgggctaccgcagcaccagccaatgcaggagatggcggcgttctcgggaacggaccagcagtttgtcatgtttcggaccacaatgcgcgaaaagatgtatgctttttactactgctgacttgaactaagtagtccattcgtagtcatgtatttattgcactgagttagtaagcctcagctagcggaatggccgcatatgtcctgataccaactggaagatccaaattatctacatgcccgacaaaaatattaccttatcgaacttcatgcttacataaatttatctccttgtcataattacgaatgcgacaatggatgcattacttatgttgttagctttacttaaaccttccgagacttactgattttccttcctataagcgagcaaaatttaggttagtgacggattttttcttcgacccgatagaaggtatatgacagcctttagtactattcttgcagatttaactatataggaaggaaacagtcatcggctgagtggcggaagcggttgccagaactggcaaagcgacttgaggagatcttgtacagaaaattcccaaacaaggtatcgctatcgcattcccttcatcgtttgcaaggctttgttggtgtactagagatcaa

SEQ ID NO: 196275 - DNA, 437 bp, Zea Mays
ccgaatcgcaggttcaggagatccttgaaacgtccccatgttggtgtgccgtcgtcatcctgcagttgggtaaaccacatctgggcgacgtcgtccaggtagtacgacgccagtgccacgcgctcctccgccatagttctgtgttggtggaaataggcgtcgcatttgtggaggaagagcatgggatcggtcgtaccgtcgaagcgaggaaaatcccactttctatgtttgtggtggaagtcttgatcacgtaggccttccgcacgtcgggcagcaacgttgccgccggaggatgaagacgtgtccttgatggccgccatgtctgacttcaaggtcgtcatctccgcggtgagggacttcagctgtgccatgatctcggcgagggagggttctgccatggtgttgctgttggtgtctgaggcagtggatggtgggct

SEQ ID NO: 196276 - DNA, 310 bp, Zea Mays
gccaaatcttcttctattgcttccacaggaagaacaaaggacatccaatgcctccaatgcaaaggatttgggcacatccgaagggactgcccaagcaagcgtgtactaattataagagaaaatggtgagtactcatcagccagcgatttagataatgatacatatgccatgcttgctgcccaagatgctgaaaaggagaatgatgatgaagagcatattggggctgaacatgctgaacactatgagagcctcgttgtaagacgtgtcttgagtgcccaaattattaaagctgaacaaaaccagcgacaca

SEQ ID NO: 196277 - DNA, 415 bp, Zea Mays
caagatcggcatggtgaattgcaaatgaaggccaatgagttggagaaattatttgctgaacacaagttaacatcctcccgacgaggtaaacctacagatgtgcaggttgaaagcacacctatggtgagtgaggtaaagccgacaatggttcttcatgagacaattcatacaaaacaagttgtaaaggagagtataactgtcaatgattttgatgccggtgagcttctgaagatggtgaataatcaagaatttaacattagcacaccacaaaaacttggcattctaagtttagaagagtcgagagggaagttttatgagcattatatgcagaagagggatgcaaaactgaaggaaggctggaagctgcagagagaggagaaggaagcaatgttaaaggctatgcatgacagcctag

SEQ ID NO: 196278 - DNA, 546 bp, Zea Mays
caccacaggaaggtcaaggcgcaacgaaagacaaaagagactccacagtccagcagaacatggaccaggggtccacaacaagaccaccctcaccaagagcgtggccaacagctccatgtccataatatcgctaaccaatagcaaccaggcgaagcccccctcggcgccaggactaccctccacaacaaggtcacactggcggcgcaacaagaggcagaggccctcaatagcaaaggaagttttactgtgtctttcacggcgaggatgcagggcacccaaccagagattgcccagaagccaaggaaacaaaagaccgcatggctagagccatcctatcaaacaaccagagagccatcattcacaccccccaccttcattaacgaaacgaacacccataccacccccaacaccagcagaatttcaaccatgcttttccccagcaaccgcacctgcagcaccaagaaagattagcactgccaccccaccaccaccaaaacaagaagaatttgccaacccattgttcagaggggtcatccatatgatccc

SEQ ID NO: 196279 - DNA, 369 bp, Zea Mays
acgacgatgaggaggaggccatggtggaacgttaccgagcacgccgcagtttcggtgcctccaggaagcacttagcctcttggagcacgcttacctcggtacatgatgaaccatacagcaatcaccacaggaaggaagtaaagcttaggcattactatgaggaagacgaggaggaggaagaggagaaagaagatatttttcactgtaccgaagaattggtgtatggggacattgtgtgggcaaagcttggcaaacgccagccaatgtggccaggagtggtggtcgacccaactcagcaggccgctgccgatgcaatgccaccacaacctcgcggtgtcgctgtgctttgtgtgatgctatttggctggc

SEQ ID NO: 196280 - DNA, 1049 bp, Zea Mays
ggattgcattgagcagtacctcccgcaccgtgttgccagacagtttggactggaccaagatgtgcctgcagatgttcaccgtgccaaccaggattgggcgattgcttggcagacctaccagctggaaggtaagaatgtggctttcttcatccctcactctgagcctgggatcacaacacggtatgcacagtggtggaggcagcaacttctgccttctggcattgatgctgctacagcaagtgctccagtagagtggaagacttccaagcgcaaggtgaaaaagacaccagcggccatggaagctgaagctgagaaggagcgtaagatgaagaaggcccgggtctctcctacttatactgataaaaagcgcaaacttgaagagttgtatgatgctaagttgtcggattggcttccaactgcaaggaatgagattagtgacaccactagtgatatggaatcggaggaggccttattgcctaatgttggaactacaaatgatgatattgtgctactcatgccaaggaagcagacaacgactgcacctgtaagggcattgatggataatgacatgatcctggctctaggagagagaggaaactttatggttgatgagcctccagacatccaaagtgaacctgaagctgttgtccctgcaacgctggatgaggaaatagttaaaattcctgaggttatttctcttgatattccagataagccagaagaaggagccactgcagtaatggaggagcagaaggaagctactagtgtatctgatagatctgaagaagctagtgctctggtcataggagaggtagaagaaaaggttgccatagagggagctatttgtgttacagggatgaatccatcgggaaacaactcagcaactgtaatggaggcagatgaaagaaatgcagttccaaaagaatttggaagggctgccaaggaagtaattgaagctgtgccccagagccaacatgaagttaatgcaggtgttataaacaattctcatgatgtggtggctttacctgaggaggcccatccagttcagc

SEQ ID NO: 196281 - DNA, 569 bp, Zea Mays
gccggagcgcaccaaagcctcgccaggcgccccaaacctcaccggatcaactttatgcgcagaagagcatcaaacgagcatagcggggttgcttcttaccggaaatcgacgcacagagctccacggcgatgctccgatcgacgaattccacgcaaccctgccccgaggatcgctgggagaggacacagacacatccttgtgcacccgcgaatgtcccaggccaaacatcgtgggctcgttggcgctatacctgcgacgttaacacggcggcagccaaatccttccctgcgacgatgatatccttccctgcgacgatgatggggcgtggggcctggaggagctggcttaattggacggggatgtgatcgtaggtacttatacgcagagggaagagagagtttcgggtggttacaacgacccatgaatccggctggggaagaacggcgtcgcgcccgagaatcccggcaggtccgctccatccgcgttgaaatcgcaaggtagttgacggttctgcgcgggcgggtccacctaacagcgtaacaggtcgcgcgagtcacagagaacggctg

SEQ ID NO: 196282 - DNA, 1143 bp, Zea Mays
taggtacaagctcaagagaaggtttgatcgtgggtcgtacggtgaagtctggttggcatttcattggaattgttctgaagatacagatgttcataaagagcctccacactttacaaatatatctcaatcagagatgtataattgcacaagttcaggcagaatgtcatctgatgaagatcatggttcaggcacagtaaatggtgatttattcatactgaagcgcataatggtaaattaaatcaatcgaacacttgtctttatcgccttttcccatctagggttccctacagaagccccacatctgcattacagtagatatgtttaaagaagaaaacttcctcttgtgcattaatcagtaacaaacttgaaaaatactcccacatctagcagctcagcctcatagtgcatgcagtagggaggagcatttgccaggtctaaggcaagctgctcttgcttattaccttttggctgggccttaaaacttcaaaagtattgcatcctacagaaacctttcaaatatgcttgtggccattgcatgtaagctttaggcttcatttgtccactcgggaaagagttgccccttgaccagcaaaaaaattaacagaaaaatcacttgtgacggaaagtacatatgttctgccccagaagggtactcagcagtgtggttcaatccagaaactaccacatcaattccttttagctactcgctgatgctgggaaagtgccaaggaaaacatataattattattgtccaagcctaaagttttatgtgtttttgtattttttttatctactcttggatttattgcaattcaggttatttgtgattctactgtgtctagattatttattcttaatcaggttagctgtgcagtaaacaaaattgttttgtattccaattcatttgacttaatggattgttttatactggaccatctgttatattttgaactattttgttattcacagagcaaatatttgctgaaaaagcaaacataacaaagaaatttggatttctctgaaacagtactaatactagaagagctttattgtcctacggtcctaccttagacttgattgaaaactgcaggtggagaggggaaatgcagcttacttgagtggattgcgggagaaatactttgg

SEQ ID NO: 196283 - DNA, 819 bp, Zea Mays
ctcaagattaacttgggtatctctttccatctttctatggatctttctcctcttatcaggagaaaattttgcagccatgtcattgtatccattggtatctacataagctgaattgagatcgatagtcacttgtctactatcagttactgttgaagtctcattcataagaaaatgcatttccaaaagctttaacatctcaaagtgagcaacccgtgctttcctgaacaagcgatgaagtctcaagtcacaaataatttggcttttcctctgaggatcgcgaaggttattcttcttgatataatcaagcagaagagtctgaacatcaaactgagaaatgaaagattgatcgccatctctcatatgtcctacaaactccagtagctctggtgatgcccattttgtgtttgctggcaagggcactgattcatttggtacttttgtgtctactggcaagggtacccatccatttggtacttttgtgtctactggcaatggcactcgttcatttgtcacttctgtgggaacgctctcagtatttgtaattggaagctcgaccttttttgcaggaacactacaatctttatttaccttccggcatttttgaccctttttccttgaattagttcgccttcgttttcctgaggagcagtcagtaccagcatcatcatcattattagcgtcatacaggtcatcagacgactcatctttttctttcctagcagaagtgctaggaacattccatctagtcttggcaatagtaagttcttccaatgttaatgaaagcttccctttcagatctaaccaatatagcttgaacag

SEQ ID NO: 196284 - DNA, 1074 bp, Zea Mays
ttagcatttactctggcactaaaggtgctgaggctgattttggaaatggcaagacatgcatttgggtggatgtgctagatggtggaccagatgtactcatggagtttgtcccattttttgaggattcatcaatcaggaaggtgaaatgcagcttacttctttgttcgtttgtttggagatctggcatctgctctgttccgccagttgtatatgcttattgcagtatacatggaaatcattgcaattatttaaggaagtaaacaatatatcacagtcaaatctaaactcatgcttacaactttattatgtgttgcatgctgaattatcttctttcactgactttatccttcttttgccatctctagtcaaactttgctatttatagaatatataggaatatgattaaacatctacctccattatctcatcgtttgaatcttaagcaagtagcttatttttcttatgtaggtttggcacaactatagttttgatagtcatgttatagagaactatggaattaaagttgctggatttcatgctgatacaatgcatcttgcacgactttgggattcttcaagaagaacagatggaggatattctcttgagggacttacaaatgatcatagggtcatgggtgttgttccaaaggaattacaaaagattgggaagagatcaatgaaaaccatctttggtcggaaaaaaataaagaaggatgggtcagaagggaagattactgcaattgagcctgttgaaattttacaaagagaagacagagaattgtggatctgctattcttcgttagattccatgagtaccttgaggctttatgagagcttgaaaagcaagcttgaaaggaagccctggacttttgacggttaccccagacccggaggttcattgtacgatttctacgaggagtattggtgtcctttcggtgctattcttgtaaaaatggaaacagctggaatgcttgttgaccgtgcttacctttcagagattgaaaaggttgctgttgcacagcgcgaatcagctgcagataaatttcggaagtgggcatctaagtattgccctgat

SEQ ID NO: 196285 - DNA, 1753 bp, Zea Mays
ggcgtgcagcatctggcgtcccggcctcccggggtcgagttcgagcgccgcgcgcacacgtccgccagatggtgtgtagtagcggtggttgggaatatctaatcacccaaatcctggtctgacactgttccactgatagaatcagtatgtccgacgctgagccacctcctgcaatggaggaggccacgctgacaacgccggatgttgtgctaggcgagggatacaaagatatcgagggtcagaaggatggccgaacttgttatggtgaaggtggcgatgttatagtggctgatgagttcgcgggtattgttgaagaccccaaccaacccgatgtttttaaggctaaagagccagaggagggtgttgatgtaggggggcaaactaatgtcattagtgctgctgtgcatgttctcacagaggtggatgctgctgtgtcatcctccacactggtggatgatcccatggaggttggcatgcaaaccaaagaggttagtgctgctgcggatgatctcatagaggtgggtgctgccctggtaccatctgcacaggatcacacagcagtggctgcttgcctggttaatgatgactgcaatatagttatcactggtggtgtgcataggtcggatgaccaaactgttcaggagtttgggggtgactcccttgacgctgatgaggttgctcccttggtaaatgatgtacaagatgacagtgcaaggattgatatggatgttgcagctaatgatcatgtgcatgctcaggatcaggaaagctcacagttggatgtggctacagctctgttaaatgaggtggaaacagagattgccgaagctggagaccatgttgtacaggactgcacaaatatggatatgcagatccaaactggagatgacaaacatgttggcactattgcggacactgccacagatgaggagggcaagcacatgggtgaagataccatgggcagagatggtagtgagaaacatgatggggcagtcggtgttgatgtgtctgatgagagggtagaaatgggtaggggtggactgtctggagatgataacgagcaaaaggaagttgcaacagctgatgaagatcgtgtggaagaggaagacatgcaggtggatgccgtaagcattactggagacatggttgaggaaggcagaattgctgttgaatacattgcaggcgaagctgtaaatggcaaggatggtattgatgtccctgaagaaaagactcctcagatagacaaggctggtaatgatatccctgaagaagagggtctccaaatggggggagctggcttgattggcaataaaaatgggccgaaagaggctgtgatagctgattaccatggagtggaagaaaataccatactgatggaggcagctaccacgactaacaatgatgatgatgatgacaacaaaattgttggtgaagatgttgcagaagctgtcaatgacataactggtgatggtgtccctgaacaagaggctgcacatatggatgacgatgatgacgatgagccacctcctttagtggcaaagaaaggtggagggcgtcgtaagaggggccgtccatcttccaaggtccaggctgtggtgaaaccatctgtaaaggggaaagatgaagaggaggtttgcttcatttgctttgatggtggtgatcttgtgatttgtgatcgtaggtttgtgcatcacatggagtttttttatttctttattccaaaatacggaagatcaaacatgttacatctttg

SEQ ID NO: 196286 - DNA, 370 bp, Zea Mays
agcttacatactagaacaatcagaaattgttaaacgatgatgccttaataggaaaaaaacatatgattttcagtcgcaaggccttacattctaagcatgtcaacacatgtcaaaatggacatcatttttcttacctgtatttctgcctgtagttgttgaacttataggttcttcagaccataacactgagtaaatatgttgttcaacttgtgtaagtgtttgttcagtttgaggatacgtgcagtagtgtctggctaaagcaagactaatgttgcattcatttgtgtattcaccgcttactgacacgcgggggaaattgagctccaactgagatccctcaatgcaacaaacaaaagttacgggctggaac

SEQ ID NO: 196287 - DNA, 678 bp, Zea Mays
tgtaagtctgaccaagctgatcaacataaagaacttttactcgaaagtctgagcttgctcaaagcccactatcaacctgcagtgcaaatcattgcccacaaatgaaggattcgttgacattttccatttggcgggcactcctacacacaaaaacgagattagtttagcgtcctccccctccccaggatgcagcgaagctagcctgcctcactactcctctatgttgatagatgctagtgaaaataaaaagaaggaattttgaaccgccagatcgacagatcatatccacagaagaagttactgagtacttatagacgccacaaggttaaccacatttggaatgcaagagctgagaagtgcaatttgtttgcatggattctcattcagaataagctgctcactgccaacaatctagcccgccgtggatggccacaccaaacctcttgctcgctctgccaaggacctatagaacctaaaatccacctctgcttgcaatgccctttcgctcttgatatctggaaccagatcctctcctgggaaagggttggtcttactgcagcaagtagacccatcaaatttcgacagcatcagcgagtggtgggtttgacaacctctctcatcacaaaagactgaagaagagacttcgatggaatcacgatctacatcatgttcatgtgg

SEQ ID NO: 196288 - DNA, 417 bp, Zea Mays
gaaaggtggttgttcgacaggtcaagagattccagtgattgcaaatttccaatctgctccggaatctttccgctaatcaagttccgtgacagattcaaatttatcaagccaacaagagtgcctatttcttctgggatcggcccagctaaattgttgttggataaatctatgctcatcagaaatatcatgctttctgtatagttgagttcttgccctttggtctccacagttaaactgtcgtcagatggtcccatagtaacaaaaccatactctccatcatattcttcatcaaaagggtttcctgttccacctgtatatgcgatagtagtgaaggcttttaagttcgctagagactgtggcaatgttccagataagttgttatttgcaagatccagaaactgaagggcaggaagcctt

SEQ ID NO: 196289 - DNA, 724 bp, Zea Mays
gatgggaagaaggtacacccgaaacctgctgttgtggaagagaagaaaaagtccgatcaagagaaggagggttttgtggatgcgcctaagaacaacaagagctactgccataggtgctacggcaagggacatgtcatgagtgagtgttcgacggcgctgttttgtgaagtatgtggcactgatacgcacataaagcacaaatgcccggtgttcaacgctccgaaggtttatgcggttccggccggctttggcatcaacaagggcggcttcttccacattccctcgaacaagaagctggtgaagacgaagcaagatgctaggacagcaatgatacaggtgtcggagggacagatcagcttggagaatgttaaccgtgagctggaccgcttgcttcccgggtctgctccttggaaggtggaacaagtttcggctagttcctacagaactacctttccatcagcctcggaactgcagcgtatggtggagtgggggccggttcgtgctaaatcacagaaggcagtgctggaattcatagctagcactagcatggctgaaggacgggtcaaggcaaggctgacggatgtgtgggtgcagtttgatggactgccggctcagctttgcacttaccaacacatttggggagtgggttcgacacttggggtcacggttgaagtggacatgccttttttccgcaagcatgggatctgtagaatgttggtggctg

SEQ ID NO: 196290 - DNA, 378 bp, Zea Mays
ccggttcctagtatatctggctgctcatattacttggttttactagatgacttcacacatttttgctggacatttccccttaagcacaagtctgaggtccgtcagcatattgctgattttattccttatgttcgcacacagtttagctacactattaaatgcttccaagctgataatgggacagaatttgttaaccatgccatggatgaactccttgctgcctatggcatcgtttttcacctttcttgtccccacacttcaccacagaatggcaaggctgaacgtattctccgtaccctcaacaactctgtgcgtaccatgctccttcatgcgtccatgccacccaagtattgggttgaggccctcgcagctgccaca

SEQ ID NO: 196291 - DNA, 934 bp, Zea Mays
gaaaaatgtgtagctgtgacgtttgttccttgaatgctttattaggccactttggcatcatctcatgtaaataaatgatctgcattatggtcatatatctaacttcctctgatgctgtagatcttgcttaaaggtgctaatggtgatgagctaaaaaaggtgaagcatgttttgcaatatggagtatttgcagcctaccatttggcacttgaaacatcattccttgtggatgaaggtgcaactcttccagaactccctttgaagtcgccaattattgtagcttttccagacaaaccttccagtgctgatagatctatctcgacaatacctatcataccaatccctagtgcttcaccgccaaacagttgcctgcaagcatttggcttgcaaaatgatgatctgacatttgatggcactaaacgaatggaacaaacagcattgggagttccttatgaacaaacagcatctgttcagatcaatagccaaaatggacatattaccggttttctggatatggtccctcaatcatctgttggtcccttgtttcagcagtcggacattcactgtcctgatggtactggaggtgtgaacagaaaaatgaatttacaaggcagcctacctggaaccactagaaatgtgttggttaatgactttagccatagtgtatctactgctcatccgacaaatttggtgtcagctaagggtgacggttcacttgccaagaatcctgagattggtgacaagatagcagataagccggctgcccctctcaacgtacagatttctcatgacgatgagagcataaagaataattcagttgcaaaaacagatgaaattccagcatctccagcagaaaatcagagtatattagtttctttatcctctcgttgcgtttggaaagagagtctgtgtgagcggccacaccttcttcgca

SEQ ID NO: 196292 - DNA, 434 bp, Zea Mays
cgatcgcagcattcgaggagcttgcgcgggaggaccccgccgactatcgccctctgttctgccagggcgtgctgtacctcgcccttggaagggaggcggaatcagagtccatgctcgagcgatgccgcgaggtcggcggcgacgcgctaatcatagatccgtcagtgatgataacgccgaacgtggagacggaattcgatggggagaagccggagccggcgaaggtttgacctgtaactctgcagcggatgatctcataataaggtaacactggcattttggtaaccatagacgaataagaatgagggaaatttcagaacatgttccggtgatactaattagctagaggaaaatttgacacggaaagttccttattctgtagaatgtgcctttgtggtgagtaaagatgtccatttcatatggcctttgtgatg

SEQ ID NO: 196293 - DNA, 490 bp, Zea Mays
gcgattgagccggggacggccgcctctcacggtgaatttagtgcgaatttgtgggcggcgaggagatttcgacgcgcttctgagaaacgcggaaccgttctgctcttttctgtgtggaattcgagttcccaaaagacgatcctgtagttccagactctaagcgcgacagacacgttcggtgaaggtggttggccaggtctctcttctccgcacttttttcttcactccccgtgagtcagcgctgtgatttgccgacgacgaggagtgaagtgagcccctctttttgcgatgtgatgtgaggaattttacggggttcgttgcggctttgatgtacggtatatttcgcctccgattttccctttctgtccttgcaagggagatttgtgatggatctaaaaacgaaaagtaggagtaggtggggaagggaacggagggcatttttctgtcactggctagtttggaaactcaaattcgctagtttggaaactca

SEQ ID NO: 196294 - DNA, 385 bp, Zea Mays
cccacaattaaagcagccacttgaggaactgggtagggcggggaaacgagcaccaagggcactcggctgattgttcttggcgggggtaggagtgggatggatgaacactggttgcttaaagggatatgtgggtggacgaggagaagaacgatttgggttgaagggacgaattaccaaccttgtccgcttttcaaacccctgagatgatccttcaccccccatatctcttggtttttccttgtcccgaattcttagcttccactgacagtgttgtgcttacagccctactataggtgagatccagacatgtggccatcttgcgctggagtcgatcattcaaccctctcatgaagcaaattttctttttcaaatccgtgtccacttg

SEQ ID NO: 196295 - DNA, 327 bp, Zea Mays
cgcgcaggaccgagctgcacccatgtcttacacttttggtagtgtggcttgatcaattcacgagcaatgcaactcaagaaaattatgtttgcaatatgtcttttaattcctttccttccagataaagtgtttgggccagcttgccaaacagacgtcgtctatgaagagggagctaaggatgttgcaatgtctgcactgacaggcattaatggtattgttaatgctcagtttgtatattcgtggtagtggagtgatcatctgcatgtgaccccttccttaccttgtgtttgttttgcagccaccatttttgcatatgggcaaaccagc

SEQ ID NO: 196296 - DNA, 458 bp, Zea Mays
tggaatgaaaaaatcaaatctgttgctcctcataatttctctcagtctgtttatgatgaactcttccatctttctgtaactggtctctgcctgtctctgcatcaaccgcctcatttctgcatccctcgacaaaaccgcagaggactttctagcatcaagcaattttgatcgtttatagaaaccttgtccaaatgaaaggttagcattctctctatttgaaatatcagcaaaatacccatcaagctcatcagaaccatccagatgattggtgaagttccttgcaactttggatgcgtagttgttcccatcacctatctgcttcaaggttttaattttccgatatgactcctctggattcaatgagctcctgatccattttacatgctgaaatttatttttcagatcccctagatgaccgcaaccatggatgtcaacataagatatttgtggaagctgct

SEQ ID NO: 196297 - DNA, 1271 bp, Zea Mays
ccgccgccactggaggagaaggtgaaggagaggaagaagggaaaggagaaggcagcgacggaggaagagaaattcgagcgcgcgcaatacagctgtgccttccaggacgagggcgatgggggccgcgacttcgcgccgccggagctggtctggggtaaggtgcggagccacccctggtggcccggacaggtattcgacgccgccgatgcgtcagagatcgcactgcagcaccggaaagccggcgccccgctcatcgcctacttctgggacaggaccttcgcgtggagcgactcttctgcgctgctccccttctgcgccaactttacgcgactatccacccagagtactatgtctagcttcgtctccgccatcgactccgcgctgttggaggttgagcgacgcgtagaggctggcctctcgtgcggttgcttcagttccaacattgccacgaagcaggaggttcaaaactccggtatccggcaaggggcgtatggtgcggcgatagactctgtctacacgagggatgccttccatggcaaaacatttcttgactacatctcagcactaggaaagaagccactagccggtgctgatcttcttgacctagccaccgccaaagcacagttgagggcattcaatcgttcaaggggttcaagggaccttcctgagtttgtgatgtttgagggcattgcggagattacagagatgacacacacaaagggagaaaggatgcacaagagtgaggatgatgttctgagcaaggagaagaaatcgaggcgcgctgggagttcacgtagaaaaggagaggctttaccagaggctgcaaatgatgatgctatagatgaagacagcaatggaggggcaggaaatgatacgttgagtcagggggaaaagtcaaagcgtgtgaagagttcatcgaagaagaaaacagacatttacaaacatttatatggactcaaaactgattctgttgctgacagcagaacactggacaagaagggagtagatgatgttttgagcgagagaaaatctgggcgcacactgcgatccacgagcaagaaggaagatgcattagagggtttgaaaaggctggcaaagcatggaattgaggaattagcaggaaaaagcaaagatgcccccgttcttaaagaaaacaatcagaggcatggtgcaggctctgcacacaagggtagaatcacagaggatgggtatcatagacttggagattgcaatgctgaggatctaacttctccaagcaagagaagattggg

SEQ ID NO: 196298 - DNA, 476 bp, Zea Mays
gccatatattagagttagtgcaatatagattcagtaaacttattaaaatgtgcatttattagggtatctctatctctactacttattaaggctacaaggggtagcctgcctctcccttgttctgccttctgtcgatctacaccatccgatctgacccctccgctcgaagcctcctacgtctgtcgattttctctcgattccaactgcgcacgatgccgcccaaccatccttccgcacctacgccgagttcatccttctcgattcaacctaacacagctcctccaccgcatcgccagcctcaccttagcggagtacctttgcctcctcctcaatgcctaacccccaccgccgtcggatccgagatcatgccctcgtccttcatccttctccaatctgctcaccggcgacgatgcgtgcccacaacacgccatggacagcaggtgggcaggaacgccttctacgccggatcctcttct

SEQ ID NO: 196299 - DNA, 422 bp, Zea Mays
ggaacaggtctggatggcttcatacaatctagaaggaggcggccagatgtggtacatccaggtccagaacgaggaaggaatggcatcatggcgccggttttcagaactcctcaaccttcgttttgggccgcccatccgctccaaccctctcgatgagctcatggcctgcaagtggaccgggactgtcgctgagtaccaggatcgtttcgaagccttactgccccgtgtcagcgcgctcacggaggcacaaaaggtgcaggcgttcaccgcgggtcttcagccgctgctcagcctcgacgttgagatgcataatccccagtctctcgtcatcgccatgagcatggcccgcaaactggagttgcgcgagcagtacatcacgcaggctgtgcagacgccggcggcccttcgcttggggggtcgag

SEQ ID NO: 196300 - DNA, 388 bp, Zea Mays
aacatgtacataatgttgtgatagttcatctgatatgatctttacgtgtgcataggagttgacatgttttgctagaggccgctttccattatttggctaagagtgcttaggccatgtatgtgtgcgtaagcctatagggtcacacacttaagggaaggaagcctaacttggataggaaccgaattagattgggtttagggtcgttgatgggcctcagagtcaaacgaccaccagaatggctatataatgaggagtggggcactgtttgggttaacctaattctcccaccagcaattgtgcccctctcgccctcgccaagccaccatcgcgaacctaggaattcaatacgctgtgcttcctccctgtacatgtggataccttgaaggtg

SEQ ID NO: 196301 - DNA, 1124 bp, Zea Mays
ttttccttctgatgtaaaatacggtgtatgtgtcacttgcgttttcactaattgaacattttattttggatggttcaagtgtgtgcttgtgtatattaactatgagaacattgttttgtagcgaggtacgacggagtccagtgatttgaaaaaaggtttggttaatgctattcaagacctatatgatgttgttcatcatgaagcgttttcggttgatatgaggtctgctgtttgtctgtgttccttctaccttgtcttcagattttgtgcccttacactttcactttgctaaagccctttgtttataaatgttagtggccacattgaagactgggatcaaattaatttagcaagggctgaaggtcgcctcttcaataaactcaagtggccaaatgatcccaaattggtattttctaagtgctgaatgcacatttttctattgtgtctttattttcttggtagcctgcatttttctttagtcattagtctgatctgttcttttgtaatctgcccagaaagacttgatcaagagattgtattcacttctgacaattaaagaatctgctgcaactgtccctaaaaatttagaagccaggcgaagacttcagttctttacgaactcactgttcatggaaatgcctgttgcacggcctgtttcggaaatggtctcctttaggtggggctcctttagtctatttgcttgttcattttgttgtggacttgccacttctcttttggttgcaatttgattattttgttctgtgcatttttcccctggtttggctgttcaattatactattttcttacattctgtgtcttcattttttgttatgcagtgtgtttactccatattactctgagattgttctctacagcatggctgaacttcagaagaaaaacgaagacggtataactacactgttttatctccagaagatttacccaggtctgggctttacttctttcccttttccatgagcgctattctctatagtgtaaccttctcttgtgatccttcagttatatctgttttcctgttgtgatgtgtatgtctaacaaacttggaagttaaaatttcttcctaaacggtcgtgtttctcccccaattacttgtgcatgtctc

SEQ ID NO: 196302 - DNA, 281 bp, Zea Mays
gaaatcacccccgaacacaacagtcttcccaccaaagggcagcccaggccgtcccattatatcacgcatgttattgtctagcgcctcaattgcttgtctcttagtcattgatgcctcgttccagataatgagcgatgctttttgtagcaactttgttgtcccgctttgtttcatgaagctacatacaacaccatcatcaatagtaagtggtatcttgaagcgagtgggcagtcctccccccaggcaatatggaagccgcaacaccagatgtagctgttgca

SEQ ID NO: 196303 - DNA, 604 bp, Zea Mays
cggccggccgacgcactcgtgggcgagcgccgaggtcgtagcgtccccgcaccacttccgactgcggtggacgatgcggtcgaggatcagccaactatggtctccgatcgccgacaccgaaggatcagtccaccatggagccgatggcggaggaggcgacttgctcagctccagaccggaatgcctcgtcggagagacacctttgtcgttgggcgagggcttagctctgcagcttcgggaacctccttcgatgatggcgtggaattgtggaacggatgttggaattgttagatgtgttgagtggcaaacgtcggtggcaaaagaggtcatgcagtcgacggggtgatcaggtcagcacggcagggtggggtccatcaatgcggtgtccgccgcccccggagagaggggaaagtgcacgagacgacaaacactgaagccacggtcaaggatacggaccacacatccccatgcgaaatgccacttttgccctctggagttctgcctttctcagagcccaccccacccccatggcctcactcgagtattctgcacgaaaaagttaaaaaacaaactgcaccacggcaaagttcaagctcttttcaac

SEQ ID NO: 196304 - DNA, 728 bp, Zea Mays
gcagaggtggcctccgtgggatgggttggccgagcggtacaagctcatcggcgccacctccctcgccttcgtcatctgcaacatggacaaggtgacccatcctgtttgtctctatcacgtggacggttccgtcctgggcacttggcacgggatgacaggctggcaggcggctaattgcactgttacgattttgctctacggtattttgagctgctagaattaaaatgactatgaattcgagttgttgacctgctatagttttgctcatggaaaactaggtagtcaatgacatttaccggatattcagtgggaatttgggtggcaactggcaaaacgattgcactgtttttttcctctgggtttcctttagagaactttagctgaagtccactgatgcaatagtctttgtgcttgctctaaggaaacgtgccatatctaactgtcacattttttagggcttattttggaactcatttgcatcactagtacaaacatgtaaccttcactatgtaccaacagggcttttaggcatttccttacgagcatgaaattgtttgaagtaatgaagttgctatttacagtttaatgcactcttcttcatgtgacatatttatttaattctatgaaagcttttatggatgatcggtccatcatcctttcctgagaggaacaactgttcattgcaatattctaattttgcaggttaacttgagtgtcgcaattattcc

SEQ ID NO: 196305 - DNA, 551 bp, Zea Mays
ggcgactagaaacctagtcgtccgactaatcgtgattagtcggcgattagtcgtccgattaggcttgttctcgactaggtgctctgttttgggctccaggctggtcttttctatttgggccggcccaccaggggagctgaaactgagcgccaatgtgccaatgccgttgcccctcttgtacagtcttttaccctagctggagttgagcgccgccgccttcatttgcttgctgctaactgctctgagcgccgccgccctcctctgcttgctgctgctctgagcgccgccgccttcatttgattgctgctaactgctctgagcgccgccgccctcctctgcttgctgctaactgctctgagcgccgccgccctcctctgcttgctggactggagatggactgctgagtgctaactgctgtgctgagcgccgccgccctcagcttcttgttggagctggactgctgactgctgagcgccgcctgctctgctctgttcagagttcagaccatcctccactccctcctgctctgttgttcttttgctggaacagag

SEQ ID NO: 196306 - DNA, 432 bp, Zea Mays
ttggtcaaaacaaagctttccttcctcagggtgactggttctgtccagaatgtatggttaacaagcttggcccaacttcctcaagaattgagcgtggtgcaagaggagctcaaatgtttggcattgatatgtgtgggagactattcttaggaacttgcaactatttgctggtgtaagttcttgcaaattaatcatgtaatacattgggtttattaatttactaatgtttgtttcctttgtatttgttccatctaatactgcaggatcgaaacagcttcagatgcagagtcttatgcaagatattacaatcagtatgatgttgccaaggtcctccaaagccttgctgtctcagatgcatatgtggacatatgcaagcaaataaaggactactggaaacatttacttggtataattcataacgagagatcaaca

SEQ ID NO: 196307 - DNA, 362 bp, Zea Mays
aaaatgtcttataatttggaacagaggaagtattttctatatcgatatatctttccaaatatgctgaccataaaatggggttgtcacatttggttattttttgtcagctgctggaaaggaggcacctgttgtgacacctcttatgatgtatgtccgccagcaaagggcagctaagagtatggctcaggtacatttatttcttaactgagaacatagggctcttcttggtcaactgttaacttgctactgttttcctaaattgcagagacctggaagtaggcttagcagaaaagttgcaggtgttgtaactagcagttccagtcctaaaaggtcttttgagaagcgcagatcctccacggtag

SEQ ID NO: 196308 - DNA, 1118 bp, Zea Mays
gttggaacacgacttcattctgctgcagtgttaaaaacatctgctggtgcgtttgccaaaaaagaaacatatggtggttcatgcaagttgaatttgatgtcactcctttgttacaaatcagatgaagtttagcttgtgccttacaaaatggcattagtacacgaatggaaagtagcttgtgtcttacaaaatgacattagtacaagaatgctaggttttggagtactactctcataccaatgcttctgctgtcaactctctcttgttctgtcctcatcctcagcaaatagcataatttattcagggattcaaatcagacttcgtctttttcttacaagaagaaagaagcttatgttaaacttatccatttttgtgtagcatctgaattactaattaattatttttgccttcaaactgttatgttctaaatgagctttcaccatttctctctgcaggacacccattctcacaatgtaaccattttaatgcttttatgccttcaaactgttatgttctaaatgagctatcaccgtttctctctgcaggacacccattctcacaatgtacccattttaatgcttttataaggtggagtctactatccgaggatgaggcctttcacattcttaacaccgctgaggcctcaagcatcgacgacataaaacataattctggttattggggacaaaatggcaatccttgtgcctgggtctctctgagtgcatttgctgctggcagatcaacaatagttgcaacatttgctgttgattcagattcagatattgagacatttggtggacccatttctctggaggcaacttcaaaaatttctgcatattatcctcttgtagttctccaaggggggaatggaaatcattttggtgggtactggtttgacttatctggaattcatagtaggattaagaacatggataacaactctcccaaggagctgtacttagttcctggatcaacaatggatgtccttatcttcggaggacctgagcgttgggaccaagttattgattttgttgaaacagttgatgttattgatccatccaaaaatcatattattagttctaccgctgtgaagaaactatctagtggactatatcgag

SEQ ID NO: 196309 - DNA, 595 bp, Zea Mays
gctgaatattaaaggatgacagagtagaaaagaatgtgaaactgatgacctaccagcatagtgaatatccaagaatggattggttccttctcttgctattctccttgaatttacaggagatctactgccatctgcttccaaatctgctgagctgagatgccaggctcttagagtcactgcaaatgtcacttctccacccggtttaatagggagcgcagatttccatgtgctatgagcaatcgaaataacagaatcctgattcttccctgacaatgcaacatttgcttcttcaactggcacggttccggcatttgtcagtgttatcagaacatcacgaatttctccttcataaagaagaatagaaccatctccacccacaacattggcaattaacaatggcagaggaggaacaacagaaatgctaggaaagttgacactcttgaacttgctagagccacagcatctgaaaggatcagaaaggacaagcccttgtgcagctccaaggagcaaacaatcgacctctttgaataggtgttctgtaataacaccaaagcaatgaacaatgcacccaggaattgatatttgtccgactttt

SEQ ID NO: 196310 - DNA, 456 bp, Zea Mays
cgacggcgcagaggtcgaaccggaggctgcagcggtggcggagaaaccgccttcgccggcgaggtccaagcgggcgtcgtccccagcgaagtcccccaaattgctgcctgatgggtctacctcgtcggctaagtccaagggtccagccgcgctcgctcaattggatgcggcgaaggagaatcccccgtcgccaaagaggtccaaaaccctagccgctaaatccgacacccagccttctggtgaaggtgttgttgggcttgggcacaccgatgggaagaaggggtcaccctccccgaccaaggctaaaggccaagcttcccaatcagaggagaagaagcgggccgcttcacccaagaaggcgaaaaccacagattccccgaagacagagaagaatatcaccctagagctaaagaagaaaggcagtgagtttgacccaatggctgttgcctattggaa

SEQ ID NO: 196311 - DNA, 429 bp, Zea Mays
ctgctaggatattacgcacccagtacaccagctctcacctctgatcatccacgagagcctaccaattttgcatttcccccaaaactgttttccgcgccaccgtgaacggctcaccgtggccagctctctgcaggttagttcaagcctccctcaagcctcttgttgctcgtagacccctctgattgagcaagaccgcaccaaatcgtcatgaacacctcggattgtctctgactttcgccgtcatcgtggacaaagagattccggcctggattcgtgcaattaattgagggattagtgtcgccaagggtggaattaggtgtcggctaagctagggctctggtcgttgagtgtctcggccgatacaggttcgccggagggtgtgctcaccgacgttcaccatcggggagttgttgttgagaagaaacagaa

SEQ ID NO: 196312 - DNA, 498 bp, Zea Mays
ggtgcgtgcccatctccgtttggaccatcttctctcgtcccgccgcgtttctccgtatgaaggaatgccatctggcttatgtcggaaaaagggagcgccttggtctgcgggggctacggaagatgcgtccttttgggttttggcattgaaggatcgatatccgttatcaatcggcgctaatcttgtgcactatggggtggtttggggatgcacgattccactgggcactgcagttgtgctacagtcaactcaaaagtcaaaacagatgattttggttgggggtgcgtttttttttcatcgggtttttatcaaaaggatatgttttttcatgatataatggtgttaggatagccaaccttgtcaaagatttgtcgtgttgggggctcgatttggtgaatagtgttgcgcccttcgattcagatgaatgtgccttttttttgcagttgacggcagttctggacaaatgatcaggtttctttactttggttttaaactttt

SEQ ID NO: 196313 - DNA, 303 bp, Zea Mays
ttcaaatatggcaactgacgttgtcctttacctcgtcctctatccaacacctcctgttgaatctgagctagcaatatagcacgatccaccgtagtgggaacctgaacttgcaccacatcctgcagttcaaacttgaggccacaaacaaagtgggtaacaaagaatgtttcatcatattgagcattatgcaccgccactccataccgagcctgctcaaattcatgaacatagttatccagcgtgccgaactgacacaacgaaaacagtcttcgcagcgctctaggataagcctcagcaccaaac

SEQ ID NO: 196314 - DNA, 392 bp, Zea Mays
gcgttgggctcgctggagacgctgcagctcaacagccagaggtcgaacggcatgctgtcagggccaattgacgttgtggcgaagttgccgagcttgaagacactgtggcttcagtccaactcgttcaccggcccgatcccggagtttgatcccaacacgcagctggagactttcaatgtcagagacaacagcctcaccggaccggtgccaccctctcttgtagggatcacaagccttcaggatgtggcgctgtccaataactttcttcaagggccaaaaccaaaattcgcagctaagactgtggatattgattctgggaacgggttctgtcacgaagaccctgggccatgcgatccactggtgaccactctgcttggggtggcttcagggtt

SEQ ID NO: 196315 - DNA, 1435 bp, Zea Mays
agcatatgtttctcaaaatgcatggatccaaacaggaacggtgcaagacaatattctctttggatcttcaatggacaggcaaaggtaccaagaaacgcttgagaggtgttctttagtaaaagaccttgaaatgcttccatatggagaccatactcaaatcggggagaggggcgtaaatcttagcggtggccagaagcagcgtgttcagcttgctcgtgcattataccaaaatgcagacatttatcttctcgatgaccctttcagcgctgttgatgcccacacagcaactagtctttttaacgtaagtggcagataacaatcatgaatttcaatattcatcataggatttttgaaacatctatttatttgacaggaatatgtcatgggagctctgtcagataagactgtccttttggtgacccatcaagtcgattttttgcctgtatttgattctgttctggtatgttttcatactttatcaaatctatctttaacttttcatacctaagacgttttaagtgtttcgacttcctcgctgatcaatcaatattttgttaaataacaaatttctataccaaataaaaaagtcatacattaagcatcataaattgctaatttcagaaccccccaaaaaaagagtaagaaacactttgagaaaaaaagtgaaacatatcgatccaatccctccatttttatatttattttggtgaccatatttgtttgctgatgccatctaaaacaagtgttgctttttatcagttaatgtcagatggtgaaattattcgtgctgcaccttatcaagatttattggcacattgtcaagaatttcagaacctcgtaaatgcccataaagacactattggtgtttcagatcttaacagagtcagatcccatagaacaaatgaaaacaagggatcgattgatattcatggaagcttatacaaagagtctttgaagccatcaccagcagatcagctgatcaagacagaggaaagagaaatgggtgacactggtctcaagccttatatcctttacttgcgccagaataaaggcttcttcaatggctctatgggtattctttgccatgtgattttcgtatgtggccaaatagcacagaattcatggatggctgctaatgtccagaatcctgatgttggtacacttaagttgatttctgtgtacattgcaattggattcatcacagtgttcttcttgctgtttagatcgatagcacttgttgttcttgggatccaaacatcaagatctttattttcccagttactcaactcattgttccgtgcgccaatgtccttttttgattctacccctcttggaaggatacttagccgggtaaggatacttaaacaaattgttcatatccctgagatatattgggtggtgagattggttttcaacttgcacctcctatatatta

SEQ ID NO: 196316 - DNA, 609 bp, Zea Mays
gtgcgcaatggagagaagaagcggagtccgagctcaatttataggccatcgaccggagttggagaagaagcgcggactacggatgcgctggcaagctttccgcgcggcggattccggtgagggcacgggggtccccgtttaaccggagttcgccacctcggtaaccttttgccacgacgccgaggatatttaccgcagccaccgacgaccagtccgagccacggcgacatccttatcgccggcgagactgatccttatccacagcgtgatttttctgaaaccgatgaacagtgcgcctgtctctgtaaagagcttacctgacagatcaagttggagctctattctctccagtttttgtgtggtacctaagccaactttctgcatcaaagttatacacctataatccatcttcaactctgccacaatgcttaccatcaaaaagtcacggaatcacattcaaaatcgagctcaaagttcaccccattacactgctactgaaaattcagtcctttagcagtctgacagccagactttgagcatgattatcttccaatttttcacaagaacatggcttgcactcttaagcaaacttgttctcctataattggg

SEQ ID NO: 196317 - DNA, 505 bp, Zea Mays
cgtacatggttttcccttgtcaaatggactgtaggtgacgaggtgctagcatatgagatgagaaagagaaaatgttcagcagcacccatgttctgctgttggtgcatgctgagtttgtgttccaaacagagcaaggtcgacctttactccaatcatgaaggggaagagcatcctaggcaatgatttcaagtcgggcgacttgctagtcgatacacctgggcgaccaggcgactaatcgcgattaggacgacgactaggtcgactaatcgggtcctagtcgacctggtcgtccctacagcgctcctgcatatttgcaggacctatgtatataatattgatatatatagcaatatagcatatagaaggcaacaccaaacataaatacataacaaatatgaatactggaactggacaattcagatttcagaacatgaacatcagtcactaactcaattatatatagcaatatagcatataggaagcaatatcaattaccaaacatagc

SEQ ID NO: 196318 - DNA, 822 bp, Zea Mays
ggtatgcaggggagagtgtaggaggagagcggcttgagaacaagaacgcaggacgtagcgaggaggtctgtcgtcgccggcggctgaaggcgccaccgtcgaagaacagcccacctctaggaggtaactgtattattcttcgatgccttcttacaaactagcagccagcctttatagtataggcggcagggaacatacccaatcaacttattactttctataatggaaataggaaactctactgtctgctatagcagaaataggaaactactgattgatatattggagataggactcgcctgattgcttccaattcggctgcctgattgcttgcttcctttcctattcttccagctcggttgccttattggtgggggtttccttcttgtgcctgcgcccataggtcttcctgtagaagaatgagtccacaacacttcccccctccccctggaacagctcgtcctcgagctgaaacaccggatattctctcttgaagtcttctagtgaaatccaagaagcatcaacagctgcctgtccgtcccaatgtaccaacaattcccatacgccatgtttgagacgagcacgaatgattttcaagggtttaggaaccactctgccatgcacaagaggtggcaactgtactggatcacccaccggaggggtacccacgaaaggcttaagaagagccacatgaaacacattatggatgcgagctgctgctggtaaacgaagacgataagctactgatccaatctgctctagtacttcataaggtccaaagtacttagggcccagcttagtggcacgagctggagtgatacc

SEQ ID NO: 196319 - DNA, 275 bp, Zea Mays
cacgcggcggccgcctcctccaccacgccgatggcgacccctcactcacccagacccagctgaacaactccctccaccaagcacacgcaagcaggagaaggagcaggagcaggagcaggagccgagggcggcgacagagaatagaggtagaggaaggcgatcgacgaggagctcggtctcacctgctagcggcggcgaccatggaccggatgctgctcgaccagctggccggcgaggccctgcgggaggtgctgcacgcggtgcagggcaccctg

SEQ ID NO: 196320 - DNA, 366 bp, Zea Mays
tcaccaaagtaccggtcgtcgtgccggtctgggttcgagattttgatatcgatggggagttgtgggttaaactaaggctcataccaacagaaccgtgggtgggagccgtatcttgggcttttgtgtcccttcccaaggttaagtttgagctttcgctgttccggctattcaatcttatgggtatacacctcctcctccaaactgttagcatttctagttgcaactaaaatttcatcatccctgctgttggaaactgagcatagttggtgccttctagcttgaatgtacttatgaatttggactattgattctcttatgcgagatgcatgactttggtagactgttatatataaacgtgtccttgta

SEQ ID NO: 196321 - DNA, 469 bp, Zea Mays
cggcgatgctctgcggcgctcggaatggctgagggaaggaataggagagagagaaccggggggtggaagaaacctggccaaccattcgatccgatagggacgcgtgagattgatccgtagtttaccccttccgccttaaatctgcaccgtagaccttgtgaccgacggttcagatcgggcgtacgcatttcatggggcgagtggtgatctggggcgtcggtgctagatcgtgcggctctagttcatcggagggtagttttgatcttgggccgttggatcgtaatccagtgaaccgggtgagtgccgcttcacttataggtaggatataatcctggccatgggatcaaatttggatggcccggatttggcgataccccttcagatagcgcaattgcaaaagaaaccctgagtttagttagaatcaacccgcaatccatagggattgtagtctgagtctggcgggtttttg

SEQ ID NO: 196322 - DNA, 397 bp, Zea Mays
ctacaaccaattaaaaacgcattcttcacgataatcacccaacaatttgcattttaaattagacatcacatgagcactactactttttacccgcgatcataaccatacgcatttagactacaacaagtaattcatcataacttcgagcttaaccaaagccatctaacaagttgattaaccaaaggaatggcatagcccgccatacgacatacacgtcggcttgcctattattaacgcagttcgagacaccacatgtatatatatcacaatcacttacgccatcgactcttacttaacatgagttggctaacgccatataagacttaccaaaccattttaaacattgtaactcgaaacatgggttgaagcaggttaattagtttttcttaaccatttc

SEQ ID NO: 196323 - DNA, 664 bp, Zea Mays
gaggaattcacattttgatgttgttgagtcatataatatttatctgaacatgacttctcctgcttgcaagttatagaaagtgtaattttatcttcaccagagaaatgctgagtgttacttgtccatgcaggaatctggagcaaatttttatacaccggccccagtatcattatcaaatgaactggttactgtatgggaccctgaacttggaagaaccaatccatctgagcacaagcagttaaagcttgctaggagcttgactcgtgggatagttgatagagatctaaaaccaagctcaaatgagagaaagtaagtgaagacacattattttttcttttcttcttttcccctctgtcaacttatatctttcacaaggaattttctggcttctagtttcatgctgtcatgaacttgtgagacaaccgcattcatatgtcagctgactgaattagaagatgttggaagcagaattctgccgttcatgttaatagtttgcacattggtggttttctatctgattggttttgtccttactttgtaggttactacaaacaattattaagtttcctcctacacgcaccttggaagtggatgagaagcaattggtgtggaagtttcgtttctctttgatgtctgagaagaaagctctaacgaaatttgtccg

SEQ ID NO: 196324 - DNA, 448 bp, Zea Mays
cgccgtcctctgccacgcgcgcaacctcggcgcagttcagaaggcggagctgttcgtggggggcttaccgaaccatatcctcgtcgatgtagcgttgcgcgcaccccaggatcttcatacgacggtctacttggcccgcgccttcgagctacgcgccaatagcctcatggcgcagtttccgacgggcccccagcgcgtggcgcagcaacaacaacgagtcacccaggcctcgaccgcgtcgagcggcgctccacggtcggtcgcggctgccctaccgtcgatccgacaatttcgtcgcctcacgccggcggagcagcaggaatgccgtcgccaaggcctgtgcttcaactgcgacgagccctacgtcagaggccaccagtgcaaacggctctcctactatatcctgatccattcgattggcagctacagatttcaaacaaaacaagac

SEQ ID NO: 196325 - DNA, 496 bp, Zea Mays
gccacaacgcccaccctttcaatcacacggaatggtcctgcatatcgtggtcccatcttccctttagggtggtcgactagtgactgggcatttcgatgtaggagacggagccaaacccaatcatcaatgctgaactcgaactcacggtgtcgcccatcataaaacttgagtgcgcgttcttgagcttgtagtagcctgtctctgacctccctaaggaacaggtcacgttcctggagcatctggtccacaatttgagttgcagcagtcctaggttgatatggaacaagtggtggaggatctcttccataaactacacgaaatggagttgttttcagtgctaagtggtatgatgtattgtagcaatactcagcccaggctagccagtccatccaagccctaggtcgatcccccgtgatgcatctcaaatacattgcaatggttttgttgactacttcagactgaccatctgtttggagatgaaatgttgtactcatct

SEQ ID NO: 196326 - DNA, 537 bp, Zea Mays
ataccgtccacgttccccaacctcaagagctacctggagtgctacacctctccattgctggaggagctgagagctgagatgtcgtccagcctggaatccctgtcaaccgtgccttctgtcaggatctcacggatagaagaaaagagagacaaacacgaaatttatctggcttctgattgccaggttgctaagccacacaatcgccctgaatgctacactccaagtgtcggtgatgtaattctcttgtccgatgtgaagccgggccacatttctgatactactcgcaacggaaggccgtaccgagttgcctttgtcacagatgcggatggaggggatgaatacgacgactcaccaccggctaagtatggcatcgtagcgtcaggcaaaatcgatgccgccgatgacgaacgccaagatggtaaaagtacctcactttttgctgcttgtctgctcaacattgtgacatacatccggatatggcgttgccttgattatgaagcactcagaacaaaccgaggccttatagagaagatggta

SEQ ID NO: 196327 - DNA, 371 bp, Zea Mays
gccgagtacaaggacgccttcttacacaaaagagagggaaagagagaagctggcggcaggaagttggtgcatcaaaaaaatggctaaagaaatcttcagtcgtgacttgggctggcgccgttggacaggcgtatttgttgatctggttgctgtcaagctgcttactacgtgtcactgttgtcagtcttcttttcctcaggttgttgatactgtggctaaagggttggcgattcagtgctgtttcccagcatctgtaataatatacgctgtggctgtgtgttcgtggttggctggacgactatgtcgtggttgctacatcttagttgaaggtctagggctctaggtttccattagcagtgttttgttcagag

SEQ ID NO: 196328 - DNA, 342 bp, Zea Mays
ttagccctttcattatccatccacttggaatagtatccaccctttctgcgttttaatatttgtaacttgttttttgaaggagcacctgaccacctctcgctagaagaatctatatagaaagaagcatgttacggttaattggtaatttttttcactctcgaatatgcaggagagctgtgtatcatcgcattaagaagaatttaaatatttacaataatctcacatcccacacaccagacaaacttcaggttacatactcggtggagacaaaagataaacccaaccaatgctagcttaacgtccttttagtggcagcaacctcaagttgcattaaacccctag

SEQ ID NO: 196329 - DNA, 598 bp, Zea Mays
attcatgagctatgcttgtatgtcttatctgcaacgcaaaggccacagctcatccgtgctacattggcgacactccatgctttcttatcatggatcccaattggattcatttttgagtcaccgttggtatgttgatggctgaactttgtgagtgactgaatgccaaccgtgcctacaaaaaatgctgagccttaccttttttcttcttattttttatttagctggagacattactgaagttcttccctatggctgcttatcagaatcttacacttcaatgcctaacagaggtaagggacacctaggattttttgtgtctagtttagccatagcttgtaatttcagtggacaaatgggagaataatttattttatacaatgtttgggagctccatattatgatatgttacattaacctgacaccatattatgatattttacacaaacctgacgcttctgtttgggaccaattggagaagttctgttttgaattctctctgatatatgtagctaccttgcaggttgcagcacttcagtttggtgatttttataacgtgcagtatgtgaagatgtatacatttttcatgattcagttgcag

SEQ ID NO: 196330 - DNA, 286 bp, Zea Mays
gagacaagatttatctaagaaatgtggtttgcaaaatgcaaattgtggaaatcatcatttcaattgaaacctgtttgcacctgaaccattttggtactctttactaacacaatctgggacataaatctgttctaaatgttgttcaatatcatgcatgaagtaatttgctaaattagaccactgttccaaccaactatatatggaaattcttcatgatacagacattttgcaggtcaggccaggccaggccgaaaaaagcctgatagtttgtgaccctaaaattcgt

SEQ ID NO: 196331 - DNA, 666 bp, Zea Mays
ctgatctattgcccgaagcagtcaggaacttggcagacatgcaaaacttgtcagatgatgacttttcctttcggaagcaggtaccttttccctctaactacagacacttaaatcctccttgcttagctatcttaccaaatataagaacacatacttcctctggtaacaaataagtgttgttttgtcactttgtgttgtgtatagtcaaccaaactttgactacggagtaaattacttttaatgtatttaattgggatttttgaaaatgacacaagtaggtttgttttggaaaatagtttggcaattataatttccttgtgttttctaactatattacaaaaaattataaccaaagtcgtgtttttgtaaatcacccccattgtccaaagtttgacttattgtgactggagggtgtagaggatatgggggttgtcaaaatgctgcttaggggaatcaaaaaatcttggttgttgtgcactagcattgtcatgttctgattaacatatattcctactgcaagaatttatttggtctttgattagtcaatccctgccttctttttgcagcttgatgcatgtcttggttcagcggttgctgcaatggggccaaagaatattctggaaattcttcagattcagtcaataagtgatgaaaatgaatggattc

SEQ ID NO: 196332 - DNA, 710 bp, Zea Mays
cctcagcagaattatgacaaggagacagacaagcaagagaaatagcaaagactgaaattaggcatcacctgctgacaccacttggcaaggacgtggagacgaagcatgcgctggcgtgtgcgtgtgatgaacttgagcaagtcaatcttcttctcggtgtcggaccgctgccagctgccattggctccggcgccgatgcccttcccctcggcctccgcctgcgacttctccacgagctcccgcagagcgagataagactcctccgccgcacgccgcaccaccgcgcccagctccaccgtctgctgccccagctcccctgccatccccgcacgcacgcccgtcccgaacagctagggtttcagcgcccaccacctacacattctccagttccttctcctaattaactccgcaaagcgccggagacgaaactctagccctgtatcgccaacgtgcgcacgcgtgggccgggaggaatctcgcaggattcgccgcgcctccccgtgaatagtggtggaagagggagtggaactgaaattggaaaccactcagtcaagggtaaggctcagggaggggaccgagggtggccgcgagagagggtgaaaaggagagagatggtggaagcgagagacggaggtcggcggcggcgaagcggcggcgtgggtacggcctcctctctctctctctctcgcttctgcgatcgatgagttcag

SEQ ID NO: 196333 - DNA, 962 bp, Zea Mays
ttgatttaaagtactgagatctaattctgaccctacgattgccatcggatggcctcggacttcccgacccaagggaaaattcagattcaatcccggtcgttcgctccgatctaacggtcaaccgaccgtcatcaatcctgacgcagacccgagcgccgctctcccagggatggcagcgtggtgctccggcgagcagtgccctccccgccacggtgaccgactcgcgacatgatgtgctgctacacgaagcggagggcatggcgaacacaggggagtccaacataccatgaattgtggcacaggttgacaaggccacggcgcgcggcggagttgcggcggcggcgaagttcggcgacaaaattcgggtgctcggtttgatccccgggcatgattcttcatgtacacgacccacgtacatggccgaacacccacgacccaatatcagccactaatcgttggtgcaagcacggggcttcggggcggatggcagcctactccctgcgggtttgatttcttggtcacgggagtggatgattggtcgagatggatgggagttgaggggagagaagagcagggcaagggcgcgaggcggcaatacttataccccgcggctagatcctaatcttcacctggtgccgcggatctgaccgagagtcacggcagtcacacccgcggagtccgtgctcaaggaggccatgaccgagaatctcgttggcgccgttgcccgagatcgctggcagctccaccgggttcggttgtggaatcaccggagtccgcgcatcaattgcctgcgcatgaagcggagcagagataaggagaggggatgaagctgaccaatgggtcccacacgacggtgacaaagcgcaaaaacgcgtggaaaacaccagttgggccgcgcagagggaaatgggcagtgggccgaatagggcgtttgcggcccagttaggttatttcccattttc

SEQ ID NO: 196334 - DNA, 334 bp, Zea Mays
gatgcgtaaagatgagttgttgccaatcgatacttgtgtgccacaccctgatggaccgaataccccctggcatcaggactactaatcgccaactgctgcagcaaggattgtgcctccggatcagtaacatatgagttgagaacctcctgtagccactgaggttgaatgatagacaaagcatgaagatgaagtggagagtgcagacgagatagagcgtcggcgacgacattatcgtgccccttatacacaatctggaattggagccccatgagcttggtcattgctttcttttgaagatcggactgcaggtgttgatcctccaagtaacagagac

SEQ ID NO: 196335 - DNA, 317 bp, Zea Mays
ttggaaagcgaactgtgttgtcaccgtcgtttattggcggtcctcgtgacatgagacgtcgatatatggatgctatggctctggtgcggaagtttggtaaaccagacatctttcttaccatgacatgtaaccctaactgggatgagataaggagagagcttctacctggacagacaccgcaagatcgtccggatcttgtagtgcgtgtctttcatgcgaaactacaggagctaaagcataggttgactaaacaggatattctcggtaaagtccgagcctacgtttatgtcgtggaatttcagaaacgaggtttgcca

SEQ ID NO: 196336 - DNA, 284 bp, Zea Mays
agaagtgtttgtaaagtttattgttaaatgctacaattctggcctaacgagcataacaagctttgcacgtcagggaccccagggtcgtcgtcatctatctatatttgaggtttttgcgtcaacatgacaaggtgcttttactctcaccaaaccgttactggggttgtccctgtgtctgtcatttctttgtcctaggcaatggccacagagaagagccaaagacatgatgggtattttttacaacacggacgtgctggtaatgtctgtggcggaggcagggttgg

SEQ ID NO: 196337 - DNA, 454 bp, Zea Mays
ttatcgcacaacaagaatcatccccatttgctaatgacaccaataatacctactaacctatggtttaccacccaagcacagttacacgccgcacattagtttctaacatgattctcgcataactcgtaattcaactactcgctagccataaatcacgcacgaccactaccacatcgaccggttaatttatttggacaccgcctagcgtaccacgagtaccccgcattttgactcgacatataaacatagaggaggcgatgactacttcggcatgtcaccacctctctatttaagcaacgacaatttccacctacaacgactgaacatccccatcgagcacaccttattttactatgtctcgcatacaaccatattgtggcgtgcactcgagacacttcaatcaatgtggcgcaaccactaatatatgaactccgatactcatgtttttataatt

SEQ ID NO: 196338 - DNA, 617 bp, Zea Mays
atctcgttcaagaagatttagttgatgtatttgacattttggatgacctgaagaatgaccctgtacagcgtgatttgttgaaagaagtcgagaaacacgatgtaaagaatgtttctacatttggttctactgaaaggagcatccccctgtcccaaggtttcacgatgccccggtacgtgtgccagtaataatcagtaattttattcttttaatattgtataatagtattcagtaataaccaattctatgtcagcaggttgtacctgatgacactgacattcagtacacacctcctcagccacgagcgacacgttctcaagctcaacctctgaaatcttcgctccgtaccaatgagactaggcagattaggaaaggccagaagaagctcaagaagtcgcctaagaaagtctcccaagatgttgagcttgatgacaatggtttccccatcatcgactttgctgctctagaccgttttgatcctcctccacatcttgccgtggatgttgagagttatggtggaccagctgcctcaggttgatatggtggactcgtgtcactattcagacctgaatggcgtcgcaaagtggctgcaaagcaggcagctttgaggatggtgg

SEQ ID NO: 196339 - DNA, 1119 bp, Zea Mays
ttcacacaactgctgctctatggagttcgatccctaaggctcaccatactacatcttaccactcgtgctgtggttgctcgttgcgacaactcctgcccctataccacgttcgcttccccaccccaccttcctccgcccatgttgtccaaccctacgcccttgcctccacttgcccctgcctcgacttggcaccgccgccttggccacccagaccacgacgtcctctctcgactctcgaccacgccgtccattcctttcccttgcgacgacgccacctcgctttgccatgctgtcagcttgggcgtcatacttgcttgcccttctcttcctccatgtcccgagctactcaccccttcgacctcatccactgtgatctttggacatcccctgtccaagcattttcggttaccggtactttcatgtcatcctcgatgatttctctcattctttgaacttttcctccgcggctcaagtccgacacacttcttcacctgggtctccacccagttccgtcgtccggttcgtgccatccgatgcgacaacgaccaagagttcgacaactccaccactagtgccttctctctcccatggcgttcagttgtgactctcgtgcgtgtacacttccctcagaacgatcgggccaaacacattattcgcaccactactgtcatgatccgctgcctcctttttcagacgtccattcccgcccactattggcagaggccctgaacactactgctcatctcttcacccgtagtgacctggacacgacgtacctcctctacgtcgacgacatcgacttcacgccctcctcccccgaactctagcgacgcatcatctcctccctccattagaagttcgcgataaaagacctgggtgagccgcaccacttcctggggatcaccgtggagcgacggccacatggcctatttctccaccagcaccagtacatcgtcgacaacgtcaagtgcattggcatggccgaatgtaagccatgtactactccgatggacactcaaggcaagttctcctccgacaacggcgccccggtggccgatcccaccggctaccggagttttgtcggggccctgcaatacctcgtcttctcccgtcccgaca

SEQ ID NO: 196340 - DNA, 544 bp, Zea Mays
attgttattaagattggagtttctactgaatttgcatggcagattgtctcactgttggcgtccagatatatcaaagtggtctgtattttttgtgttgactgtgcaagatatgtgctactttgcgtagacgggactggtggtgggcagtcgcattgcatctgttcggactgttgcaatccatactccatatagacaaaatactgtagaggtcgtagcaagctgcagcgaacatgctctttctaactgtattctgttatgttctgaaaatcatactacctctgcaagtaatgtaattaatctggggcacattgatagacctgatttgcttaatatttgatgaaagatgcaaattggcacaggtttgcagcaggacttgctttcttgcaatattgtgctttgctaggttttggttacgctgggattggacagcatctgaattggagggtatcgtgctaaggttatctccaacagatcttctattttatctcttatcttctattctaaattcatctctacaaacagcgttagggggtgtttggtttct

SEQ ID NO: 196341 - DNA, 604 bp, Zea Mays
ttctcaatatttggtttaaaaatatatttttattttggacttgagcaccttgcattatgccatttctacgtttcctcctcatcggacatgttcaactttaaccctgaattactgaattaacttttgcattgtcactgaaggtcaaagaatggctccaaaatttgggaattggggagcatatgccagtagtacatgatgaggatgaagcggatgatgtaaatgttccaccacagtctgatgataactcaattagaaataggtaaacatgtttctagattggtgatgatagtttattatagtcttatagataattaactagtaactgatatataggtatgcttttatcacatcgtatgttgccttagagcagttgagtctccatattttattccatgcatgcagtaagcaagacattgaacctgttgtggcagaaacgttccttcaagtgctgttttacctgtcattcgaccggctcttggacgtcaaaactctatttctgatcgagcaaaagttgcaatgcaagaatatctaaaccatttcttagggaacttggatatcgtcaattcacgggaggtactaaaagctttgtacatttcaaagtaga

SEQ ID NO: 196342 - DNA, 488 bp, Zea Mays
ggatttgaaaaggtctctgaacagactatagatgagtgcaaatcaattgctgttctttacaagcacaagaagacgggtgctgaagtaatgtctgtgtcaaatgatgatgagaataaagtttttggcattgttttccgtacccctccgtaagtgcagttaatccttgtttctttgttttgtctatggtaaatcagtattccgatctccattagacgtaggatttgctgtacaaaaaatgagctgggcagccctaggcacatatagtgaaagaatgaatcattgcatgtaagcttattttcgtgttgtaaagaagattttgtttattaccaggaaaaattcaactggcataccccacatccttgaacatagtgttctctgcggatcaagaaaatatcctttaaaagaaccgtttgtggagctcctaaagggtagtttgcatacattcctgaatgcgttcacatatcccgatcggacatgttatccggttg

SEQ ID NO: 196343 - DNA, 597 bp, Zea Mays
aggaacaaaagcgttcgcggaaaggttgcagggtctctgatggagtgcggcacgaggctccggacccccgtcccccggccaacgcgagcaaactcgtgaaatggagggggcgacacagacatgatttaggggacgagcgagcaagacgagacaataaagaagtgcaggactccacccagaggaggaggaccacagcagggcgagagacggcgctgacgccgcccatcccagcatgagacgctacaacatttctcgggcggggggtctggaagctcgtggtagtgccagaccggagaggggcggagggtttgcgacgagattgacagcgaggatggtgtgactctggtgcctgagcgaaggagattagcgggaacgacggctgacccacgcaggcgtgaggtgcttgaccgagcccacgatgactggcggggcagcagacgggagtgggggcgatgcgggggtggtgggcgctggtgcagaatcgctggtgtggatggggaacggaggcgaccagcgtggatggcgatggtgcggatggggaacggaggcgacatgcgtggacggcgatggtgcggatggggaatggaggcggcggtg

SEQ ID NO: 196344 - DNA, 398 bp, Zea Mays
ggctagcgttatgttttacgatttaacgtgtttatgagtttatcgtttttgaaatatcgtttgttgggtttaagttgttatcgatatgctttcgatcttataggacatgtttggatgcttgtattgttgagttttgctcgtatctagtgaacttggctctggctggtctggctgagtgaatgcagcataccatgtttggctgtctgtatacatccagtctgaatttttaccttttcaaccatcttcgttatctattgggaatttggaatatgctagtgctcttttctttttttgcaaggtaggtatgctcgtttcgtacgatgcacgaagcagtttcgcctcagcatactttagggacatatgtcttccttgctcacttcaacaacatttgccgtcag

SEQ ID NO: 196345 - DNA, 959 bp, Zea Mays
tgcttaaaaagagttatggcatttgaataagactgatttgcagtctcgcattcgttcatttttaacagaaaatcacctctcagacgaaatatttctgctttgttcttcacagggaaaaattctaaattggtattattgattaagttaagaccactgactagttctcctttcatttctaagtaagccttagcttgttcacatatcttcacaaatgcttcctgcaaccagagcagatagtgaagtgatcaaataaggagatactgcaagaagtactatcgtgacgatggtagagacagacctgaacttccatagtagcatgaccatacatcttatcaagtatagttacacaaacttcaggaagaccttgcttgcgagctatgtgagcgagcttattcacattccaagccttgtctcggtagccaagatgatgaagttgaggatttgtttgaccaaagtccttgaatgcatctattactgaattgtacatctcattcctccattggagcagatcataccaaacagtcatatgatcccattcattgggtgtacgaagtctccaagtttcaagaatatccttgagatcagcaaatgagttattttggttggaattggtaccagagcttgctgaagctggtttgttaccatttgcgatgtcaagcagtattttggatgattcttttacttcaaccaactgctgaaactgctgcagcagaggcattcgtggctgtacagacatttcaggcaactgccaccactgttctagtgcgagctcaacacctttggtgatgaggttctctgcttcactaacaccattagtacctttgtcatggagagtaaaaaatgcttgaatcaggcgtaactttggtgtctcttctacctgagctttggaaattacattatccttcatatatgcccagtcaggaaccttccaaagacagtctaaaagaatttcatgattc

SEQ ID NO: 196346 - DNA, 479 bp, Zea Mays
caaaagaagaacaagtggggcgacagggacagggaggaggggaaggcagaggaaatggaagcctctttcttgaggaaagatggcggtgatcaagccagtgcggcgacaatgtccggcgagcacaggaacaagggccttgactgggatttgaacgactggaggtgggacgccaacctgttcctggccacgccggcggccatcgtgccgtccgagtgcagcagcaggaagctgagtcgagctcagggggagatcgacttcggcgtcgtcgttgacaagaggcggaggctctcgccagaggaggacggcagcgccggttgcagcaattctggggtagcagatggagacaacaatcatgtggtgcctgctcagagagggcggagcagcgaggaggagacacccaggaaaggtgccagttcgagcaccactccgtcctgccaggttgacggctgccatgccgatctcagcggtgccagggacta

SEQ ID NO: 196347 - DNA, 310 bp, Zea Mays
gctaccaaataaataatcaaatcaaaacttaatcaaactcaaagcaaataatagcacatgttttaccttcactgcttgcctacttcacaaatcacagcttcaccttcgttgtttctgcttctcaatttgcacagagcgtcctattcctacatgatttgtcacaaattagcagaaactcttttgtcctcctattccttcatcgtcccaaactcccatcagaacaaggaatccccaacagaaagcttggaggggcattggcacacgccgcacatctcgatggcattatggcaaggccatacatcactggctg

SEQ ID NO: 196348 - DNA, 464 bp, Zea Mays
ctccatgcctttggcgtgactctttttgattatctgcagatgtagcttcatttcttgaatccaaacgagattcatcatatcactgccttttatcacattgtgtgaagggtatataggtgtcagacccaattttgacttgtggtgatattttttctgggtcgagttgttgtgaaagagggagaagcgaaggataataaaggcatggccaatcgggtgcgcgagcatccatcttcgcaacgaaaggtctgcgagtatatcttgattacactttccttgtctaacaagggttggcatcaacaatggttttatttatggggcgcgggtcatgagaccttacctaggccacaacttcctggctttgatttgggccttcccttcgaggctcccatcagttcgtgccgcgacatcacgcccgacgagaaggtctggatccacaatcttttggcagatgtgcttatccttcg

SEQ ID NO: 196349 - DNA, 789 bp, Zea Mays
ctcggacttgcagactagagggaaagtccagcaaaagtgagtgaagtcatcgaggatgactaggtagtactgcgcaccagagacactggcaacgggagaggtccaaacatcacagtgaataagctcaaatggtagagatgaaactgaactggaatttccgaagggcagccgcacgtgcttgccaagttgacatgaatgacatagagtatgagcggacttattacatgagatggaattattttgtctaagcaaatttagggcagcagctcctggatgaccaagacgatggtgctagaggttggtggaggtggcgaggttggcttggggcgtggcagggacggtgtagaggccgtcggagctattagagcggagaatcacgcgtctggtctgcagatccttgacagaaaaaccaaacgcgtcaaattcgatagtgcaattgttgccacgagtaaattggcgaaatgaaagtaagttgcgcactagagatgggacaactagaacattgcaaagcgaaaaggatgaagtgctaccaggcaatgtggaggtgccggagcaagacacaggaaggtgatgaccgttgccaacagtgatggatgggacagaggagggttgatgggagagaagtataccatccgtgttgtgcatgtgggaggtggcaccagagtccatgacccagccggagttctggagcgccatctggttcagggcggcgatgaggctggcctgatcccacaccgggtaaggaggtggcggtgcggcgaagtgggcctgtgggttggcacccatgag

SEQ ID NO: 196350 - DNA, 583 bp, Zea Mays
ctcattgattcgtacattaaacagtgcggacagaagatacgtaggtttgccgaagaacttggctgtaatagcccgatgcgtgttgagcggagaaaaaggaaggtggcttacgagaagagggcacaggaggctagggaaatgccggcggccagagccgaggaggaaatgctggacaatcttgctggtcatctgtgtaccagtgagtgacacaaagacgtgttgtttttgctcccaaattgtatttgtgctgtcgttgctagctacttgtctttgttaacttgcagagattggatgcaccgggaagcacatcgtagaggaggcccgtgcaagatacgtggagcagaaaatggcagaggtggagttgctggcggaggaggaaggcgacacttcaagattgagtgagcttctggagctagctgagactggattacatgtggaggaggaggaatttatgtctcaggctgccgatcaagcagaggccgctcattacaagcgaaaggcagatgaggcaagtgcaggtgtaatgttgttggcccaggaggaggagaacgagttaatatcccaggctgcagatgtggtggaa

SEQ ID NO: 196351 - DNA, 674 bp, Zea Mays
ggggtcttcatcatccgcttcaccggcttctcccccgaccctgaggtccccgtggccgccccaggcgcagaagccgggaccggggacgggaccgccactgttgacgccggtggcagggtcgcggcctcggcagtgctctccagcgccgccttcccggcgccgtcctcgtccccgccggcgtccatggcggcgatcgacggccttgaaacctagatccgagcaccttctgcaaagcaaggcgcagaaacttttctcaccccacctcgtagcgtctgcccgcaccaaatgcctcgcagtcgctattataccccgcgtcgcggagcgagggggtggaaaaaggagaatcgatgtgcggctggatccccgtggcgaagaatacccagcaccgatggcttgaactgggaggaggaaaaggaataatgacaccaccaaaaacaattacttgaacaccacgaacaccgccgcagcggatggggtggtgggtgaggcgacgaagaagggaaaggataggggtgtggcggagattggcgaagccgcaagccaggaacagcagcaacgggcgtgtggcgactgctcgaactgggattattacccacgcgctgcggagatggggattgggttcggatcgctgctgccattgtgtgcagccaataaaaaccaaacccccttttttc

SEQ ID NO: 196352 - DNA, 615 bp, Zea Mays
tatcctacatgacagatagcctgatgctaacaaacatattatccagcatataccacgatttgggatctgacttaagagctttttagtacaatagtaaaaatgaatcaagtagaatataataaacacttacctcctctgagtcgataactctccaatatccatctttggattcaaaaaagattcttcctgagccagggtcatttggtgatgctgaagttgtaaactgccaatacctgtttcgccgccgatcctgacctaggggcaaggatctgtaaacataaagctgctctgcccggtgaccaatgtacgatttcaactgagatcgccttttatcagcataagcatactgctgaacatacgaagtatctggggttgcgaggatttcctggcatacgccatttctctcataaggtagactaccagcattaccctgattatgctgatcaagcatctcacaattgttgattgtcccgacatgttcatcattctctctataagcatcacacgctggagttgaagtaatctctgtcacgttgttttcttgatatatatcaggcttcaaacccatgtcagagttatattgtactctgctagtaaattcttccttgaaacgcc

SEQ ID NO: 196353 - DNA, 460 bp, Zea Mays
cagcgctacaaacaggtgtacaatgtgaattgtcatcggtcaggttgcccacagagacagagaatgcacattaaccagctgaaaaacatctgcctctggctgataaatgtgacatagaagtgattcaagtaatcccaaatattatataattgacagcacacccagtcatttgtataataacattgataaattggtccccgtttctagcaaacggaaggtggtaaaccggttctgccataggagaatgaaagggagcacacgaagttaactatgggacctatataggcggcaatgcaaacgaagggagcactgcatatcaagcatcagtggtgtgtatcagtgcccaattcgatcccaaacaaacaaagggagggaggcactacatgccgatagggagttggtgatgtgattaatttggaatcagcaagcagttgtgcacgcatgcaaacactaaacaaac

SEQ ID NO: 196354 - DNA, 312 bp, Zea Mays
tttgctagtgttcatcatgttcatccagacaccttggagctaaaggatgtggttgtttatcgttgttctgcttggtgtttggacacgtccctggtgccagcttcgagagagctttggattgtcgagcctccctttgccgttgatggtgaatcctctggcaggagaatgttgatgtacccaatccgcatcacattctcgtctgccccgtggcgggatggatctgatcctatccctcaggctattggaatgggcggtgataatatagggagtgtgcagcagggatatccactttcaagacctccgcagtcgcgt

SEQ ID NO: 196355 - DNA, 543 bp, Zea Mays
tcaggatatgctgaaaagaatctgaggtacgatttgtccagaactgacaatggcaatcaagatgttaccgtgcatccaaaaccaatggaagtttctggtaaagatgcttacggagtaaagacatctaatccactatttcgatcccaatgtgccaaaaagtatagatcaaatgatgttgaagatgatgatttacccatttcagtgaataatgttaacattgcgccaaatgagcatgctgaggtggttcccacaatgtctactgccatgactcgtgaatcaaatttacaagatgttccaagagaaagcacctctgatgatttagctccgaaagtggtttgttgccaacaaaagcttttggaaaacacaggagatgattcctgtaaaactttagaggtggttcaagattcaggcgatatattgtctgcgactccacgtggtcttcagatggcacacaatctatacccctatgacaacaaattggataaaccagatttgaagaaggaagcttttgctgatcaatcttcagctcttgggaatccttta

SEQ ID NO: 196356 - DNA, 328 bp, Zea Mays
cgaacgccatcacgaggaactcgtacaagccatcgtgtgtgcggaacgcggtcttgtgcacgtcttctggccgcatccggacctggtgatagcccgaccgtagatccagtttggtgaagaatttggcgccgtggagctcgtcgagaagctcctccacgaccgggatggggaacgcgtctttgatggtgagggcgttcagggcccggtagtcgacgcagaagcgccacgagccatcgggcttcttgaccaggagcacgggcgatgagaatggggagtcgctgcgtcgcacgatcccctggtcaatcatggcgttgcactgccgctccag

SEQ ID NO: 196357 - DNA, 406 bp, Zea Mays
tgcatgaaggatggcaataaatcaaggagaacaacagctgaatactatgagaactattggtgagcatgaacaggacacaccagtggttctgcaaagccatgtaagtaccttataaacttatgaggattgtgattattgtatattagattgcagacgatatatgtagacgtgcagtatgcagctgtaatggtaaaaatagtcaaacactatgcaacaggcaataatgttattggtatttgtacatcgatttactgtttataatttgaataggcagtgacagttgatccaaggttggtacctaaagttggtatgacattcagtggtgtggatgaagcatatcaattttatagtcggtatggatatgaagttggctttccattgaaaaaatatagggaacaaaaaaact

SEQ ID NO: 196358 - DNA, 342 bp, Zea Mays
gagcagcgggtccagcagatcgttgctatggagagcctgcaaaagctgcagcgagagcttgatggcaaggcccgcgacagtgccctcgccgaggagaagcttaaagcgaaaggagaatccttggacaggcgggagacagacctcgccaggcgggagaaggatctcgccttcaaggaggaaatgcttgaaaggcgggagaagttgctggccgagcatgagctcgaggcggaggagaaggagcggacgttggaggagcgggtccgccggttccaggcggcgcaggcggtacaggtagcaccgagccccaggcggtggaggcgatgaagaaaacacttgaagatc

SEQ ID NO: 196359 - DNA, 803 bp, Zea Mays
ggcgtcagcgactcacagccatagaccaccttgaagggtgtcgtccgctgtgcggtctggtaggtgttgtagcagcatgcagcccatggcagccaacaaagccaactacgtggacgatcacctgcgaggcagtgaaggtggatgcccaaaatgtgatttttcagatcagattggtcgtcagtctgcgggtggaaggcaatattcattcgcaatttgacacccaagagacaaaagagctccgtctagaaggcgctggtgaagacggagacatcagtgtacgggtggtccaacgaaaggaaatgggcatacttggagaagcagacgaccaccatgaagatgacagacttgctcccacatgtggcaagccctcaacaaagtccatggaaatgtcggcccacatcgagctagggctaggcaactcgaggggctgcagtattctgccgggtggaggtgcacagacttgttacgctgacaaaaagcacaactcttgatgtctttgatgaacttggtgacgtggacattatagaatgaggcgcatagacggtgtgcggtcttctagatgccctcatatcccaccctgtgagtcatggcaaggatagtgggtcacagggcgggcacggatggcatgaagatgcaatcgacatatacagcgaggccatccactaccaaccacttaacggaggcctctcccttgctgagcagctccaacaggtccagagggtagacttgtgagtgcgcatgtccacaggacactgcggtgttctaattacctcattacacggtatattctagtaatgtagttg

SEQ ID NO: 196360 - DNA, 394 bp, Zea Mays
cctgggaggcctttcttacaacactttcagcactttttactgtgctctttgggatgatgttccagttcgatttcttccttcataataattttggaatcctattcctcctgttcttcctattccaactgaacatggtaagttccaaatattaattgatttatttgttttgattgtacctatttttcatgttcaattctattaacaacacatttcatggagagttttgtattttttctaatcttgtcatagtttgcgaggcatatgtttcttttaaacatccctttacagagacatccatcatgtttcctgcagcttagttttgctttcatgatatccacgttcgtagcgaaggcagcatcagctactactgttggatttgcaatattcattattg

SEQ ID NO: 196361 - DNA, 571 bp, Zea Mays
tacagcgacccggcaggaaaagaaaaataaatgaaatgaaatgcaggtccgtcctggttttccagttcatatcctcgtctctctctggccgtctcctcacctcacggatcaacaggcggacatagcagccgtcctcgttctgcctcaggtccttgtctttcaaacttgtgagttcatgcgttttgatttggaaaatactgaagctgaatttatgcatgtacccaattatattttcttttccgcttgcatggttaaatcagctcttgacttgacactgctgtttcaggttgattccttgttacatctcccatctgcatgcagttccgcaatgtcataggatgcctacatcaacaccaagcaagcaagcagctagctagcgtggttagttatatcttcaaatcagtctacagggatggatctagtgacaggtccgctagccattctcccgtccaagctgcaggagctactccaaatccaagatgagtataggctccagaaggaagtgaggggcagagtggagatgatctgccgggagctgcaaagtatgcacgctgccctccgtaaggtggct

SEQ ID NO: 196362 - DNA, 699 bp, Zea Mays
acaagattgcccaccgccccagctccagccttcctcccttcctgttccgcacaatcacctgggcgtgtcgtccgctgcctctggtgcgtgggccccgcgccatagaatcgtctcctaccccagaaacagaacacgcatagctccgtatgtgccgccgcgcgaattccgcgctcagctgtaaccaccgcggatcctcttcccccatcgcggactccggtcccagctataaaatgctcagcctcgcgtcctccttaggccatagactcgaaccgagctcgcacaccttgtccagaaacaaagattggggggaaaatcgggccgccatcgtgggacagccaccttggcgtcgtctggcatccaaaaatcgggctgggggtgtgcgcatcagctcaggggtgttctccggtgagacattttgtgccgtggggtatggttcaactgcgatttctcgccggacatgggattccgccgcagaaccactccttaccgtggccggtgcgtctgggggcatggactgcgtcatgggtccccttgactcgatcgccttgtcactctcgtcgtgttgcaccatccacgtcgaggtttgggcggttgtgcggggatcctgtgggttgcggccatggcaccaccgcgatggcgacggcgtcaccgcctggtctcggcgtggggaggaagacacacgatcgccgttgatcttct

SEQ ID NO: 196363 - DNA, 431 bp, Zea Mays
aggtgcaattggtgggcggtgcagtcaagctgtcatcggatggtcagcaaggggacagggtggtgcaggtggcagggccaacgttagaagtactggggagctgtaccactgttggtgctagttctatgcagaacggtggcgagggggatggcttgttggtggcagcagagaagggctgtggtggcagcagcgatatggggcaggaggttgctgctaatgatttcacagagattgaaaacaaaacaggcactggtgagttacagggaaaggaaaatggaattgcaggaagcagaacaaaacggtggtcgtcggaatcgtctctgaatccgctgcctaagaggagggcagtctcagccgtacgcaaatttccacctggctgtgggaggactattgttaccaccgcagacagtggtgttttggaggtctcacct

SEQ ID NO: 196364 - DNA, 883 bp, Zea Mays
aggtttgtaattggacaagaaactgcattaacaatcctggatgttggtgaccaagaatgccaggacatgagacaagaaggcacaagttctgaggtgagctcactagatgaaacttactataaagctacatgttgttgtgtccacacatgaaaacactagaccatgcatatcgccataatattttctataaatccactctttgatagtttgacacatcgaaaagcgagatgtgtggttgatggtggtgagtatgcattacatgcttgtgttccacaaccaaagactacccaacgtgcaacgtagtaacggtggtccctgcactgaaactggcatattttacaaccttgtttttctagtatttggttgggtccaaccattcttcgttcttatatcaaactacatagctgaagaacatgatcaatctctctttaatttcttgattaattaggctgtgatcatgtggaaatatggaggtcgtcgttaataaccaccctggtaatgttctgcaggtgataaccccagggtcaagcgagcttttgcttgacgtccacccgctgacactccactttcccttccatgcccacaagttgatcccgtgcacgctgcacctaacaaataaaacagatgaacatgtggcttttaatcttagtatagaagacggaatggagtcttggcagcagatctttgtaaggatgcccctaagtggaattgtgccaccaaaatccacttacactcttgttgtcacaatgagggagctgacgtatctaccaacacaaaactttaatttgaccctgcagtctaatatatgcgaagataggtacatctattcatttatgagcctatcagaatctgatcagttttttgaggatttaaaggagataag

SEQ ID NO: 196365 - DNA, 1381 bp, Zea Mays
ttcatcatggctagggtctttcattggcactgtaattggaaatatcaagttatccattggcaatattcatatcagatacgaagacgtagagaggtaattcagttctgctcagtgcatttatcctttaggatgcatattgttaaggagtataagagcaccatgacttgtttcctgtagcaatcctggccacccttttgcagcaggtctggtactttcaaagctttcagcagttacagtggatgaccttggcaaggagacttttgccacaggtggtgatttggaccgagtgaaaaaggtacattattcctacattttatttccatggttagtttgataactcatggctgatgtcaacttctggagtccagttatgttttttgtgatcttgtagaaagcaaagcgagcacacgaggaaatgcctattcttctggcatttccttgataaatctatcttccatctccaagaaatggtgattgctcattgtctacttagtcgaatattagatttgaaagtaaaaaataacaatagctcattttttattttctaattttggcgatcaattaatttgatttaaagttttcaggacctagtaatgaattcttttcgcttcacacatcaagcatttttcacatttggtgtgcttatttgttttagtttgaccttttttacttttgatcaatttgcgtgacttctttaacttggcattttgcagtctgttgaacttgagagtctggcggtgtattttgactctgatagcagttcttggattgtggataaaccctgggaggatttacttccatcagagtggagtcaggtgcctcccaattttgtttgtgcgcaaataaataccctgggtttgagagaataaattggcatggagacaattacctttgtcaatttctgtttgaaaaaacatgtggtagagtgtgaatagacgcagtgctgtaatgaggttttgttgggatcttttattcttctgttgcttgcatccagcaacctaacaaatatttattggtttgtaaactacattttcaggtttttgagtttcaggagcaggatggttccagatctgcttcgaaaaagcatgcctacattttacagcctgtatctggcaaagcaaaatatacaaagatacaacttactgaggcaaagaaaacaggacaagcattgcaaaatactgcagtggatttggatgatgttactctgtcgttgtcgaaggtttgtactcctgtcttttctctttcagttttgtcaaaagcactgtgaaaagtaataccttttccctcaaccaggatggctacagggacatgttaaagttggctgataatttctctacattcaatcaacggctgagatatgctcatctccgaccatcttcac

SEQ ID NO: 196366 - DNA, 752 bp, Zea Mays
cggcctcatcaaaggcattataccactcttggtcatcctcaaggagcccatgagctctacacgtctctttgaagctggggtataaaacattattgtatgttcgcaatgattcaaaattctgggctccttttgcaaccattagaagcattctaagatagtatctttcccctgcagatgggtgcacaaagtgtatgcggcctatgttaccttgtctatgtctttgttcccatgatctttttttttcgtcccacctccactcggatggaaaatcagggtaagttagggacctagcactttcatgtaattggttagctacaaaccactctgttagcattgttcggcgtaggaattcttgtgacaagatttgtgacatgttggcgctggcatgatatgtaatgtaattctcattaggcaaatgaactggcaatctagtaacaggaggaaagtgtcgatggatttcgtaaccaagaattctccaacatgaatcatatgggcatatgaatctagcatctaagtattctttgacctcattccttgtgtttgtttcctcgtcaataggagtgtcttgaccatctaaaactcgttgtaggtatagtttgctccggtccggaccttttgtcacgtacttgaacagatatatgatgaatatgcttttgttacaccattctacattgatgtgtgcttgatatttcttgagcaatgtcaagttatatggaacaatccatctgttatctagtttgatgttagacttc

SEQ ID NO: 196367 - DNA, 530 bp, Zea Mays
cgatccccagctaagcatcgcaagtacatcaagatgatccggttagtaacttcagattggccatcagactgtgggtggaacgctgaactcatctgcaacttgacccctgtcctggtgaacagctcagtccaaaatgtactagtgaaaactggatcacgatcactgacgatggagcaaggaataccatggtgacgagcaatatgatcaaagaaagccttagctaccgaagatgctgtatagggatggctgagaggcacgaaatgagcatactttgagaagcggtccaccacggtaagaataactgatttgcctccaacctttggaaacccctccacgaaatccatggctatatcgctccaaacccctgaaggaaccggaagtggttgtaacaaacctgccggatgaaggtgttcggacttattacgttgacagactgaacagcccttgacaaaatctcttatgcggctggcagcaaggggactatggaaggaagccctccagcggttgagggacttttcgatgccctcgtg

SEQ ID NO: 196368 - DNA, 514 bp, Zea Mays
tccctcatggagagagtgcgtgcggctcagcagcaggatcgtttattgcaagaagttcgaaagagggttggcgatggtaaaccctgggagttctccatcgatgagaatgatttggttcgtttcaggggtcgcctttgtgtgcctcaaaaatcagaggtgaacatggatatattgagagaagctcataaaacgccttacaccgttcaccctggagaaaccaagatgtaccaagatctgaagcaaaacttcaggtggaagcggatgaaggttgatgtttctaagtatgtggccgccagtgaagtatgtcagcgcgtgaaggccgagcataagcggcctgcaggtttactgaagccattggaaattccggagtggaaatgggagcatatcaccatggattttgtggtgggtttacctcgttctcctcggggtagaaatgctatatgggtggtagtggatcgcttgactaagtctgcgcattttattcccatgaagaccacaaattcagcttcagatt

SEQ ID NO: 196369 - DNA, 380 bp, Zea Mays
cggccgccatcaacgcaccctcgatccgccatctacgagccccgccatcaatgctcctcgatctctgcttcgggcagacgcatcctccatggtcctcccctccgcatccgcatcctccgccatcgttcgcccgcccgcgtcgcgttgcgctccaaccaatctccgtggtcctctcccctctccatcctctctcgcctatcccttcgtcgtctctgttgcgataggttgagcgcctcacacgaccccgaagaagacgtcgacgccaccgcgccacgcctctgctttacagatttgataaaattccgccgggaatccatcaggacctggagccttgttatgttccatactaaaaaccaccgcttttacttcatcttcagaaa

SEQ ID NO: 196370 - DNA, 330 bp, Zea Mays
aagtctttaaaactagttaactagtcagataaccatggctaatttaagctatttttttagctccaaaacaggcccttagtatagctagagtcaactgacaggagcggtggtgtgttatgagatcatcatccagtggattttgtgtcgatgatccattcattctatcaacatgtgcttatatgatcgatcgatatgagagatcaactcatcatgtttctgacgcacgaaagaaataaggacgaaaattaggaacgagatgatctgtctcaaccagttcactagtgaaagaaaccaacagcatgaacatatatataccccatgcaccacatc

SEQ ID NO: 196371 - DNA, 577 bp, Zea Mays
ggatagaagtagtgaagttactgatagaaatcaagctgctgcagaggacaagccaaatgggaattctagtgcagatttgaatggaactgaaacttctagtggtgaaacagataagtctgataagctatcatttgttgatcgtgtctaccaaatatttgctaagaaaaatggcgatacaatgccaacctcctctggaagctctgaggctttagaagaagttcaagaggaagcaagtggatgtgagcttctggtcagtcaaattgataatgtgtgcccagagactccattcagtgaactactgagatctcttgaattgcgacatgaaggagtcgatatgcctgtaaatctacaaggaattcttgttaatcagtcgtatcttgcctcacctagtgatctgaataaccttctcttctcaccagattcagattttaaacaaacaatggttgagcttcaaggctgtactgatttcaaaactgaaccctggaggcttgataatggtggggagtccttaaagagagttgtaacatacacaaccgcaccatcaaaattggttaaagctgttcacgcaacagaggag

SEQ ID NO: 196372 - DNA, 545 bp, Zea Mays
tacaatcagatcctgtgatttcgccacggagcagacacttgtgctgcattcgcctgagaaaaaaacagatcatgtttcaatagatactgaagtccatcttgcattgacacctcttgagcctattgtattttttggtttccacaaaagaatgagtgtaacaggttactctcttagcttggcaggttaccttttgtgtttgcttgggaggcttaaagtgatcctccatttggttttgtttttacaggttgtatttccacgtgttaacctcttgttttgttctagttgtagggactgttgatggagggagaccgccaacaaaaataaagactgatcttaaaaaacccattgttaacctggcttgccatccccgcctccctgtcttggtaaacagccatatctttacttttttctgttttttgattttatgttgtcatgtttctgcctttacgcatttctgaccaagcttatgatttagtatgtagcttatgctgaaggcttgatacgcgcctacaatatccagacatatgctgtacactataccttac

SEQ ID NO: 196373 - DNA, 841 bp, Zea Mays
cgaaactggatgccttaatcaagatgtcatcaacatagaagaggtagatggtgtcatcaccgtgccgaaagatgaacagggacatgtctgacttggccttgacaaagtcgaaggtgttagagttacgacgcaggggaaaggtccacatgtagtgagaggagtcatccaagatgactatatagtattgttaacgggacatgctcggtatcagggatgtccaaaggacacaatggacgagatcaaaggagtgagcagttcggggcatggaagaggggaagggtaagcgggtgtggcgcccaagctgacaagcatggcaaggtgagttagggttgccacggggacaacggatggccgaggtgcctgagagtctggagaggacctcggggttgccaagacgatagtgccaagtggaggtagaggcagtgacgacgagggcgtagggtgtgccaacatgggcggtggggcgcggaagtgaataggatatagggggttggagttgtcgcatctggcgaccaggacaagattggtaagatcccgtatgttcaaccccagggatcgaactctatagaacaatggttgccaatggtgaagcaacagaccgagagaatattctgtataatgttgggggcaacaaggatattgttgaagtataatggaccaagaaggactgtcacctactcaggtgatgggcagagttgccctattactggcaatgatggaggaatggaaggtagtgctatggggcatgtgataaagagacactatcgaggttaggagtgatgtggtacgaggcaccaaagtcagcgtcctagtcggtaagagtagaagtggtatctgtgat

SEQ ID NO: 196374 - DNA, 1229 bp, Zea Mays
agggttttgcggtgccagcgacggacatgagcgtggagagcccaggggagctagggttctgaagcgcaccgtggggcacagcgtggcgaacgacggcccccgacatcctgctaggttttccatgggagatgggggagtcgcgtgcgccgtccgctcagtcgagagcttccgtgccggcgccctcgtgaggagaggaggagcgggagaagcgatgccggacaagggggagagggcccatggccaccgccaccagcaccagcactggaagaaccagcagtcggcgacagctgctgacctggaggagggggagctgcttaatggggaggccgggaccaatgggttgcccgagaggagcatgccacctaagaagtggaggaaggtgctggcagcctccgcagctgctgtggaggtggagcctggggagattgtgagtacaaagcaagcagtgccattgaagaaggaaagaagaaacggggacgttgagaaggtagagctgctgccagagaggcagaggaaggaaaagtcttctgggaagagcaccaggaagtctatcaaggatgatgtggagccaggggagattgcactgccaggaaaaaggcgggatgccaagtcccaactggcccatgataacagcaggaggccaagttcgtctgcccagaaaggctccttgcgggattctgatgaagaacctggtgaaattaagccagagagcggcatcagtggcagtgtaaggaagaaccggccaacagagcctcatagcagtaaccacaagcaccacactgacacctctgaccagtcaggatcaaaacatcgcaggaagggagaaggaaagagttcatctgctgccagacatttgtctgggagaattcgtgaggtctcgccaccaacacgggatcggcgtgataagcacgagaggagcccaggcatcttgggccgttttcctcatgaccgttttcgtcatgacaggtatgacaggagcccgagccgcttggagcgttccccacatcgcactcgccactatgatagcagagaccgcagtccatatatttcacctcgacatagagctcgtccgccccaattcagggataacacaccaagtcgtgttgataattcccctcgtgggagggtccagcatgaagatatcagagaccgtagcccatttcgtcatgacaggtcgccttctgaacgttgtcgtcctactgacacgcatgaagcaagcaagaagagca

SEQ ID NO: 196375 - DNA, 277 bp, Zea Mays
gaaaaggggaagaggagacagacgacgggtggagagcgagagaagtggggaaggcgagcagagcaacaaatcaagtctgtttcatttcagcaatcagcaccaacccccgtccaatcgctgcggctggatgattgggcagtgtcagcctcgcgttcgttcatttaatgtttctggtagcggtcaatgcgggatggttgggtggcggattggtattttgggactccatgtactacttcctgtcttcctccaccttcccggagaagcagcagaggaaggg

SEQ ID NO: 196376 - DNA, 485 bp, Zea Mays
cccgtaggaggcacctcatgcacagccacaacctccctatgcacatgcagctcacaatgacagattcaggaagggcaaagaggtggagggggcacgcaatgctttgatcggtgaagccacccacaacgtggagccatcgcttacccaagtgcaaacacgagcagcgctgagtaaaaccagagcagcgcaagcaggctagtgtcaagatcaagtgtcgcacgtcgacaccatcagagttgctcatgccaccaccgctgtgcctcctccaccgccgctgctgccggagatgcccaacatggcagacaccactcaccccatcacaacaggtaaagaagcagcactcctgggactgtgtggatagaccttagcagcaactatgtggctcgattttagcttccaggaggcgacagcacaaaagcagatgaacaagggaagagaggaggggaggagggaggccactatcatatatggcgtgagtcccgtga

SEQ ID NO: 196377 - DNA, 674 bp, Zea Mays
gcaattgaaagaaaatatcccctggagctacgtgatgctattcataaatttcttgaggtgcaaaatgacacactttccacttatgtaacttgtcagttcttattgctgttgtttgacacttctttctccctgttctcagaactctgaaactaattcaccgggaggggattctttggctgaggtttttgggatattgtttgatgaaaacaagaatttgccaactgaaatatctgactcaaacatttggttcagtctcgatcatccaaaggtacaatatgatatgggacttgctgtagaattttactttccatggaaactctgaattttatcctgtcttaaactcttaatgcctctagaatgatttcttgccctagttcaaatcatattttaggttgtgagtaattcgccacagttagccttttcctaaattagtttgttttgttatcttttctagtctttgatgtgttagatgtatatgttgtgtagcatattttccttattgtataagggcctttatgcattgtgcaatgtatgtactgtgggcttgggccgttactgtgaatacaagcaccattctaacatgatgaattttatatatgataaaggctacggttcgtcaatctgctctctcaaaagttgctacatctggcatcttcaataacagaactctaaat

SEQ ID NO: 196378 - DNA, 1382 bp, Zea Mays
ctggatgatgccactctagcaagtctgaacacaatgatacactcaaataatgcttcggttagtgtttctgcggttccgcctcaccccagtattggtatccttaaattgtttcccatgtgttacttatgatataatgatctgctgcaggttatttccctgctaaaggatgacacactctttattagacgactatttgccaggatgaggtcatcagatatttcaatggaatcaaaacgagaattggtgagaaggctttgttcttgttagtatcttcgctttttaactcaccattgtaaattattagttagcatcatcatagtgcaattgagttaggtagttgaaggataataaggcgagactgcccattgctgttggcattgatgcaaatgataatctaggactgaaaatgttactatcttcatgatttttgttgatttgttttgatgttaattttctaacaagagacagctggattaacagggctttgtttaagatctgtattatttttccttgaatgaattatataatttgctaaatttgattattacctgagtttagttgttctttataggaccttggatgtttaggttttgcttgccttgagggaattcaggttaatgctacacaaaagtttcatcacataaaaaatgccactcaatatctcccagacttttgtatgtggcttgcgcattttgggcccacctcatttctaatggaattgctcaagattttgtcacatgcatttgctatcacagagactctcttgtctttatgattagttaatctgaagcttgcttgctttgccattctgtttgtcttgcaattactggaacctggattgaaagtggaattccttggatctcgtttgttgaccctgctaaaatgtttctggtatttccaggttctgttcttgcatgaattttgcacacttagtaagagtctaccacttgttcagcaactgcgactgtttcggtaggtccttcaatttcattcttctttctttctacctgtaaaggcaacacaacactgccatggtattgtatcaattctccaaatgtgtaaatgcatggctgcaggctatctgtactacaaaaacaaaaagaaatatgaccatataataccggtgtgcctgagcttggtgttatcattgttttctctgcctggcagccctgtgctttgtctcgctatcatttgacttcagattgctgaggatcttgttataggtatatcaggggttaccattcagattttttacgtgtttgttacctagtacctataaccttgaaccgttgtccgcactacaattaatacttcaatagattgcatacaaccaacccaatataccttacagatttgaagacatttgtgttgctctgctttag

SEQ ID NO: 196379 - DNA, 298 bp, Zea Mays
gcctccaccgacgagttcaagaccctgcggcggaaggaggagacttccgggcggagggcggcgccgcaggctggggacgggttccaagtggtgtgcgggaagaagaaaaagaaggtgggcgatggtggcgaggaacgcgtcggcagagttgaggctttcggaggttttggctctgtgaggatggtcaccaaggacaaggcggccgcgccgggggtgaaggcgaaggtgcccttccacatccgcaccatcccaaggccccaggatgtgtattgtattgtggtggacaactccagcaagc

SEQ ID NO: 196380 - DNA, 562 bp, Zea Mays
ggatcctgttttagttgagaaggaacggatcatgataaatccgtggactcaagacgaaaaggaaatttttatggagatgcttgctaaatttggcaaggatttctccaaaatttccagtttcatcacacataaaactactgcagactgtgtggagttctactacaagcatcataaatcagacagcttccgagaagtgaagaaactgttggaccttcatcaacagctgcctgccagcaattaccttggagcgaaatcaggacagaaatggaatcctgagtcaaatgctgcttctcttgatatgcttggggtagcatcagctgaagcagcccatgaccttgaatatgcaaacaaagtggagaaaatttctgtgaaatccctcatccggactgcatatgggtccaatgtttcatttgtgaccaaaaaatcttctgataaggagtgcattgacaatgtgcctttgcatgagagagaatctgtagcagctgatgtactagcaggcatatgcggcactccttctcctgatggaatgggctcatgcattactagttctgctgatcctggc

SEQ ID NO: 196381 - DNA, 651 bp, Zea Mays
cagagctgtcacagtgagcgagcatgatagcccctagggctcgaactctatagaactgtggctgaatcaaatggggagcaacaagaacgttgttaaggcagaagggtcccggaagaaccgatgcacctactgaggtgactgggagggtggcaccgttcccactatggaggaaggatgtgaggggtgaggagggtgtgagtgagataacaagatggtagtaggagtggtgtggaaggaagctccgaagtcgaccacccaatcggagggagagggaggaggtggtgaaggcacggtgtgcgaggagagagccaagggaggtgagagagacaacatgggcttggttgtcaaggagacaatcacaattgggcagagccagaggcaccgaagggggtggaacacaatatgatgtgctggacgtgacgacgtagggtggaagagcatgggaagggaggtcggggcaacggtggtgaggctgagcgtggccggggcggggaggggactagacgacgcggaggagagggcaccgatgccgcagggggccacaaccatggcgatgagagctggggcgtcggagggaaaactagtcggccacgcagtggcggaaggaaggtatggccaggcggtgcgggtgcaggtccgcgggggcgcaac

SEQ ID NO: 196382 - DNA, 440 bp, Zea Mays
cagccacagttgctccagagacgtcatgttgctgacaaagctaatcgacccattgaggtgcgcgccattgagccagagctgcaccagcggcgcgccggccagcgacgccggtacgggtcctgacagctggtttaaggacagcgacagccgctggagcgccggcatctcacccaagaagtcggggagcgtgccagagacgttggcgctgacggcggagaagttggcgagggaggcgcatgcggcgaggtcggtggggagcgaccacgacgcgaacgggttgtagtcgatagcgacggcggtgagcccggtgaggcctttgaagaagtcggaggggatggaggcgaaactgctgttgtgggctagtaaaacctgaagcgaggagagacccgggagcgagggcagcgggccggagagcttgttgtcgaaaacctcgaggcggg

SEQ ID NO: 196383 - DNA, 610 bp, Zea Mays
ttagcacagcacagttgttttctagatcagcaacaaattccttagctttcatggcacctagcgtcaaacaaactacacttatcagtgacctgtaagtgtaattgtcaggtgttaggcctctatctagcatctgatcatataactggaatgccttcctaatattgcctacacggcaatacccttctatcataacattaaaagtcacttcatttggcactagggaactctccatcattttatgaaacaacctagttgcttcatccatatttccatccttgcagaaaccactgataagagctgtaaatgtatatacattccctgaaacagcattcctggtcatctccctgtggagctccattgcactggccagatcccctttcctacataaaccagctataagaggggaatatgatgctggacttggtgtcaatcccttcgcaaccatctcattcaaaagacctcttgcctgatgaaaattgttgtgtttgcagtaaccattaattaaagagttgtatggataaacagtcattctgattcccttctccctcatcctatcaaacatgcaaagtgcatcttccatcatacccctcttgcacaaggaatgtatcag

SEQ ID NO: 196384 - DNA, 1236 bp, Zea Mays
agacgtgatggacatggatgtcccgacaacaacacgctcacggacaaagtggaggtcaatgtcgacatgcttcgtgcactgatggtagatggggttgacaaagagttagatggcgcttacattgtcgtagtatactagggtactcttagcgagggagatgtgaagctcttagagaagctggtgtagccagctcgcctcagccaccccattagcaatagcctgatactcaatcttagcactggagcgtgagaccatagactgttgcatggaagaccaagagatcaggttggctccaagaaacatcgcataaccgaaggtcgatcgatgggtgtctaagcacccgacctagtcggcgttggtgtagacaatcaactcatgagtggaggaacatcgaaggtggaggccgtagtcgacagtgccccgaagataccgaaggatccgcttgaccgcacccaagtacggctcacgaagatcatgcacataaaggcaaacctagtgaacgacatatgcgatgttaggcctggtgaaggtgaggtactgaagagcattagtaaggctccgataggcggtggggtcaatgacaggagcgccatcgcaagagtgcttggcttgcatctcgaccggggtcacatagggcttgcagtccagcatcaacacacttgaggatgtctagggcgtactaccattactggaggaagaggccccagagcgagtctcaatggcaatccccaaaaagtgaagggggcccaaatccttcatgacagactcatgctgaagagcggtgatgactcggtacagtagaaccgaagaggtagtgagcacgatgtcatcaacatagaagagtgggtacacgatatcgctaccaccggtagatgaatagagatatgtccgacgtggcctcaacaaaaccaggagagagcaggtatgtggcgaagcagcagtaccagacgcgaggtgcttgcttcaagccatagatggacttgttgagcttgcataccatatcggggtgagcaggatcaacaaagctagtaggcttactatagtagacagtctcaatgatagtcccatgaacaaaagctatattgacatccagttgatgaaccgaccaagaatgggacaatgccaaaatgagcatggtacggacggtagcagacttcacgacgagacagaacgtatcatcgtagtcaacaccaaggcgtgtataccaccgaagaacccggtgggtcttgtaccgat

SEQ ID NO: 196385 - DNA, 604 bp, Zea Mays
gtaataattctaaggcacagggaacaacgcataggacggcgggtttaaaatctagaaagtccgaggactctttaacaaaagtgacccgcgaaggggtatcacgaatccacaaccgtcagatctaactcaacgcgccagattagatcacactgaggtaatagactccagcccttagatctaaatcccacggttctcactatctcaaccctgcatctaatcatgaccgctaggcatgaaatcaacggctccagattcatcttctacccagcggacacaacccggcggcgcagaccgacccacggcggacgcccaccggcaaagtaccatccagcgcccgagacgaatttagcgacgggggtatgctggtgtgctaatctcggtcgttcgctgcaagatcaatgacggacaacgcttctcctacctcgcgcacctaaacagacggtagcttcgcctgatccacggcgaacaccaccggtgaccgctcaccgatgaattgaagccccaaacacacatttcgtatatagcacaaggatccgcgaaccaaagtgaatacatgcgagaggtttgtaccagaaatcgtagggcgaaattcactggctctggg

SEQ ID NO: 196386 - DNA, 477 bp, Zea Mays
cggcctgctgcagaattttaccgatacgcgtgagcatgacatggcatgccgcgaattgcgtgtgccacggctgcatctccaaccattagaaccacgaaacatgttgtactatatatataacacagtacctactatactagtagtgctgtgcaattgcaaatgcaaggccgtgatatactataacatagcctagtgtccaagaaaaagacgtcgtcaatctgacaatgtgtggactttggacagcgaatcaataatcaataaatatgaagtagtaatcccatgttgctcacatcgacaacttaagaacacatacaaccgatattgagtatcgtcgtctctaagcatccacgtaagcagcaattaaataaaaaaataaaagtggacactaattaaggaggagaggtgcattggttatcctttcgtgaggagacggcttcaactcaccaatgccaagagacggtaaaacaaccactatta

SEQ ID NO: 196387 - DNA, 341 bp, Zea Mays
ccgagatgtccgagacgatgatgccaactgatggacaaaatggtggcaaccaaggcatgcagggaggacgtggcgatggaggaagcaggtagtcggagtgtatagaggctccgagctgtcacagtgggcgagaagggtcctggtagccaaatccttcacatataaatgaaaagggtcaaactccatggaacaagagttgtcggtggtgatccgacgaacataataaagattctagattatgtggggagcaacaagaatgtttttgaggtaaaacgatgtcgaaagaaccgagtcacctactgaggtaaccggtagggtggaactgttccccacaataatag

SEQ ID NO: 196388 - DNA, 583 bp, Zea Mays
ccactctcacatcgcttggcggctttgtccatcgccttgcggctctacacatctttacagttggctactttggcctggtggcgctcatcttcgcggccgctcactagagtttggtcatctgttgcgacgacccgtctgccgatgctcgctcctgtccgcctggctgccccttgctcgtgcgcccacccactagcacatgtagcaaccacgtgtcaatgtccactcctgttggctggctcatctgtccacctcacgtcgttgtaggccgacatccgcactagctacctctgctcgcccacgtcagtcaactctgcttggtcaagcaccgtgtgcaacctcctattccattcctctgtatgtgaactcatcaagttcacgatcttgtgattgttaagtccttgaaaaaagttcagtgcctacttgtacaagatgtcattgtcttcctccaacatcattgttcccgccctttgctatttgatgggaccaactatcatgcctaggtttatcgcatgcgctggcacgtgtggcttgtcctctagaagtttctcacttgcgagcttccatgcccgccttctcccacggc

SEQ ID NO: 196389 - DNA, 376 bp, Zea Mays
ctgctacaactgatgccaagtactactgcatatatgctgcttgagctagatgctgctgcttcacacctgcttctgctagctggtaccaaacactgcatatatgctgcttcatgcctgcagaactgatggtgaattttatgtgtctgaactgaattgtatgaactcaggtgatgcttttgtgtgaatggaataagtgtgcgaaactgagaagaacagattgtgtgcataatcgtttgggctaaccgtgtgacagtttgtctgcataatacttgtccgaaaaactgattcgactgactaacaattcgaaagattgtctgcataacagttgtctgacacactgagaaactgaaaagcatcacctgagttcattggttcc

SEQ ID NO: 196390 - DNA, 320 bp, Zea Mays
ctccatatgcgcatttcatccctttatatttcttaagtgttagggagttctgtgtattgtactttgtgtttaggtcactggcatagtgatacatgagcatgaatcaaattgagatcctataatggtggtttacatgattttttcatggatattgagagaagacggcaatgttcactgatgccccagttcataatttcatacacttctgagttctgagagaggccttactgaccttggcaccttgcacgcgaacacaatgtcatagcctgatcctttttcatttatgaatgaatatactttcattattgtttgctgcttct

SEQ ID NO: 196391 - DNA, 296 bp, Zea Mays
gataggtggttgagcgggaattccatcaaagatttagctccaatgggtattctcaaaggtggacaagaagttaatctccactagaactgtggcccaagcccttattaatggtcagtggatcagagatatcaagttacctctcactctggttggaatgcaacaataccttctcctttgggactctattagtgacgttgttttgtctccagaaactgatcaacatgtttggaggcatgagtcatctgggcagttcacttctaaatcgtgttacaatgtttttattttctggttccatc

SEQ ID NO: 196392 - DNA, 358 bp, Zea Mays
tctttgaagacaagtttggtccgcatctggtcgttgctcccctctcaaccctgcggaattgggagcgtgaatttgcaacttgggcacctcaaatgaatgttgtatgtggatcaaactattttgagaccaaaattgtgtgtaatttggacagacttatatccccttaatactttttccttattgtggacaggtaatgtattttggagctgctgcttctcgtgacattattaggaagtacgagttttactacccaaaagagaaactgaagaagctgaagaaaaagaaatcttctccatctaatgaagataagaagcagtcaaggataagatttgatgtcttattgacgtcttatgagatg

SEQ ID NO: 196393 - DNA, 381 bp, Zea Mays
ccccgcgggtcgcggccgcggaccccatcagccaacgccaagtcatcacctactctccatcgctcgctctcgcagtctcgcttcgcttacatataagggctgcgcgcacgacgtcccccagggccgcggactggacagcccaccacactcttccactcccctcccccgccccgccaccgatccccaccgccgaacaaccgacgggtgctgctgctcctgctcctgccgccacctgctacgtagcatacgcggacggacgtaccaccaaacccccaccgaactagctgccggtccatcgcgctacgccgctacctacgacgatcgggcaagcgaagcgcgcgagttcgacgtcgtcgtcctctggcatcatctctatccgcc

SEQ ID NO: 196394 - DNA, 350 bp, Zea Mays
tcaaatccaatcgcaagaaccttgatcgtgtatttcaatcggatgctaatcgagggacggaatctcctctctggtcggcgaatttgtcctctccagcgtgtggattcgacctgtcttccacgagtaggacctccaacgatttcaaatccaattgcgaggagattggtccgaatccgatcaggtgcacctgcttcctcgctcgtgctgatcccatctttctattcggttcgtttgctttcgctcaacggatcgcttgctgcttattttgcactctcgccgtcgactgttgctatgggctcatcttcgacttctttatttagtgccgttctcatcttggcgatgtccggtgc

SEQ ID NO: 196395 - DNA, 1111 bp, Zea Mays
tgctgcaattttgaaggaattgtcatcatattttcaaaatttttccagtcaaactcgtctccttgctcttcaagcgcctcatgaaattcagggtcgtgagctacaagaatatcctttctgctgagttttctaaataattttcacaaatgggttcaaacaaacgttggtttcttacctggacagaatccctattatgtaccaaaaacagatccccatgatttactccacataaaggcaaatgcaatttcgttagagcagacagcgcggccagaatgaactaaatttgcatatggtaggtgagagtcatagagaattagggaactcatacccgttaatggaggggtgactttcaacctgggcgtctgataccatgtagagaattagggaacatctcacaccccattaagggaggggtgactttcatatagtcaagatacaatttggagtacaactaaagtacatacacatctctaggctatacagattaatagtaggtcatagtatgcttgaaattccttaactaaaccacttatcagaggcattacttgattttgaatcacatgggaactatcagagctgatcatgacgacttctctatacgttttgcctctgctatggatcaggtaaaacttacaattttttttcattgcatcagtatattaatattttttccaaaataactgcaaaaatgatattgcatgtcatgaaccatcactatcggtccttatggatgataatcgctgactgaacattgtttccaccattgctcccaactgaagtctctacctttggtttgatgaaacatatatttgcaatataccatattccttgagtcatcaaaaggaaaagaactcaaaaaagtatttcatttgacactgagatagtaacacttctttgtctttggtgtgctctttcatccattgatattgatttgttctttcagatgataaggttgaagtcatcagatggtgtgtataatgactggtcccgcgatatcaaagggaacatgtatgatattgttgttgaaggcttccagcttcttagtcgttggactggcaggatttgggaacaatgtgcatggaaattctctcgccctatttcagattctcaa

SEQ ID NO: 196396 - DNA, 326 bp, Zea Mays
atctaagtgaatagcaaaacttatgtgtcaagaaaagccaaaatgtcttatataatttagaagagggagtcatattgtatatttatcacccaaccaaacatggtgtacaagtgaaggaccataatacacaaggtgaatggtttcttatggacacaatttacatcacctggaacaaccacaaatgacaagctatagtcaacaagggagctcttttgacttatgcactttcagatgaatctaggcagtgtgtggtaataatacagacgttaaatgttttcttcattacaagcaagatttgcatcactaggaacagccacaagtagcat

SEQ ID NO: 196397 - DNA, 411 bp, Zea Mays
ctgacgcaggggactgatccttccactggatgagcacttggcgtatgccgcgggcgactcggatcttgacgacgcgttcgggttcaggggtgaccgcaccatggtgcaggaccggcaggggaggtgttgtcgctggtggagtgccatggaacttcttgagaacgcccacgtggaacacgtcgtggatgtgggcacgggcgggcagctctaggcggacatcgacggtgttgacgatctccgtcacccggtatggcccgtagtactggggctttagtttgtcggcgacatcggtggccagcgacgatggggaacggtggcggagttggagcaacacccattcacccacctgatagatgatgtcgcggtgcgtcttatcatagtgcttcttctgtaccgcctgagtctgctcca

SEQ ID NO: 196398 - DNA, 582 bp, Zea Mays
gcaatatccttttggatcgaacagatgtaatttcattcacgagaaccttaacatcaccaagtgggattgacaaccagtcaccgccatctccatcatcaggaatttcggtttttccacagaaatcctccaccacctcacagaaggtagtgataacatctaaaaagcataattataaccagagtcagtagaactcgaaaaaaaagggaagctatatgggtaggatatacaaaccaatagaaacaaaccttgagtattaggaatgctgggagcagaacttgaaacagaattgttattttctctcttccttatttttggcttctttgaagcaattgaatctgaggtcagttcattctacaacataaagccccttaggccttagcacaaagaactgccatctataagaaactggtggtatctaacttacataaaaatgctctctatgtgagtcaatttcatcctgaggaaatgcagattcatttcgtgctttgctcgtattaggtgtaaaatgctcaaagtgcttctcatgttcttgattttgatatcctgggcctccaaatggacctgaaaaacttgaccaatgta

SEQ ID NO: 196399 - DNA, 573 bp, Zea Mays
acctgtgtctgtaggcatatattacagcaggcagaggaaacctgagcgcaatggcagtgtatttacacctatagctgcaatgtattccagtggtcatgcactccctgttgcaaataggagccacggtttggtatttggcagtctgagcaaggactgggacgacattcgccagcgcaaggatcagttggtcaacttccttgctagtcttgaacgagcctctggagattctgcggcagctggcaaaatcgaagatagcaaattggccagtcctgtggagccaactgaacaaaaagagaaggctgccataatcgttcttgattcagacgatgaggacggaaatggttcaggaaacagtaagttggcatctgagactaacaaagaactcggaacatctggattgattaataatatcgcagaaaggatgacgtttaatgggagccaagcatttggaaccgtgcatacttatggagataagaacacacagattgttccgtatggtcaatgttctgctttagtgaatcagtttcctttgcaaaccagttggcaaccatctattcagtttgagagagtcgt

SEQ ID NO: 196400 - DNA, 652 bp, Zea Mays
tgcctacatgtgtcggttggggtcgggggttttgtccccgacgccgcaggttgtgtccttggaaccacggaccggcaaccgcctgcttagatatctgctcgcttttgagcagttcatcttcaatctgatgatccgatcggggttttggtgtcggttggtcctcgtctaggggttgcttttcgtgcacagcgcagcatgtcgtccggctgtgaatggtgattagtaggacaaggcgagcaggaatcaacagctatgccctatggcgtggggagaggttttgttgtgcgcattttacaggatggggtgaatcagtgaactctgatgctcaggacgctgaggtttgcctagttttggtgctcccacaagtcataaaccgggatggcataacaagagagtgctaaatttgagtggcaaaatatcaatttttttcctatttcgaaggggtgccaattgtgcgtaatttcttttgttggatgctaattttaggtgttggcacttggtgcatctgtattgatctcactgaatggatctagtttggcagtcatagtttcggatgtgtcatgtgtgtttgtgctgctggactttctttgttttgggaccgtggtttcttggacctaaatagaaacctaactccttgggtgtatagactgtg

SEQ ID NO: 196401 - DNA, 354 bp, Zea Mays
cccaacccaaacccaacacaattcccccgtgttgcctacacgcactggccacgaccaaaccctaggcgccgccgcctccggggccctcaggtacgcctctcgcttacccgccgccgggatttcgccgctgcgccgccgtccgtggctttgaacgactgacagcttcgcactagggttcgttgcgatttcgttgttaggagtgatttatgttttacttttctgtttgtgtgcgtgattggatcagggctgtcatacggggaaggaggaggatatcggtgaggagagaaggggatttatgtcccagcgaggtgacaggggcgaggggcacgccaggagacccggccggtccagcag

SEQ ID NO: 196402 - DNA, 443 bp, Zea Mays
tggaaaatcacgaaatcgccccgacagcacacgaccgacctgtccccccttcaccgcatcagcaacatcccctctcctccctcgctccttcttcctcctcttcccgccgccgtcgtccgccgccgccgctggcttggcggccgcctctcgtacacccatcgcagttgcgggcgacgacgaccacatgactatgatgacgccgccccctctcgaggtacgtgctctccttcactggctacctcgccccgatctccgcggccagttccccctcgccgctgcgccgatctagagtgctcgggttcgcaccagggtttaagcgccgggccggatctgactcctcagcccgcgctcttccctcctcgcagcagcagcaggaggacgacgagatgctggtgccgcatcaggagctccctgtcgctggcccagaagcagccccacagccg

SEQ ID NO: 196403 - DNA, 659 bp, Zea Mays
ggtcctggaagtccatggtcaagttttgaggatcaggttactgtctttgcaatattgtgggtcttattttttatttgttggcaataccctaattttctttcataccaggctcttgttgtccttgtccatgatatgggtgaaaactgggaattggttagtgatgcccttaacagcatcatccaattgaaggtaacattttattgaggataactgttttgatttggtatcagtcatttacttttctcctgaatcatcaaaatgtgccaagcaactattttgttgcaacctgttacgagtaagtttatgttatttgtgttcctctttgtaactgatttatgtatataatattccagggctttggatcttaattgttgtaaacttgcaatagtctattgctaattgaaaaacattttatattttattacttgattcaagattttagcatcttcttcgcagtgcatatacagaaggcctaatgagtgtaaggaacgccataaacttctcaccgatagaagttgtggcgacggtgctgacagcgctgatgactcaggctcatctcaacactatccttctgcattgcctgggattccaaaggttaattcccattattctttcatctatttcacttctcagcttgtatatggaaatgattttttttg

SEQ ID NO: 196404 - DNA, 448 bp, Zea Mays
gttcttctcatgcggaagtttggtattctcaaagacggggcaccagtgaccgccgtggccaaggatctgtacgacagcttgtaccggtccgagctgaaaccggagcacatcaatgccattcgtgagttgtttccctaccgcgggtccggcaccagcacttggccaggggacgtcgtcgacgcttgctccgaggaaggggcaccggcgctggaggacgcggtgtgaagctcggccacctgctcgccattgttgctcgccttcatggataacatcaagatcctgtcctggaatgtgcgcgggctgggggctcgtgccagacgcagtgttgttcgcacactcgtagacgacgtggttgccgacattgtgtgtatccaggagtcgaaactgagtaccgtcactcgtgacgttgtaatcgcaatgcttggtttgcgtttttcggattttgcct

SEQ ID NO: 196405 - DNA, 713 bp, Zea Mays
tagattctttttcgttgttttgggccttctgtcatgtttcttttgatcttctgcgtgtttgcttgatcatggaaaggggtagcgtgtatcgatcttgcattttgtgtgtgtgtgtgacacaacgcattgtgcatcttgttccttagatcttttaccttactcactgcagtgtcttaatcatttgatgggcaggtaatttctcgcgagcgcattcagcacagcaggttactattggctgctcgtccacttaagcaggttgaggtatccatttggttcgacacagtgaagaactgaagatacgcattgtgcttgcttgtcttgcggggctcacaaacatcctgctggtgtgctgtgctgggaaggtcacataatccacttggctatatgccggggtgggaatgtgaatcggggcttcattagtgcaggcagcaggcttgttaacttggtaattagtcaatgaaacccatactctttaatgacttcttttggccactgttagcctgtgtttgatataatgtagctgttcatttgtgcttccttccaaaagttccatattttgttctttattggagcatcaattttagatggcaatgtatacctgaacatcttcaaactgtctacacaatatgtctgcattgtttttgtgcttatgccagtagaattaacaattaacaagtagtatctgttcattactttagttcatgttttgtgcc

SEQ ID NO: 196406 - DNA, 616 bp, Zea Mays
tcaaaactctggagaggtcttacctgttgaagcttgatggtaaggtcgttgaaaggccgcagcacatgttaatgagggtttcactggggatacacaaggaagacatcgagtctgccatcaggacgtaccatctgatgtcccagcgctggtttactcatgcttcaccgacgcttttcaatgctggcacgccgaggccccaagtactgtcttgtttcccgccagatgatgtcattgtgggttctgaaattgtttatttactgctgctttttctgtgatgcagttaagcagctgttttcttatatgcatgaaagatgacagcattgagggaatctatgaaaccctgaaagagtgtgctgtaataagcaaatctgctggaggaattggtgtctcagttcataatatccgtgctactgggagttatattcgaggaacaaatggatcatcaaatggaattgttcctatgttacgtgtctttaatgatactgctcgctatgttgatcagggtggtggcaaaagaaagggtatgtttcttcattatcgtcgcttttagttccttcatcttcagaaattctaacgagcttctaaaaacttaggtgcatttgctgtatacttggag

SEQ ID NO: 196407 - DNA, 278 bp, Zea Mays
ggtccaagaaacaaaaagggaaacatggaaaaagtcaagaaataacttcaagaaaagcttgttatctatgtggacgtgaaggtcattacttccgtaactatcatgagaagagttcgctaccggatacctcagagataaagctatcccagtctctagacatggaatatgaacaaaaatgcgtagaaacttctatcaacatagtgaagaacaacaaaaggtatagaaaaacatttggatatatgagtagtccacctcaaccacaagcaaaagccccgaaa

SEQ ID NO: 196408 - DNA, 540 bp, Zea Mays
caagccgcacaagtcacaggcacaggcgcaacacgcgggaaggcccgccacatgctatgaggctctagggtgacggtggcgcagaaggagggcgccatagacgaagacgtcgacgcagccgtagaggaagtagctaatgccgaggacgatgctgtcaaaccgccgtggacgaggcgtgctctaggtttgctacgcctggaaacgcgtcgtagacgaatgcacgtgttggtgttgccagtaccgcacgtactaggtagaaggctccaaccaagtgtcagtgtctgaagggaccaacagagaagacctccacgacggttgtggtgcagcatgtcgggagtgctgttgcagctcacgattgtcagagtggagtagacgaagtagttgaggatgagatggcgacgctggcaacaaggttgtgctggaagaaggtgaagaggtaggcatggcgacgcatcgaggattctggagtcgcggcggcgagagccacgacacacaggaagagactcaacgccagtggagtgcgacggcggtacttgtcgg

SEQ ID NO: 196409 - DNA, 593 bp, Zea Mays
gtctacaacatacaggaaagctattggagagcataatgatacaaaccagtcctgcatgaagttccttagagaaggcagtgtgcagtcttctccaaatggatttctatcaagtgatgctgctccaagaaccagacaaggcacttttgaccttcaacttccagccgatcattatatagatgacgatgacacatcagataacaagcccatagatttccttggtttggcatcagatgcaaaaccccagaatgatgctgagcttacattagttagtgcagaacgcttgggcaagttcagtgataatagttcatcctcaggtttgcggactacaaataatcttggaagccgacaagttaccaacctgaatgaatcaaatactggcttctttatgggtagagcaaatggatctgtttccagaggccttccgcataccctcgagaactcgtggcaccaaccgatattgagatcaagcacaactactttcaatttcagtaaagaatactccaaagaaaagcacacaaatgaaggtacaagctcaaatttttttgacacaagtgcgaaactaacacatgacgacaagccaacaatcaataaag

SEQ ID NO: 196410 - DNA, 282 bp, Zea Mays
gtagcactgcggctcctactaccaagtaccaaccacacctccaacccccgccgtataccaatccgccggaggtctctattcagtccacttgcctttttccctcaccggtcactgcatcgagctatcggttcgtctctccctttccctcaggtgatgcatcctttattttgttgcagtggcgattttgcactgccttttgtggtcgattgccgatccttcttggtggtgttgctgcaggagtggtagatctgccggtgcggtccccagtttggatcttgatga

SEQ ID NO: 196411 - DNA, 368 bp, Zea Mays
ttgtagatgggaatgacgcagagctacatgtacatggcaatggcgcagaggtacatgataatggcacagagttacatggcaatggtgcagtgctgaaaagagttgaaatgccccaggttagagaggtgtatgttagtttaaatgtttatttttggtactggctgccatggaaacttgtaatgcttgctttcttcactaggatttgggagcgatttcagccaaggaggtgccgctgcatgagggcaaggaggtgatacttgtggatgataatgacagcgggcaggaagatgatgcagagggtaaggtggatgagaacacacctcgtgttgggctgagattcaaaacttatgatgacgctctcaagtact

SEQ ID NO: 196412 - DNA, 973 bp, Zea Mays
aatggccactctctttccatagatgaatcaagcatgacgggagaaagtaaaattgtaagctactccaatatgctgctttggaagtaacacactttacctgtgaacctaacttggccacatgtgggttatttgaaggtacacaaagatcaaaagtcgccatttctaatgtcaggttgcaaagttgccgatggctatggcacaatgctggtgagtttgacttgaaattttctggacaggaatccagccaagcgtctgaaattttgacttgaaaattatatgtttagatttgtcttgaacaatacttaatactcttctagattattcgacttcatatatgtgtagaagaaaacagtggataaaggtacatgaaaatagtacttctcttggtcaaagtttgagctaaaactttactgttgttactttccagtgtcaaacttactttaatagtttaatatgatatatgcctattacctctttaattactagtagtgattggaacagtgtagagcgtttatcaactgaaccattctgttgtaatgtccaggtaactgctgttggagtcaacactgaatgggggttgctaatggcaagcatatctgaagattcgggtgaagagacaccactccaggtttgattttgttgttgttgccagcctttgcgcgagtttatttcctttacatgcctttgttgttccggtgcaggttcgtttgaatggtgtcgctactttcattggaatggttggactttctgttgcccttgcagttctggttgtacttttggccaggtaaaattggcatattttagtgtgctaaccgtctactttgtttatctacatcaatctgtatcaccttgttttctcgtaggtacttcactgggcatacttataatcctgacggatctgtgcaatatgtgaaagggaagatgggtgtaggccagacgatacgtggagtagttagaatattcacagtggctg

SEQ ID NO: 196413 - DNA, 572 bp, Zea Mays
ctagaggagggattaccagaagtgctcatctctgtttgagcctttgaggtctgaacagagcaggagggagtggaggatggtctgaactctgaacagagcagaaggaagcctggagcagagattgccgcaccctggatgctggagcagggacagctgcacgctggagcagggacaggtcacaggtcgaagcagagatgagggcgacgggccggcagtagatgagggcggcagcgctcagcagtcagcagtccagctccaacaagcagatgagggcggcggcgctcggcagtccagctccagcaagcagatgagggtggcggcgctcagagcagtccagcaaccaaatgaaggcggcggcgctcagctccagctagggcaaaagactgtataaggggctaagggcagcgacgctcagtttcagctcccatgatgggccggcccaaatggaaaagagcagatacctgcttcatctgctggagcccaaaacagagaacctagtcggacacaaccctaatcggacgactaatcgccgactaatcgcgattagtcggacgactaggtttctagtcgcc

SEQ ID NO: 196414 - DNA, 433 bp, Zea Mays
atatgtcagaggtaactgaacacacagaataatatattccaattacaggaaaagttgcaggtaccaacaatcacatgatgtggatgctaaccttagaagtccagagccgatagccaatacgttttatgcatgactaacacaaatgtatggcaatgccattgtaattaattgccactctttgcacctttgctgtgacagatgatccggaccaccgaaatcgtacccagcaaccaaatatcgcatggactaatgaattgagccggagattggtttgcaagaagactatctgttccagtaaccaaggctcccgaacccaggcagcctccagccatggcttattacaaccattcacgctcagcgcaggcggaaacaggagaacggcagacaggcgcgcgctggcgatcccaagaccaaaatggggttaaagtaaaac

SEQ ID NO: 196415 - DNA, 522 bp, Zea Mays
gttacctagtagtattgacttgttattagaacgttcccgttgacttcccgtctcccgcttgttctgcctaaccctaggcttattaaatccccttgtctgtagctgggcaaacgttgtctttttgttcatctcctgttttctatccgtatgcttcggtgcgtgcatggagggcttgcctggtgggttggtgggaaattacccactgtttgttcaggaggagaattcctgagaagtcgatttattgccattaatctctacctggcatggagtttagactttggatggtctagcatttgtacagatgatgtagagttgtagttgaacagcatcatagtcggttacctggtccacgttcgatctctgggcacgtcactttcagtgtagctgataaatttgatatttcaccggtgaagttttcttgtattataggaaatttgcgtaaccattatgatcaagttgaacatgtcacactctttggacggcaacgggccaaagtcatgcaaaagagatgtcccaatttcc

SEQ ID NO: 196416 - DNA, 1130 bp, Zea Mays
ggagcatcccacaagctagcttttaacatcattgaaaattgtgctgacaaattggagcctatcattcacagttttttgtcctcatgcatttttaacaaggacatgcctgttactgaacttaggagattatatcataaaattattcttgaaatattccagtgtgcaccccagatccttttcgctgtcattccgagcttgacgcatgaacttcttgtatgctatcctccgttctttgttacaccattgtacttgtacctgcataatattattcctgagttttgtagcatctacctctgtagagtgaccaagttgatataaggctggaggcagttcaccttattgggaggcttcttgccctatctaatcttcagtttggtcaagaaaacaagatggtttttatagaatttctaaggagattctctgacaaatctgcagaagttagaattgccgcaattgatgcagccaaagcgtgctatatggatgtgtctagggatgaagcacaacatatactttgtaaggctgcttttagttgtcattttatctagattgctgtgttagcagttagcacctttttaatgttaacattcattttcattttttggcagcatcacttgaagggaggttactagattttgatgagaaagtgaggatccgagctgttcacacagtctgtgatttagccaaatcaaaccttagctcttctgctaaactgatattacatgcagctgagagactacgtgacaaaaaagtgagtatgaactaatgatgtttttcagtgcagttatttctctacaatgcttcacccaaacatgcttttcaggcatccgttagaaaaaatgtaatgcacaagttgttggagctgtatcgggattactgtgagaaatgctcaaaaggaactgccacagtcaacactcattatgaacaaatcccagctaaacttatagttctttgtttcgataatgatattgaatccttcaggtttgtccttttttctcccctttgtagataggatcctgcccacagttctgaattctggcttcttttttatggcaggccacagaatatggagcttatatttgctgaagaactctttccattctctctttctccaaaagagagggcgacccatt

SEQ ID NO: 196417 - DNA, 307 bp, Zea Mays
gtttagagataaattgataaaacaagtgtcatgatcctcggagaagggggtatgagaatgaccagaaatgagagatttaggcaagatcgacatccgatacttgagaacaggttatagcagataactagataatagggcagaatcattaaaggatccagagatttagatgataaagccacaacatgattcacaaggaaaaagattaccagatccaggtgaaaggagaggtatgcaaacaggatcagctaggatgatcaacagaaatgctatgaagtttttggggcaaggatttatggaaagaaacatg

SEQ ID NO: 196418 - DNA, 1412 bp, Zea Mays
ggtatctgaggagaagaagcgagtgcttgcatcattggaccctcaggtacttaacttgcatcagttgacgcttgtatttgtagtcaagttatttcaatgctttgcttaaaaaccgacaaactgtccacctgttctacttgttagggtgagatgttgcatgagatgatcgaaagtgtagttcactccctggaagataagttcacttcagtgttttcgactctccttctgaactgtggtcaggtgcggtttgacgatgtcatgatacaaattcgataccttgatgactcccatttttttgtactgaggacaaccgacttacggttcggccctgagcctgttttccgcagcactctgttcagaggactagttgggtctttaattccatccagaaagaagaataaattgtctgttaaatgcgctgaatttgaattcctgatgaaggagaatgattctgtagattgcagtgcatctttcactggcgtatctgcttcagtcagattggataatttgcaactttctgcctttggcattcatgttcccaaaacttgctggaaaatttcaccaaagtttgctccttctttgctggtgatattggatattgcaaaccaaaaggaagattatgcagttaggaacggcagagagctttggaaagctgctgcacaaaaggttgacaattcagtagtgtgccaaaggttttctttaagaaaagccgtaagctgtgctgctttctggcggagctatgtccatgcttatgtattgttgctgacattagcagggtatccctcagacaagattgtagtaaggaactgtggcagggtatcaaggaacaagaaatttttgggtactattagacatcaatggaaaactgttgttgatctggaggataagattcctgtagaagctattgctagagcacggcgtgctgcacgttcaaaactgattgtatcacagcaactgaaaaagcaggaatcatcaaaagcagttctggtttctttcttgttgaaaattcttatgcccttcttatgtttatggaggtttcttgtgttcatatggaggccagtgtgggcgatgatgggccctagaaacaaggcatcatatgcatatttttttcctggttctacttatgatgttgacatggagcttcatgtcagcgtacaccttggggaactgtctgtaaccttgttaccgttcgttgattgtttcactgatatgaaaggatcagacagaagaaacactcagaatgagttagcttcagtgcatcttgtaatgaagtcatcatgtttactttactcagctggttgcaccacacaatcattttatctagttctcggggaactgaagacatgcctttccagtgtcccaaagttggtacaagcagatagtaacaacagtccaaggaggagttcatcttt

SEQ ID NO: 196419 - DNA, 389 bp, Zea Mays
gcgccgaatggttgctggtcgatgttgaacgcggcgtgcgatacatgcagacgcagggcacgcattcgccattggcgaccgtgatgttcagcttgtcacgttgttggggtagaagtcctgttgctggcgcgctgtcttcggcgatgaagttgtgcgtggacccagagtcgagcaaggggtagaggacaacactgcccatggtgatgtggaccttcatggtggccgaggagcgaacgccggctatggcatggagggagatgagcggtgcttcttgtggatcgggccccgtgcagtggtcctcatcttcggcggtcatctaggtccagtaagaactgtcggggcagactttattgtgcccgtgactgaacttgtcgttgcagttgtagcag

SEQ ID NO: 196420 - DNA, 3298 bp, Zea Mays
gagtacttctggcgccgtgacgtgttcgaccgcctcggctggcccatggagcagtcacgccagttcttccgcaccccgccggaccgcagccgcgtacgcaagacgggcttcgtcgaggtccgctcgttctggaacatttataggagcttcgacaggctgtgggtcatgctgcttctctacctgcaagctgcagcaatcgtggcgtgggagggcgccaagtggccgtgggatgatctgctctcttcccgtggctcagagtccaaggacacacaggtgcgcgtgctcaccgttttcatcacctgggctgcgctccggttcctccagtctctgctggacatcggcacacagttccgccgcgcatttagggatggccgaatgcttgctgtgcgcatggtgctcaaggccgttgttgcagccgcttgggttgttgcgttcgctgtcctatacatgagggtctggaaccagaggacagacaatgggcagtggtcgtcagcagctgattcacggatgaggagcttcctctatgcagctgcagcgtttgttatccctgaggtccttgccatcgtgctcttcattgtgccttgggtgcgaaacgcattggagaagacaaattggaagatctgttacgccctgacctggtggttccagagccgcagctttgttggccgaggactacgtgagggcacatttgacaatgtcaagtactccatcttttgggtgcttttgctcgccgtgaagtttgccttcagctattttctccaaatcaggccacttgtaaaacccacaaaagagatatacaatctgaatggaatccagtacacttggcatgagttctttggccaaagcaatcgttttgcggtgtttgtgctctggttaccagtggtgttgatctacctcatggatatccagatttggtatgctatattttcttctctgtcgggtgcatttgtggggctttttgcacatttgggagagatcagggacatgaaacagctgcgacttaggttccagttctttgcaagtgccatgtcattcaacatcatgccagaggagcagcaggtgaatgagagcttcttgcccagccgttttcgcaatttctggcagcgattacagctaaggtatggtttcagcagatcctttcggaagattgagtcaaatcaggtggaggcacggcggtttgcacttgtttggaatgagataataagcaagttccgggaggaagacattgttagtgatcgtgaggttgagcttcttgagctgccacctgagctgtggaatgtgcgtgtaatccgttggccttgtttcttgctctgtaatgagctgtcacttgcacttggtcaggcaaaagaagttacaggatctgatcgtaggctatggaggaagatatgtaagaatgattatcgtcgttgtgcagtgattgaggtctatgatagtgcaaaacacatgctgcttgagatcataaaggaggggactgaggagcatggtattgttacacaactgttcagcgattttgatggatccatgaagatggagaagttcactgtggagtataagatgactgagctgcacaatatccatacaaggcttgtagctctattggtcctcatcctcaaacccaccaaagatgttaccaagatagttaatgctttgcagactctctatgatgttgttgttcgtgatttccaagctgagaagaggagcatggaacaactgagaagtgaaggtcttgcacagtcaaggcccaccaggcttctctttgtggatgcagttgtgcttcctgaagaggacaatgctaccttctataagcaagtgaggcgcatgcacaccatcctgacctccagagactctatgattaatgtcccacagaaccttgaagctcgtcggaggattgcctttttcagcaattcattgtttatgaacataccaagggcaacccaggttgagaagatgatgtctttcagtgtcttgacgccttattataaggaggaggtgttgtacagcaaggaccaactctataaagagaatgaagatggcatctcaatattatactatctaaaacagatttacccagatgagtgggagtacttcgtagagcgaatgaaacgtgaggggatgtctgatattaatgagctgtacagtgagaaggaaaggctgagggatcttcggcactgggtctcatataggggacagacattatcacgtactgtgagaggaatgatgtactattatgaagctctcaagatgctgacctttttggattctgcctctgaacatgatttaaagactggatcaagggagttagctactatgggttcctcaagaattggatcctcaaggcatgacggagttgctggtgggtcagggtattacagcagggcatcttcctctcatgcattgagtagagcaagcagtagtgtgagctccttgtttaaaggaagcgaatatgggactgtcctcatgaaatacacatatgtagttgcatgccaggtatatggacagcagaaagctaagaatgaccccaatgcttttgaaatattggagctaatgaaaaattatgaagcattacgtgttgcttatgttgatgaaaggcagatcaatggcaacgaaaaagagttcttctctgttctcgtgaaatatgaccaacaattgcagcgggaggttgaaatctatcgggttaagttgcctggagagttgaagattggcgaaggaaagccagaaaatcagaatcatgcactcatcttcacaaggggcgatgcagttcaaactattgatatgaaccaagacaactactttgaagaagctctaaagatgagaaacctactagaagagttcaatcgttattatggaattcgcaagcctaaaattcttggggttcgggaacacgtcttcacgggttcagtttcttctcttgcttggttcatgtctgcccaggagacaagttttgtcactctggggcagcgtgttctggctgatccacttaaagtcagaatgcattatggccacccagatgtttttgatcgtctttggtttttgggccgaggtggtatcagtaaagcatcaagaataatcaacattagtgaggacatttttgctggtttcaactgtactctccgtggtggtaatgttacacaccacgagtatatccaggttggtaaaggtagagatgtgggcctcaaccaggtctctatgtttgaagccaaggttgctagtggcaatggtgaacaaactttgagccgagatgtttacaggctgggccaccgattggatttcttccggatgctctctttcttctatacaa

SEQ ID NO: 196421 - DNA, 277 bp, Zea Mays
gaaaaagtagaggatgaaaccgttcacatcagaccaaaaatatctgatcttccggtaactaattgcaattatagctacttattattatgaaattttggtggaggaatggcttacagtatttctattgtgaatacatttgtaactgcagaaaacattagccttcaatgaaaaggagctttgcaaatatttcaagcctggtgaccatgtcaaggtgatctcaggtgtccaagaaggtgctactggcatggtcgttaaagtggaagggcatgtcttgatc

SEQ ID NO: 196422 - DNA, 467 bp, Zea Mays
ccactcaagttcttgttaatggagtgcctggacagcctataaaactcaagcgtgggttgagacaaggcgatcctctgtctccctttttattcatcttagtcatggatgttcttaatagtctattcatcagggcagatgagtgtggattattacatccccttgctggcagaagcattagccaaagggtttcaatgttcgcagatgatgttgctgtttttgtaaaaccagtttctcgggacttagtggtggtcagagaaattttgaggtgttttggtgttgccacaggtcttcaaactaacttgcaaaaaagtttctcctacccagttcagtgcaattctgagagaactgtgttggctgttcagaccttggggtgtgcctaaaaaaactttcccacaacctatcttggtctccctctgagcagcaaaaaacttagtgctaaagacctcgctcactggatagagaaaatt

SEQ ID NO: 196423 - DNA, 548 bp, Zea Mays
gtgcgcttaaatgaggcaagggctaaggaatgctttttcagtccacatctcagccaatcctccaaaggagacaaaagcctgaaatcttgggctacttcaagcctgtgaagaatctcccttgctaaagctaactgtgaggtcacatgcccaatcttttgtccactccatttctgcaaggatctagcagtggcttttagtctcctatcaaagcttagaactgggcagactccttcatcaatagaaatccaagcatcattgacagcttcctggaatccatctaactttggccaaaaggattcaaaatggaaccgcctcttgccaaaacagttgctctgcagacctagtacaagggggcagtgatcagagtcctccgaggcagcgctttggaggaggttattgggaaaaatatcttcccagtcacttgagcacaggactctgtctaatctaaccaatgtaggagacacttggtgattagaccaggtatatttgcgccctattagaggcaggtcaataaggcttgtatcatcaataaatttcctgaatctccc

SEQ ID NO: 196424 - DNA, 606 bp, Zea Mays
ctcctacaaccgcacgcagtctggggtctggagagaaggaaatgtttccgccactgttgaaaaacgcatccaacccatgggcaagcatccagacagtgtcataagcatagaggccataggtattgggcaagctgccgccgtcctcctcctcctcctccttcgccacttcactccatcgcgaaaccaacgccttcttcctactggtgttctccgtgtgctgacgcaacgtgagaacaccctgcatcgtgttcagtaatccagttccaagacgaggagctgagtcgaggcacgcggtgagccaatctgtcgcgatccacacgtatccaccggatgtcatgctcagattgtacgccagcgagaacacgtcgattccagaatcgtcacgcgcgtgcagcacgaaaacccgggactccatcatcgcagccttgaccagcacggcggccatctcgctctttcttgcccctggcctgatcgcagctttgtacaggatcttcagtctcctcttggcaagctcgtcgtctaaggaggacacgccgtttcttccgtagtcgtcatcgatgtacacggctgtcaccatcttccacccgtagtaatcaactatcgcag

SEQ ID NO: 196425 - DNA, 568 bp, Zea Mays
aaactctaacacaaagcctacagacccgggatgcgattagttagcaaggatagctttcttgctccagcgagctcccacttctctcgctcttgatcagccatcctaacagcaagattcacattaggtctgtttctgtcgaagacacaactattctgatgtttccacagagtccatgctcctaaaattaccagggagtttactgcttcccctgccactccatgaatctgattgcccagccaactccacaagtccataaaagatgcatcaacaagctaagaggccatgctttggagattaacttgagatagtagtttaaatcagaaatcccgggcgaacacacacccaatcagcagatggtcaagtgtttcctgctcctgatcacacaaagggcagctcgtagggtgatccatgcctctcttttgcaacctgtcagctgtccaaagccttcgttgagcgaccagccacatgaagaacttggtctttggaggagcccaggttttccaaattctgtggtacggctcaaaagtcgtcgacccaaggaaaagaccctcataggctgccttggcta

SEQ ID NO: 196426 - DNA, 758 bp, Zea Mays
tgctccaggcgggggaggagggacggtcgatgccggaactgagccagatgccatgagagatatcccctcatccgaggaccccaatgagcccgtgctcggcatgacgtttgagtccgatgaggccgccaaggcattctacaacgactatgccaggcggcttggcttccccttccgcgtcggcaggtctcggcggtcgaagggcacagaggaggttgtcgtcatgaagaggttcgtttgctccagggaaggggtgtacaagaagaaacagacctcgccggatgaggcggcaaggaagcgtgagaggatgtctatgcgagagggttgcaatgctatgatggaggtggttagggaggcggaccattgggttgtctccaaacttgagaaggctcacaaccatgagctcggcacttgtagcgccaaggttgggtaccttcgtgcgagaagttctcttggtggctctgataaggccacaatggtggggcctgacgagatggcgtttcttaggcagaatgtcctgggggaaggaggagacgcccagggccttcttgattatctcaagaagatgcaagccaatgacccggcgttctgccatgctatacaggttgacaagaatggctgtgtggtgaatgttttctgggctgatgctagggccaaagcagcttatcggcatttcggggatgctataacgttcgacacgacgtacaagaagaacaagcatatgatgccctttgttactttctcgggagtcaaccatcatc

SEQ ID NO: 196427 - DNA, 819 bp, Zea Mays
cgccgtagtcgactcgggcgcacaccgccgacttggccttgtgaaaccttcctggcgaagagaggggcgtccgggaaggttttaccctcactgtcggggtgccttgcgcatcggaggactgggaattcctcaccgtcgttgggcctccgccgcgggactgcgccatcgcgtggcctgggaattcttcgccgcgaatcgaggtaatcggtgtaccatcttcttcgcttttcactggtcgaggtgtagggtagttgagtttggggattagagctccgaggcgtggaattaacggtagtccggcgatgttccgccgtgttgggcggcggcgccgctgttctggcgtcgggagaaggaagatgggcgatggccgttggatcgtgaatgtgcggcccagattagcttaggcataccccttcgcgtgtgttagatcggggccctagatttctgatcgggcggacgcagatcgatctggtcgttttaaatccgaaccagtcatcagggatccgagggcctgggttgaacgcggatgtgtaaaccgccgggatctaatctggtgcgtccgtttggaatcggacggccagggtcgttggataccccttcggctgggctgttttgcataagagtccctcggtttacttgaaatcaacccgccgtccaccctgtacagcgctctgagtcataggatattttgccgtctagcccctgcagtttcctataattgaggcccagtccagagagttataaaatcaggaaaattaattagaaaatgagtttttaatataaaaataattcctagagtttatataattcatagaaaat

SEQ ID NO: 196428 - DNA, 533 bp, Zea Mays
acagactctgcaaactcagctaggtgccgcatccattcttgggaagtttgtggaggctggatctcaagtgccatcggcaagtctcctcggtaaaggtgattagcgatcctgtgtttcatgttttatgccagtttccttccatgtattgatggcctgcttctttactgatctggctgcgttacctgatacctcttattctctgacttaataggcagtaacaccttgattgtctcaaatgctctgaatcataaagcgtctgctccaagttacaagaagatcatgagggtgaatcaggggcaattcaaacctggcactaaccggaatctttcatggcagaagcctgtgtcaagtgataaccttctgataactttctcagatgatgatagtggggcagactctgggaagacagggcgagataaagttaggaaggctagctctcaaggtacacagagaacagggaacagtatgcaaactaggatcatgagagaggaagtatctcagcagaaaaaccttggttcaaaagtaggtcctgc

SEQ ID NO: 196429 - DNA, 385 bp, Zea Mays
ataatgagaaaaataagtttccaaagtcaggataaataaattgtacaaacaaaattatagtatcatttttctcactcacttcccttgagacgaccagcaagattatccaacatttgtttctcggctctagccgccccccattcccttgcatcatgtgctctcttctcatgtgtcgccttcaacctcctcagctctgcacgcatcggactgtcaaaactcgcagatttcgcatacctacacatgtcctgtatgcgatcgttaatgtaggaatcgacgagctgagatccacaacgcatcttctatcccattagtctcttggactttattgtgggcatcatctctcctttgtcgtcgtaactctcctaactgcatttcctcgtctcct

SEQ ID NO: 196430 - DNA, 563 bp, Zea Mays
ttgagcatggaacgagcactgaatgctgcagaactgtaagtgttaaaaatactgaatgtgctttagtagaagcatcaaatgaaaaaaatcgttccacggttcactgtggtgtcctggagttgctgcctcacttgatgtctgaagaacatccaatggaaaaaaatattctagacgtgtcaactgaagttaggaatgcatcactgccatccagcaatttggatatccaatttacatcatatatgaatagttctgttggaaaagttgaggcccctcatcaacaagaagcacttgaaattgaaaatagtggaaacaactgtcaaagtgacagggctgagtttgctgtgcatggcaaaagaataatcattgtcggagcgggccctgctggtttaactgctgctcgccatttgcaacggcaaggttttttggtcactgttcttgaggcacgagaaaggattggtggccgtgtttatacggatcgcacatcactttcagttcctgtagatttgggtgctagcattattacaggggtggaggctgatatagctactgaaagacgggctgat

SEQ ID NO: 196431 - DNA, 448 bp, Zea Mays
gtggttttcctttttcttcagatttgaaggtacttccactatccaattatgaccttattcttggcatggattggttgtgtgcattcagcccgatgtggatacactagagtgctaaatgtttggtcatcccttaccttcattccaagattaagctctagggtttgggtgctagttcagttcatggccaaacactggaagtatgtctgttggactcactgtcggacaaggagcaggatattgtgtagcagctttcccctgaattacaacaacttctcagcgattatacggatgtgtttgttcttccacaaggtttaccgcctcccagagagtgcgaccaccatattcagcttgtaccaggagcccaaccagtgtaagttcggccatatcgctatgcaccagcactcaaaacagagatcgagactcagactgcagaaatgctccaaaccgg

SEQ ID NO: 196432 - DNA, 289 bp, Zea Mays
tctacctacatcgactaagagtcctaagtattaaacacattatcacttttcacgcgcaaataaacctcaactaaacaccagtgacaccgatggatttttactaaacttatcatgcgcataaccctgtcttgcatacaaccatattgtggcgtgcactcgagacacttcgataatcgtagcgtaaccactaatatatgaactccgacactcatgtcttaataattcatcctccacgcactagcattttctaaactactcgtcacattaataaatatactctcgatataat

SEQ ID NO: 196433 - DNA, 379 bp, Zea Mays
tcttcaagtgacatgcatatgacatggaactgagcttcatatatgttcccctttttgatagaaaaacattctggaccatcttcttttgttgggtgttgagagtcagtgggcccctgtcgctctccgctgtatggtaattcccttaggactgtctgctcccttgtctcctgcattttccgttttcaaccggtcaatgatgctaccctgtttggcaatgtccataaattttttccaggcactgcgttgtattggcaatttggtgttaaggaatcctcagaatcttgattctcttgcaagaaagcaagttggagaagagcctcatgttcaacctgcactgaatgccatcttatctataatcttacggacatctatagcgcag

SEQ ID NO: 196434 - DNA, 859 bp, Zea Mays
ctgcctctctcatgatcactttgccttccagtgtacgcagaagacgaggtgttttcggtgccggaagcaggggcatcgctcctttgattgcaatctacttaaaaggccggtgaggcttgaggctgtgaaggtggcggtgaacaacagtgctgcctctcgacctgagactgagatctcggtttggaggaggatcaatcttccggagccaagtacgaccagtggagacagactaagggagcaacctcgacctgagacacggctctcggtctggaggaggctctcttcgtcttcagcaacctctgtgatcaaggtgaagaagaagagactggtgtggagaaggaaagacaatcagcatcctcctagagattcaggtattgctgttcgacaccaggaaccatcaacaatggagggcgacggcggaggcttgatttcacttgatgctgtcggtgtccaatcaaaaagacagcggactcgcaagagacggcgtagaaccaaaccgatttctgatttggataagcgccccgctggaccggtgtcgcctgctgaagatgataaaccctgcatcttgagatggagtcagcagatgaccagagctgaggatgatcttcagaaggcagtggtgattactgttatcagcgatcgtgagaaagtaccggttgaagagattgctgagttaattgctcctaggctggagctggaagaggggacactgataattcggcattattcccagtcaagtttcattctctttctacctggctgtgacatggtggagatgctggtgggcaattggccttttctcagggcagccacgttcacaatcacctgcaggaaatggtcccggtttctgaactccagg

SEQ ID NO: 196435 - DNA, 428 bp, Zea Mays
gttgaagcagcattcgaacagttcacaaggcaccttatctcagaatgggtaacagatctgtggtactcgcgcgtaacacctgacaaggaaggtccagaggaactcatcgatgtagtcaatactgtccttggggagatttcagttcgggcaagaaatgttaaccttatcaatctgctgatcaggtagaaaatcttgtttttgtgcaataaataaaaacatagatgacacaatgttttcagaacattagacttctaatactaaagcattccctgtgttttccagggatttggtcgatcttatatgcaataatttggaactttatcatttctgtcaagccaagattggaagagagaagtttgtgggccttccttcagagcgtcgtgatgctgaactgaaaatgatccttttagctgaaaacaagttgcatc

SEQ ID NO: 196436 - DNA, 312 bp, Zea Mays
accgtcgttagcacccttttatttctacacgtggagggggtagtggtcttcattgcaatcattgtggacaggatggacatgtggagtctttctgttataggaagaagaatcaagggttgcttatcgttcttcaaagactagtaatcctactactggaggtccagctacccaggagatgctcatgctccttcatcgccttgctccctctgcaccgccgggagtcgctggttcagtagcacaatctttagctttgacaggtggacatgcctggattcttgattctggtgtttcttttcatatgactccttattc

SEQ ID NO: 196437 - DNA, 497 bp, Zea Mays
cgcgatcagacgttctggtcgtccagatcgtcgattaagcgtccagatcgtccgattaggcgtctgattagttgatttctggtcgtccaatggcggctagggtttactattgggcttcatccttttttggcccatctacagtaagcaatataaaccgcttgcctcccctgccgaaaccctagcgctgccgtaacccaaaccctgcctgcgcccctgcccattgtctgccctctaccgccgtcatttgtccagtgcattcaccggcggctgctccaatacaccggcgccggctctccaggactccaccagcgttgtctccagaccagcaccggtgagcaatgacgaagaggacttgatgactggtgctggtcccttccttctcccccttttctatcttattatcagtatgtctacactctgcggtcagttgttcttgacttcttggttcttaccatcacagcaccagtgcattctgcagtctctagttacaatttcag

SEQ ID NO: 196438 - DNA, 1372 bp, Zea Mays
cttcaatgcatggatggttctgtttataaacttgttggagagaccagttcccgtggaaggccaaccaatagatcctgagattaggaaatcttgggcctggtggaaagttaagaaatggactatccatatcctgaaccgtctctataccaggtcagtgtttgattggcatgtaacaactttatcttgggtagtcagtagtcactgtgtgttcacctattattaattgtgtacagatttggtgatctgaagcttcagaaaccagagagtaaagcttttgctcaaatgtttcagaagacttattcagggaaaatattggcatgtcacatgcagctgctgaatgcaattcgtggtggagactacttgccagatagggttatcaatcttgttctacagtatctgactaacaggtgtcttgatgctaatgatacgacattgtatacttgtaaaatggtcttttgtgatgctagcatctcgcatcatctgcatcatcctttattttctttatcctatatcaaacgaaattctcattaatttagctaaggagttcagccacactcaaatatcgtgcggcatagttgctgcgacagactttctttgtgttgcttctggacctcactagtcactatccaggtgtgccagtcaccaaggacgaatccaggtgccactgtggccaaggatgagaggtgctggtggcacattgggcgagaaggaaggaggaaaagtgctttgttattgctctaactcatagaatggtgtcaattcatattaggttggcttgccaaacatagtctatctggttatctgagtagcaaatgctaaaaactcaataattataagatctgataaagccctacaactacaggagtcataacttgactaggttagagctgttgggttattggctatgcatttttgcctttctatgcactatgcatggctcctggttgattctggctcctctggtggcaaatcccaggaacatctgttccattactgtcttgtttaatctgtattttttttgtccttactgaagtagggcacttcatgataataattgacttggatgctgtttggacataacatgtagcttttggctagagaatgtttgtcttgcccaactaatcgtgcatgatcttatcttcaaagctgtatggaatactattcaaattcaaaagatataaaagacttggtgaatattttaaaaacggtgcacacttaaaatatgctaggtcaatattttttttttgccaaactcaatttatgatatcccttgcttaatgcttacgagtcatccaacttggtgattgtagaaatgcttatcagtattttctttgttttgtattgtgcagtgttacaaagaacagtatgtatc

SEQ ID NO: 196439 - DNA, 458 bp, Zea Mays
gttggatggatgtccagggcctgggatctcctttcatatgctcacgctaagctcagcgcttgattaaggtctcgtggcaccataagctccacatcgatcttgatccaatccggtagtcctgcagtgaatagttgcacctgctgctcctgggagagaggtgctgtttgggctagcagatcccaaaatctttcctgataatcatccactgtcgtgcgaaagggtagtcgtgccagttcacccaatggattgctgcgaagtggtggtacaaacctttgctggcagagctgtttgaaatgagaccatgataatggtggtgcatcacgctggagctgtccataccaggttcgggcgacccctgtcatgtgatatgaggccagccagaccttctcttctatcgtgcgttggccgtcgaagaactggtcacaccggtctaaccactggatggggtcctccttgcc

SEQ ID NO: 196440 - DNA, 353 bp, Zea Mays
cccgcccctgcccctgcctctgtatccatcccacgtcttcttccatgccctcgcctcagtgccccctcctccctgtcccgcacgtgatgccccaccatgacagccgccgctccatcaacgacctcgccctccttcctccaccgtcccgctcgcacgaatctccttcgttgcgacactatcgtgggcctgcggtgcaaggagatcgccacgctcgttgttggggcctctgcgctctcctcctggcacgacggcagtcgtggtgagccccgaccctacttcattcttgaaagcttggcacctccgcgcgggattgggtgggttggttttctagcagactggtgaggttggtggcc

SEQ ID NO: 196441 - DNA, 1598 bp, Zea Mays
cgctttatcctcggccagacaattttggtggtcataacatggcacctccgcattcagtaccaaatccatataatcttggtccattgcctattggaacttcagtgaggccaccgtcaagtatgtttgctcctccagattttccaagcgtatcttcagctgatgcataccgtcaacaccatgaagtcactgccatggtaaggagttgattgcatggacatattttgttgcaaaactaagacagttcaaaatttctccagaggctgtgtgccattatacttcttaaacattatagaaatgctgttccacatgtggtttgtaacgtactctgtatctctgcataatttaataacccatgtgcataatagtggtactggttgatatctaacatttacatgtatttttttgtggcacacatatcagacattttaagaatgatatatacatctctggccaattgccactaaagaaaaccagacagaggtactttctaatttgttttgcacagagaaatacattcgagataccaaaatctcataaagcctgagagatgcacttctgcagttggccatactttactatgccctattcccttgtgtatagcttggtaacagggtattttagaatatttctctaggtgtacaagctcattttcttctttagttaggctgctatctgttcattattcttttgtactgctatctgttgattacttatttttcgacttttattttttaaaaaatattcagggtgagaacgttcctgctccgtttatgacatttgaggccactggattccctccagagattctgagagaggtatgtcctctttagtttggctttgctacttgtggatccatggatgcattatctaaactttatcttaacctagaaattcttgacaatgtgggccgttgaaaatgatatctttgaaatggaaaattatcttctctcatagtgagtgcattgtatgcattgctcaatgatgtagcacaatggatttacggtgatgctgagtgccctaattcaacaataggttttcaatttctgggcactgtagtgaaatacttgtggctattttctgctgacaagtattgggaggattgatgttgtttcagattataaaatgaggctgaggcttcctgcttcttgtctctgccactgaatcaacaaagagcttcttcatgccttgagttgcttaagtaagcagccatattcacttaggatatttaaccactttctcattgtttgcaaccaatttttacttgctatggaaaataccaattatctgctgcaggtgggcatgcccttatgatgcttattcgttttttcatttaagatccatgcagctggtttttcaaatcccactccaattcaagctcaaacatggcctgttgcgctgcaaaaccgggacatagtagctattgctaagacagggtctggaaagacgctggggtacctaatccctgcttttatacatctgaggagatgccacaataatccgatgctgggccctacagtattggttttggcccctactcgcgaacttgcttcacaaatacaagccgaagtagttaagtttggtcaatcatctagagtttc

SEQ ID NO: 196442 - DNA, 892 bp, Zea Mays
gggggggggggggggttggaatagaagtgaattgtccacctctcctcattagcttaagctttttggttgaactggtcattgcatgcagcttaagattttcttgaactcaatttactgtggggtttattgttgagctgctacttctatgccttttcatcactgtaaaggagcattccggttctaaaggagagcatgttatgtaggttgggcagctaaaggaactggtgaacaaggcccacaacgcagaactgaaactgttcttggaagttgaacttggactggtaatagcttctttcatgattctaggtgcggaggatgtttggctgccagctgccactcctcccttaggttagtttgatcatactagtaaggtgtttgcttgctaaacataagttagggatgccgaacttgtttccagcttggcctcacatatgataggtacaaagaattgtgtcatcattttttttcgctgcactgttggcaagttaagcaggaaataatgtttgcctcacttgaacatcgttagatatgaacaaaagggtctacattttcacactttttatttcaccaaccattaatatagtttgaaactgataagatctgttctcattcttttgcgggcaatgtaggaccttaaacctcttcctcttcccgacaagactagagaagatatatttcttttcttcaaactctatgaacctgaaaaggaacagctgcggtacttttcatagattccaactaactactgtttgacaccctcgatactttattttttgttgcatatttactctactggatggatttttcaggtatgttggtaggctttttgtaaaggcttcaggaagaccacaggacattctgctgaagttaaggatgttggcaggtttttcac

SEQ ID NO: 196443 - DNA, 1024 bp, Zea Mays
gttggaccgagaagacggtccaggcacggttcttgggccagacactattaaatcactgcctctcttctaggcacatcgccctctggtgtctatagggcaaagccctaggtgcaccgtaaggcatagctggatccacgtgatccgacccaaggagcgcgtcgccatgcattcagatccgcttgaggcacacaaccacagccaccgtgtcgagagggatgacactgtcgcatgccttacctcaatattggtttggctcgatctagagacgcgtcgactaccggtgcttatgctgaccctgtcctgccatcctggtcctttgttatcccactttggcgcgatctaagaatctatgagcttggatcgtgtttgaataactacccgttgaagcaagatctacctatatgacatatagaaactgtagcaatgcatgaacaatcaactagtaaaagtaaaatgtgacatgagtccctaacctttttatgaattctaatatgtggttatgccaatgtggatggggctaggtgaaacttgtgaaaaaaaactccctcccctatatgttctccacatccagtccttcctctgtctcacatagattatttgtcttcctcgcgtctgagtctgctagccatagttatgcctatgcttttgaggcacatgcttagtggccatggaacatatgaagtgatgtgtgaaaggcctatgctttttagtttgaggacccaactaagaactcataaaagtttaaggacgcatgatgcattttactctaaaatacgtttaacccgttttcctaacatttatcaaatagatagatctaacatttataacattttcatgtgaaataaggatttaaacaacttttttaggtcaaggacaacccaagagacatgcaaaactctcgagtagcccaagaactgactaggcaatccctgcaataatgaaggtaccacgacattgatcacgttacacctagggttcagcttggtcttatcttcaagggcattcttcaagtgccttcaatgtg

SEQ ID NO: 196444 - DNA, 717 bp, Zea Mays
gcttgctcctgcaactctgctgctactgtgtgactacgtgcgtggatatggcaaagcccaaaccggccctcggccgagaagatagaccacagggatccgaatcttttctcgaccagtgccgacgatgctatcagcgtgctccctctcaccttgtttgtttgtttctgctgccatggtagtactttatttgatcgatttctgctgccatgtttgctatctccggtgtgtctattgtgttcctttttttctcttttaatcttgtatacaatctattttttgtacttattttattattattattatcagcaaagtgcgagtgttggtgtagtgggctagtgcgtagtggttgtaggcttagcgcttaagcatgtggttatttctttatttgaagggtccagtagtaatgcaagtgtcgtgggggtgctggctaagcatgagatgctgctaggtgtttgtgtgtattgattaattagtgaaatgcaagtgctaagtgcaccggtgtgtggtgacaaaaattccttagtatcttctgtgcctgagcatttagaggagtaatacaacatttcatatattttataagaatttgtctttgacaatagatcattttaagcttgcacaacattacacaaagagtgtaaaataattttggaagtcagattatattcatattagccttgttgactacctttccttttgcttcctatttttagcactctc

SEQ ID NO: 196445 - DNA, 523 bp, Zea Mays
agctatgcttgaaggtgccaacatctttgttgacaaaaactggtactggattggagcagcagggctcttgggtttcaccatcttcttcaatgtccttttcacactgtcgcttatgtacctgaaccgtaagctctgaattattgtgttgattccttgcttatcaccttaaaatagaatccgaatcctgccaatgatattttttgtgttaatatcagcaacatatgttctttaattctcagctctcggcaagccacaagctgttatatcagaagaaactgcaaaggaagcggaaggcaacgggcattcaaaaggggcaataagaaatggaagcacaaaaccaaaggacggtagtcataacagtaagcaactctgacagaagtcataactcataagcaaatctgaaaaacaagtgacatcttctaatctgaggtttggttatttcagaggaaatgaaggagatgaggttgagtgcacgtttgagcaactgttcatcaaatggggtttcacgactcatgtccattgg

SEQ ID NO: 196446 - DNA, 624 bp, Zea Mays
ggcctttagttgaaccaaccaatattattgtgcaactccatgatttgaagtattcctggcatgatcttgtatcaaggggttagtagatctgaaaaatattacactagaatcataacccaattgttgcactatctcaactaaagctgttattacattgtttttctatgcacattaaataaatgcaactataatcatgataatgtgttcattttagggaataaaaatgctttgaccattctgagcctatgggcaccagtcttagctgtaagttccggttttgacttcaaagttcctttgatataagaaaaatgactgcaactgataaattatgttctttcatttgtgtttacaattttacagatatacctgatggacatccacatttggtacactcttttatcagcacttgttggtggcgttatgggtgccagagatcgccttggagaggtgtatatttactcttttatgtcctggtcctgtttttggatccaagttcttatcaactatgcatacatttcttctgatgtgcaagctagattattgttctgacattctctaatgtaatgcagattcggtcaattgaaatgcttcataaacgttttgagagctttccagaagcgtttg

SEQ ID NO: 196447 - DNA, 722 bp, Zea Mays
tacccgttagggtttagggtttcagatgttatagaagatatatcaagtgatccagacgacatgccacatgatttctagtttatgtatcgtgtgtttaagactcatatactatgtggttaaaacttcagtgaacatgtatgatcatttatgtgtggtcatgactatgtattgtgtatttgtgtggttgagacttgtatgtggatgtgaatgaacaatcgtgttttaagacttatgtgttgtgtgttaaaatttaagagtggacatgtatgagcgtatgaccaattatatgtggacaagattgtgttttgtgtacttttgtgaatgagacttgtatgtggatgtgaatgaacaactgtgtggttaggatttgtttattgtgagcttttccgattacaggtaccgtttcccgatcaattttgagttattttgctcggatttatccgttttcgatatacaggaatttaccgaccgttatccatttctgactttcctgtttaccgattccaactgaacaaaaaattatgcgggtgaaaacggtgagaagttttttccgaccattaccgaccgctttcaccattacccgggtgtagtgacaaatgtgcaagggtcttcgcatctgtctcaacgggtgcgaggggtaaggaagctagttgagccgactaggatccgtgtaggtagttggaacgtagggtccctcataggtaagctaagagagttagtcg

SEQ ID NO: 196448 - DNA, 529 bp, Zea Mays
cacacttacccgtagttaggacgtcgaggtaccccgaccatgatgagatgcggatccagggcgagggaaaacttcgatgagaaattcccatccacccacgacatcacgagcttcgattcgacttcgattatcatcccctcatgctggcgacgctacttgactggaatcccgaccccgaacgccattccccattggattcgccctaggcggctattacctcactgcatatggcggtacagcgaaggaaaggggggcggggacccagttttatactccgagaggtgtgcgagatctccggggagccatgaccacgcagagcacggaaatcacgggttgttggggaattgccacgagatccgatgggtgcggcaaggttgtgcagagaactccgtttcctgggcacgcgacgcggaggagacgggtctgacaccagggagcgattggggaattcgactttatactggagcagagccaagattgggaggtcggctagctagatttccgccccaggccgttgccgggggtcttg

SEQ ID NO: 196449 - DNA, 351 bp, Zea Mays
cttgaatccaccagagtctccgtgagatcgtacacttgccgttgcctctgaccgagaagaagaagagagagaagcgagaggcgcggcagcgattgggggttcgcttccaccgccgattaacccgaaatatggacctgggggaaggaggagttggatgtgtggagggtggacatcgtgatccatcggctcggagggactcaggtcaccggaaaatccccgtcgttcgtgcgtaccgcggcggagccgcttcgctctgtggtctgctccgtcgtcaactcaaccgcgagtaagtactcccttccagaatttgtcgtggcctcagcatcggttagcaactagcgcggcgagaaa

SEQ ID NO: 196450 - DNA, 578 bp, Zea Mays
gcgaacgggtcctgcgccatgggtaggcttcgcccatgcctcaaatcccggtaaatcacgctgatgttgttcactagggcgtctgcgtttagttgtttttgtgggtgattcggaatgctagggtgccgtttggccatgccgccgacaatacgccgcggtggcgcctgtgcgccatggtggttcgagtagcttggggggagagagtgaggtgatgggcggctggtgaccgttgatcttgtgactgacggccagtagtcgatcctgaataccgtttgagcagggtgaatggtggtcgtcaatctttgatcgggtgggtctgtgatggcaccaaccattttgaatcctaaccgtgaatccaagatccgatggtttgcgtcacgtaccagttttctggggcgaggttatgatctgggtcgtcgatgcctgattgtgtggcccaagacgtacgcgcgttattcggaccgaagcaaaattgttaaagagcccctctattttggaagaattgacccgccatccacccagttcatggaagataatagtggggccctcggtttttacaaaacagcccttggtatttg

SEQ ID NO: 196451 - DNA, 718 bp, Zea Mays
gtccgaacagcccgcccaattggcatcagagtgaacaaccaactcagtttgagaagttggtcgaagaaacagccccagatgcaaagtgcctctgatgtattgtaggatgcgcttgagggcagccaagtgtggttctcgtggatcatgcatgtggagacaaacctgctgaacaacataagcaatgtctggacgggtgaatgtaaggtactgaagagctcctgcaagactgcggtaattagtgggatctgaaactggagtgccattagaggggagcttggggttcacctcgactggtgtagtacatggcatgcagtcactcatatcagctcgctcaagaatctcaatcatgtactgatgctgggaaagatagatgcctgaggtagagtgctgaacatgcatgccgaggaaatggtgaagtctgccaagatccttcgtaggaaattattgctggagggcactgatacgtcgtagtgttggcagggaggaggcagtgagcacaatatcatccacatacagaagaaggtaggccatgtctgcacccttgtgatagacaaacaaggacgtatttgttttacctcaatgaaaccgagctgcagaaggtgagaagcgaatctgttgtaccatgcacggggggcttgcttgagtccataaagagagcggttgagacggcatacataatctagatgagtggagtcttcgaaaccagtgggctgagcac

SEQ ID NO: 196452 - DNA, 1376 bp, Zea Mays
gaagtgtttaagtgttaaattaatagatttttccaattttattgcgcccttctactgttttctgtcaatcttttaaccattaggggtttagtgtagcttatggtttgatctgtttctcacttctattttctattctcaaccttttgttatcagtggagcaagtagacccaacagttgtggagattgtggagagatctttggaattctgtctcttacatctagaaaaatcatcatatgtgtgtgatgactttggcttactggtaagttctgtttgcttggtttcagttagttggggttaccattctgagtttctgaccttcaaagaataatttgatttgctgttgccattttgtttccatctttgttgagccagcattctgcatagatacttggaagtctgctgcattcttttgttcttgatttgttacaattatgtcatatgattgcagaatgaggttgcctgttttgtggaatctgtgttgcttaaaggtaccctcaataaggtatcctcattggaacccagcattataaatgacatcattgagcagtggacatctgtccaagctgaaactgagcgcatgagcccacaagggaaatatttctgctatctaaaaggtacactcctgaggcctttccatgcgaagggaatcaatgcactgtaccttttcacttgatgagttctcacttaccttcaattctttcttaccaggcttcaactgctcgaaaagtgaagatgaccttaaacagtttcatttggccttattaccagaatacttgcagcgagattatgttattttagagaattcccaatcatgcagtgcagtatctccaaatgccatggtgccattagcacagcattttgcggttgctcacttatgttgtatgccacgccttcttacactggttcagaagctttgccagtctcccgctttggaaatggttgaagatgtaaacattggcttgaggttgtctttcgcccaaaggattttgaaattagtctgtggtctcactattgagtttcctcctgatgcctctgatgccatgatgttatcctcagtagcgagatgtgctgatagtcttccagccttgtttagactgaggttcaatttctctaatcatgacagagtcttttctgtagatggtgttggcactatcttgctgcagatactggaagaatttttacaggtagtgcaaaatattagtgtttgcaacagtgatatctgttgtacagttaaagcatgcattctttcatccatgctggaaatcttcagtcctaatatatggagatatgaaaaatcgggtgcttgcttggtgcctcctttatcttattctcctcacgttgttcaatttgtgctgcaactttttaaagacaccaa

SEQ ID NO: 196453 - DNA, 340 bp, Zea Mays
cgtatagattatataatagagagaccaagttcggtgtcgtagtttgtcaaatgctcccctttctgcttgcgtattgtaccccttcttttccgtactgaacaattcgtgctcggttgttcagtatggaacacacttgtcgacactggagcagggtttcgtttcatcatcctgcgtttgcattacatcagttgtgcagttccagttccatttccacgccaatctactaatcgctggtgcttccatcctttcgcggtgccatactgtcatgaaactgcagctgtcactttggccaccttcccccagcaaaaagaacgcgagcattacctctagggccaggcgg

SEQ ID NO: 196454 - DNA, 375 bp, Zea Mays
gagatcttagggcagaaatcctggtctaacaggatgttgtgtggcttgatgtcaaaatgcacgatccgagtgttgcatccccggtgtaggtattcgagccctctggccgtgccaatcgctatgtcaaatagtctttcccagcttagcaaattctcactgttcatgtcaccggtgaaggcatacctttcgagcgaaccattgggcatgtactcgtagatcagtgctcttttcgacccttgcaagcaaaaccctagaagtgtcacgacgttgacatgagaagtcctgctgatgctagccacctcgttcatgaattcctcgccgtcaccttgggtgtccttcagcatcttgactgctacctgtcggccgtggaggctg

SEQ ID NO: 196455 - DNA, 458 bp, Zea Mays
tgctagaacaatggatcagtttagacttatgcaaaactcacaggtgacagacaatgtttcacgatggaacattgaatgccagtgtgctccagatgcacaactcacatgtgacaaccatgctacaataccagacaaggctccagatgcacaactcacaggtgacaaccgtgccacaataccagacaaggcacaggttgtagagcctgcacatgcagagcaggtgcctatgcagtcagaaagagctgcagaaaagacatggcagctgtgtcttaatcagctctcgcacattccttcttttgctccaggtgaacaactaacagacgaaaaggttgtagagcctgcacatgcaaagcaagtgcatcttgctcagctctcgcccagtccatcaagggagagggcccgtctcagtcagtttgctcaaggtgctcaactcacagatgaagaagcggctgcactag

SEQ ID NO: 196456 - DNA, 1178 bp, Zea Mays
gcgccgccgagcgtccagcgccgacccaagcacgtgaggagttggacaccaccgagaggaactctctggtcctgctcgtggtggtcgtcgtcatcgcttcccgggcctgagaactgtggtatttctcttgttctgaactcaccccctgcctttccataattccatctccggttcaccccgcgtgatctgtctcgtgcggcaaggcgtacgcgtcctttccctcccgcggcaaggcaacagccgccgtcgccctaagccaggtgcccaggtattcgtcggtcccttcgccaggcctccctcgcttgccgccaacgagcacccactaggtatccgcaacctccctctcccattcatgctgtgcgaaaccgatcacccgattcatgctgtgcgaaaccccatccgaaccctcgcttaagctacttggctatttcgtattcggatctgatctaattacgagtgtatacacatgcttactaacttacaacttcattttttttggcaaaaaatattgggcacccacgtcctttactgggtccgccccttgttcttcgttagcgctcaattattgttctgcacttaatagctggcgttctcactgcattgtagaatatgcgctaaaagtaaacatcaagtacagagttacatgaaagtatgttacaaaagttagataaaggaaaagtgaaagaaacaatgaaaaggggctaggaagtaggaagtacaatataattggattcggcagttcggttcggtgacaccgaccttgaagccaatcagtctatgttttgagcctcttagggaaccctgaattcacatagctctattatatctttaattttctatttccatctgttgtgcagactgtagactacaattgcatcctgaagaataaaatggaccaacatgattccatggctgactcaccaaggaggcggcacaaccttttgcgtgacaaggtccaattggtgaaaaggaaagattcagatcgctatgagatcgtccgcttccatgatccactgtcttttgagaaaggcttctttgttgtgatccgtgcttgccagcttttggcacagcacaatgacgggataatatttgttggtgttgctggcccctctggtgctgggaagactgtgttcactgagaaggtggtcaatttcatgcctgatgttgctgtgatatca

SEQ ID NO: 196457 - DNA, 521 bp, Zea Mays
caaacatccacttttactccctataagtaggccatcacttcttgctctactaaacaaaattgcacaaaagcctttcggttcaactaattttctcaggtctcatcagtaagtaacacaatttttatttgtattaagagtttcgtttttttttgttttgagagaaatatttacctttcttatgagacccaattaccatctatgtttcatgataaattggtgtcacaacagtgaagcttcgcgtgttcatcgttgctgtcctgattgtgatcaacttgggcacctgcatggcaaaggttggatcttacggcacaactgtgtcagcgtcaccgaggcaaatccgagtacttaccgccgcaactgatggaagaaatggacctcccagcaatgatcaccagtgcccgctcgggacctaccccaattgttaagcaatggatgtatcaaaacactgaggaacagctcaaatacgttcacgaaaattacacccgtctgtgctgttaggggagcatgaatatcatgaacat

SEQ ID NO: 196458 - DNA, 437 bp, Zea Mays
caaccacggcgaaaggaaaaaaaattggagttgcttgacaattcccattagaaagggaggaggttagatggagaagacgtacatcttattgacgatcctctggcgcgcctcgggctgaagctgggtgcgccagtcgcttccggtgggggcagccgcgttagggtcgacgccgccgacagcagcgacggtggcagggtcggctccctgcgtgggacgccagttggcggcgccgtccatggctttccgccgtagagactcgggcgcctcttttgctctttctgatctggttgctgacttcgatcgatctgcggggcgacaatggagggagcgctggcttcgttcaatcactccccagctcctcgctgaagacgacgaaatcgattgtagcaggggcgaaggagcgaccaagaaggagctagcgacgagcggacgacgac

SEQ ID NO: 196459 - DNA, 328 bp, Zea Mays
ctaccgccggtatgcccgccgtgttggctttggtgtctcagtaaggaggtcttcgttctcacgagaagggacctgcttatatctggagcttatgtgctgcaaaggagggaggccacgttatgagccgaagtttcggaaaagggcttcatcgaccactaactgcccagccaaagtacgagtgaagttgtggggagataaattgttgcatatagagttggcgatccttgatcataatcacccagtgagccctgcaatggcaaggtttttgaactcttataagcagctctctggccctgcaaagaggcggttgcgtatgggtggccctggg

SEQ ID NO: 196460 - DNA, 895 bp, Zea Mays
ttcggtcgagagaccggatatccctgcgcactgcacggctgcaaaagcgctgcaaagggggagaccagaggtgtgccgtgtgcatgcatccgcttggcggcacacctcaagatagcaaaaccatttcatggcaagaaggccaagatggcaggaagagttgccagggagaagattccatgaggcctgcagggctgcaaacagcagctcggagtagttaagcttccctttcgtcagctcgttccggccttccgcgacgacgacgtcgaggcggcagagaaaatctccagtggtcccctgcagctggagctcccggaattgaaggcgctcggcctgagccttacggatggccgatggacgctacggccagtgtttaaggcatggtgacctccgcatttagattttagtgcgtcggattcgaatggttgcaggcaggcagtgctttcaccaggccgccacggcgccacccgtcatgaactccagcgtagcacggttggttagcagacctgtagcgacctaatctgcagtgttgccatcttcgctggccgctgggttgtgttctgttctgttcatgccttgtactctcacctagggacggacacagaatgaaatgagagtgagagcacacttacaacaacgcgctaaaatgttagagtgagtatatctaaattaagcttagcaggagatataatggtcaaaacctagtctttactacttgcaagttgcaacacaaaaatgaccggagcctattcccttaggtccgcccatgctctcacctcctgaagagctgacttgaattctagtatctgtcgttattctcgtcttttagaggatttggtgttagagaaactcgcgaattttaaataaaaagggacaaacagaccggcaaagatcaaag

SEQ ID NO: 196461 - DNA, 955 bp, Zea Mays
aacttcaaagaatggctgaggagattattgttctgaaaaatgagaaggtatcactgcagaaggaggttgaacgggtggaggagagatcagcattgcttagagagaagctgtcaatggctgtaaagaagggcaagggtctggtacatgagcgtgaaggactcaagcaagctctcgacgagaagagatctcaaatagagaatttgaaacaagttttggaagggaagagctctgagatagagaagttaaaacatgctctggatgaaaataagtctgtaacagagaatgtgaagcaagttttggacgggaaaaacactgagattgaaaggcttaaacatgctctgggtgatagttgcgtggaaacagaaaacttaaaacaagcttttgctgagaaaacctctgaagcatataaaataaaacaagaactggatgcaaagaacatggatattgagaatctaagaggtgcgatagagtcaagagaatctgccatgacagatctcagagagcatgttgaacatctattgtcgtcgcaggttgcacgtttggaaaagttgcaagtagatattgttacccttaatgatgaaaaggtgaaattagaaagcatgttggaagaagccagagcttcctgggacactcttgctgattcaatatcaagccttactcttcctattgatcagccttttgaggggcctatggaaaagtttagccagattgcccaatacatccaggaatctcaagttgctaagagttctcttgaaaatgagctacagaaagcaaatgagcaaattaccttacatgctagcaggcattctgatgccctttccacaataaacatgttagaacatgagttgagtaaactaaaagatcatatttcttccatttctgaagaaaaacgtcaaatgcagttaaatacttctgctgtacaggaggagttggagaaaacaaacgaggaactggc

SEQ ID NO: 196462 - DNA, 420 bp, Zea Mays
cacacttctacccatacaggtagtgcttcgatatttttagagcgtgcaccactactgctagttcaagatcatgcgtggggtaattcttctcatgagtcttcaattgttaggacacatacgcaacaacttttccttcttgcatcaacacacatcccaatccagtgtggaagcatcataatacatagagaaccacttgtgaattctggtaggattagaactggtgatgtggtcaatcttttctttaagtattttaatgcatcttagcacttttgggtccacttgaactcgatcttctttttttgtaaagttgtcatcggtctggcgatctttgagaagccttcgatgaaacactggtagtatccgaccatttcgagaaaacttctaatgccacgaacatcttttggtgctttctagtttcac

SEQ ID NO: 196463 - DNA, 376 bp, Zea Mays
aaggtggcaactgggatcctcatctctgccagatatcatgtggcaagaagctccgatgtgggcagcatgcatgccagctactctgccacagtggtcattgcccaccctgcttggagactatattcactgatctcacttgtgcctgtggcagaacttctctcctgccacctctgccttgtggaacaccaacaccatcttgtccacatcagtgctcagtgccccagccttgtggacatcctgcctcacattcatgccattttggggactgtccgccttgtattgtgccggtgatgagagaatgcattggaggacatgtgatgctgaggaatatcccttgcggatcgaaggatatcaggtgcaaccaaccatgtgggaa

SEQ ID NO: 196464 - DNA, 370 bp, Zea Mays
gcatatgatgagaaacaaaaagaaagagatgatatccgacaaggaaaagagtagtatttaaaatgccatccaaacgtaaacaaaatgttattccaatgttgcatgtggagtttctcagctagtgaaataatgagcagacgtttttgctgcaccaatctactgaattatctacggggaagaagtagaatagaatcctagcgtcgctgactcattgctcatattcacaatttgctgctttagtcctagggttgaagaccacaagttgactgcgcgctttattcatcagaatcttctgtcctgttgaacaagaactgtggaatagaagctattttggggaggttcagaagcagctcatcgagagaatcgtttc

SEQ ID NO: 196465 - DNA, 654 bp, Zea Mays
tttgctagtgttcatcatgttcatccagacaccttggagctaaaggatgtggttgtttatcgttgttctgcttggtgtttggacacgtccctggtgccagcttcgagagagctttggattgtcgagcctccctttgccgttgatggtgaatcctctgacaggagaacgttgatgtacccaatccgcatcacattctcgtctgccccgtggcgggatggatccgatcctatccctcaggctattgcaatgggcggtgataatatagggagtgtgcagcagggatatccactttcaagacctctgcagtcgcgtcacggaggtggggaagatggtcagtcaggacgtcgttcagttcatgatcgtttgggtccaagtctccaagagatgatgacatgcagcagcggaacctgagctatcagaaggtaatcagatttaatgaggacagtggaatccggtgggggatcttgtctcctgggctggaagagatggctgaagacaggcaagacaaccctgatgtcgtcaatcctacacttgagaaggtgaagcagctgaaggtttactctcgtcaaaggctcaagaatgtcttgacattggagggggctggagatcccaatcctgccactgtgcttccaccctccccctcagacgtggcag

SEQ ID NO: 196466 - DNA, 330 bp, Zea Mays
ctacattgtatttatcatatctgttgtggctcagaatttgatggtgtgccatgcaggtaaactatgttgaacctttgctaagttctccaatagtaagcgatgctgcattttgtacaatgttgaggctagcacgttgcacagcccctcctctttgcaattgggcgctcgacattgctgctgcgattcgtgtgatatctgttggtgattttgaaatggttttggatcttacacctgtgatcatggaagatgatagtaagaagccatcatctggcatctttgaacaaatagtaaatgggctgactattgcgtgcaaagcgggtcctcttccag

SEQ ID NO: 196467 - DNA, 718 bp, Zea Mays
gtgagtagcagtgtgaatgctcttagcccagtaacaagtaggaacaaatgcctaaaagagcaaagagcgcaatatgttgtcgctagtgcgaatcatgcactcagtcttgtccttctaagaagtataggggtatgacatctggagctagacatcatgaggggaggaaaagaactggaaggagttatcaaactcacagtccttgtcatactagacggtcttaatagtacaaccgaactgagtggaaacccaagcgaataagtgcagaagagataaaagtatcagacttggaacgcaaggaaaaagtccacgaataatgagagcaatcatcaagaaccaccagataatatttataacctgaaacactgataataggagagatctagatcacagtgtatgaggtcaaaattatgcacaacctgagagaagctagggagggggtcgaacatgatggcctaactgacaggcatggcataaatgctcagtggccctaatataagaaatgattgaactactacacaacttggacaacacatgagggctaggatgactgagtcgacaatgtcaagtgctagatatagtgaaagtagccagtgtgtgcaactgcggcgaaggtgtagcgaaagcatgatgttaaggggtaaacgcaggcgagaaggctctaggtagcgagatccttcacggacaagccaaaaggatcaaactcaatagagcaagaatt

SEQ ID NO: 196468 - DNA, 465 bp, Zea Mays
aaaagactctaatgtagaccacccgtgcaccatggttctgcctctagtcaatcagtaccgtccgtatcatccgacgactcctatgcgtcgacccgcccccctctccccgctctgccactcccgagacgtcgccactccacccctccaattcctcgtttctcacgctaggtagggtttcgtcgcctccgtgtcgccgcctccgttaattgttcacgacgccgcctccattccccatccgcaccatcaccaaaaaacacatttcgccggcccgaactcatcagcctccacgctgttcatggaaagtgcgtcgttcatggaaggtctgcatccgctctgctctctaccgtccgctaatctcacgtctgcgcgtcgctctcttctaccctctaatctcgcgtcgtctcctccccatgctccatctcctcgccctcctttgcgtctggcgctgtctcttccctgtcctcc

SEQ ID NO: 196469 - DNA, 945 bp, Zea Mays
cgagaaggagctgacgttcagcccgactttcactgactatgttaaaatcatggagtcggtgaagttggacaggagcaagaatttacatggcgccgatggccagagtttgaggagaaggttcgcgggtgatggccgacaaaggaataggaggtctggtgatgcaaggaataaatcatttgaaaggaatcaggggcctcagagggacttggcgaaggatgagaatcagaaggatgttacaggctttgtggataaaagagcaactggtcatgtaaaaagtagcaatcgcaggcaaggggaggttgaagactatgcacagagaagaataattcgtggtggtacaagaggaaatggagacaatgggcagttctcatcacctgtgaaggctaaagatactaggggtagtatgtctgttcataggttggtgacgaacaaacagactcagtcagttgcagggaacgatttacaagggcgagcaacttatactccatctcggacttctgcccttccaaatagcagtattccatcaaagaatgctaaggttcaaatgagaaaatacgactatactatgacaagtagcagaatagacttaaaatatcctagagagacatttcccaatactgaggtcaacgctgacagtaatgttcaaagaaatcagcaaagagtggagaccttagggagaaactttgtagtacgtaggtttggggagattggcaccgactctaagaagtctaccgtaagcaaaatttatgggagtacacaggcaatgcctgagcatgatagccattcaagtgataatttggagagtgatgaacgtaggacagttcaattgcatagaggagcaaatgttaaaatggggaaatttgttagtagggatgctgaaactacagattttgatgatagagctgctttcaaaacttttgaggtatttactgatgtcaggaatag

SEQ ID NO: 196470 - DNA, 858 bp, Zea Mays
gataagctggagagggtccaccttgtgctcatcggattgcagagagattgagagagagaacgtcgtggttcgtgcggctggcgcatggacccgccttgactgcggcaccttctccgcgaattcgttgcaacagcgcgcgcaatcgtgggggtctgttgggattcaccctcctcgcatccggatcgtgagttcgttcatcaaccaaccccctgcccctatataaccatcaggccatgattccttgcctcccagctccgtctccatcatcttctaggcagagcgagccaagaagggataaaggagttctgtcccgttgtgtgtaaagggggtcaccggcgtggaaccagggccctgctgccccatagccttcgggacgcaacctgggatgatctccggtgcttgtggcgtctgttcgcggtattggaggaatctccagagttttggtaattgcttgatagtgagctcctccgctgtttcgtcatggtgtgccatgggtggggtcctccgcgctgcacccttcggtaaggacctcccttctgtgcattagcgttgactctagctttgcgtggatttatcgatggggcagggtagggcgtgtgcttgtggtcttggcaccgtgggcgagtttccggcgattgcctgtgccgtggttgcgtctgccggttcggcgcgcgattggtccctggtctgggcggcgcaaggaagaagaacatgcccttgccgtcggatcgagatggatggtcgagattgaaacagccataccctttcgcttcaagaaaccgtgttcgtggatgacgaaatcgacggtgtagattaggtctggatttaccccttcgcgcgatctgatctggaccttca

SEQ ID NO: 196471 - DNA, 902 bp, Zea Mays
atgatcaacatcgaagcgcttttcacccaataatttgcattttaacttagacctcccatgagcactactacttttcatccgcgaccataaccatacacatttagaccacaacaagcaatttaccgtgattacgcgcttgaccaagtcatctaacaagtcggctaactagagcaacggcatagcccgctatacatcctacacgtcggcttgcctcttatcattgcaatccgaaacaacacatatatatcaaacacttaacgaaatcgactcctatttaacatgagttggctaatcacagtagaagacctagcgaaccattttagacatcgtaactcaagaacatgggttggggccgattgatcagtgtttctcaaccattgctcaacttgaattagttaacacacaagtcacctaaatagcacatttttggggtctatcgtggaggcatttacacatggcgtaaaactccataagactacatttgctactggcatcaacaatacctaccgacctattattcaccatacgaacgcaggttacccgccgcttactagtttttaacataatcctcatatagctcggaattccaactactcactaacaataaattacgcacgaccactaccacatcgacccggttaatttatttggacaccgcctagcgtaccactagtaccccacattttgattcaaggtcaataatacatcctttattcgattataccacagtgacctaagcgtcgtgttacccaatgtgtacatcttttcttgttgcgagtataaccatatcacggcatatacccgcacacctcaaacaaatatctcacgccaccactaccatatcacaccacagcacacacacacatacgtgcactaattaaatcctcgcatcccatgtattt

SEQ ID NO: 196472 - DNA, 576 bp, Zea Mays
caaaaacacatatttcatatgtacgaaacattaaggaaggactacctctcttcctcttcaattatgatgatcgaagattgtatggtatttacgaagcttcagggaatggaaaattctgtcctgaatcaaatgcatggtcacaagatagcaagggcaaaacaagctatcctgcccaggtacaatcccttgtgtctgtactttgaatgccatcttatttttcagtctcagtaaaatggcttctatattcacgcccttttatttgtttaggttgcaatgcgggtaaaggtgtggtgttttccgctagcagagaatcagttcagaaatgcaattatagccaattactaccagaaaattcccggtgtccctggccagaagcttcattttttcaagtttgaattggatcatgctcaaacacgtgttttgatggatatgtttactccttctccttctcccaacagtttctggacgccccctgctgcagcaccagctgacgagcatgcgaaagaattagtgttgtcacctggatgggcaccagagtgtgaagggaacaataacctcaaatcagaaaaggttgtc

SEQ ID NO: 196473 - DNA, 636 bp, Zea Mays
ccaacctattttgtcatttcagttgattggtggcttgcatatggtggtcgaaccattgagttatataagtttgcaagacgaattgttagtctttgtgcttcatcatccggttgtgagcggaattggagcaagtttgaatttgtaagttaactaacatgatcatattacactatgcaatttgtagttgttactcctttatttattgttgtttgcaacttgtagatgcataccaagaaaaggaacaggctagagcacaaaagactgaatgatttagtgtatgtttcatacaatagaaagatggccgctaggttccaaaaaatgcgtgaagaagggaagaactttgatcctttggttcttgaagattttgattaggacaatgagtgggttgatccattagctaattcatctgttgttggggatgaccctcttttcacatgggagcttgttgatcatgccatcggtgcatctacacaacttcaaggccgctactttcctaggagagctcatggtactcaagtgccaattcttgaggatggtgaagatggtgttgatgagggtgatgagaatgaagacgatgacaattttgtgcttgacgaccttgatatggatgatgaagaagaaacaaacaacagtggt

SEQ ID NO: 196474 - DNA, 653 bp, Zea Mays
gcccccgtccgtcgccgcgccaggacgcttacccacgcgggaggtcctcttcctcgcccgctttgcgctgctgccttctctccgctcgattccccgctgcctctctctctagtctctctacacacgccttcctcccagcgccgcaccacaccatcagggcgggcagcacattcctctctctctcccactcccacttcttcatcctccgccgattccagcactacgcaggtgggcagggaagggatattttctgctctggccctatttctggacggctggggaggcggcgaggtgacgtggactggcgccgaagacttgcgtgagaggtaactggaatatttctcctcagctgctcgcttcaccccggcgccgctcgtgtaccctgctgccgcgccgctgatcgggttgacctcatctgcagatccctgatcggttgccgcggctgagttgggaggcccggagaccttgaggagcgatgcagagggaggtggggccgcaggtggcccctccgctcttccttcaccagatccagccgatgcctccccacgccgccgccgccgcgaagaagcgcggccacccgtggcccgcggccggcgccgcggaggccggcgctgggaactggaaccccaggctgtgggactgggacagccgcg

SEQ ID NO: 196475 - DNA, 468 bp, Zea Mays
gttggtcctagctgatgctacatcgggtgctgagaaatctcgcacttcatttgaaattcatgctcacgagttagcagaagcaaaagcggcggcagttgatgaagctaacaagcttgcaatatgggtcgaaaaacatgcactggttcttgaggctatacgggagaactctgttgcgtgcattgagtcatgcatgcaattgaattgtaaggacaagacattgagccttatttcagccgtcctagaatcaggggtcccacttacagttgtaccagaaccaacaagagcgcaatgctcggaattggatagggagatttctcaattattatctgagttacagggtggactttcctctgctttagactcacttggtgaatattctttagtcttgaagcaagttcttccggttaactacatcacaaccagtccggttactagttgggcgcaagtcttgcagcgatctgtaaggag

SEQ ID NO: 196476 - DNA, 559 bp, Zea Mays
taaaaaagtaactattaaaaagaaatgaagaattgaacctaggacctgctacttattaaatcacatggctaccagtgcgccacaaacaagagtgtgattaatactttgatacagtacatattattacgtattattgacttttgtgtggtctcagctccacgtatccatccagcgccctgtacctcaacaacaaattctttcacgccgccgcaattgaatcaagaggcagcagcctccctctctcgtgacatcgccggtggtaccaatttgggcgccattgagggtgactacgccacctcgcctgtgccctcgcactcgcaggtaattgcggtggtgccaatttgggcggcagtgcagctggtgacgcctccctcgtagctccacccacaggttactgtcttgctcagatctgccctcattatagaagcaacatcgacttgcgtgcccacgacacaagctcgtgtcagtgctactgccaccatccctccacagcacagccacgctgcctgcctcatgtgtcactactgcgtcctatcctgccacaccggatagaacttct

SEQ ID NO: 196477 - DNA, 348 bp, Zea Mays
cccaagtcgaacaggttgtgggcatggcgaagttggtgttgctgtgcgcgagttgagacagcgcagcgccgccgctaccatggacggagttgtatgagccatattcgatgccggtggcgatgagctcaccggcgtggtggttgtcgagcaacgccttgtccgagtgggaggtgacgaacgcctcgtcggggtcggagtcgcgcaggttcgaagagatatcgccgtcagcatcacaaccctcgaagagcccgccccagttgtcggcgacgacagatggcgctgcatagtactccttgccgtcatcgaagcacccgccccagttgtcggcgatgacgacggccccaacag

SEQ ID NO: 196478 - DNA, 414 bp, Zea Mays
aaatttgtatttgacattagctgcaagttaattttggcaacataacttattatgaatttattttgcagcaagaggatattcggaacttcattgacagttctcttaagcatggacagaacttttctacctttcgtaaagatcggattggaggggattcccttggaatctcatactggtactagtttatttatcttgaatgtaaagaatttccattattttattttcatgcaaggccatgcaaaacaggtatgaagatgatgagattctcgggcatagattgtatcgtgaaattagacgagtagagcaggtcaagaaggagccaggaaagaggtctaggggaaaaggaggatcttcagctatttcagtcgtgtcctaccagtgggaaactgttgcgtccactttcgacgagtttga

SEQ ID NO: 196479 - DNA, 288 bp, Zea Mays
cctcggtgaggtccgcctcgccgtcagcaactcgggacacccctcgatttgcccttagcccatcttgttcgcccggtccacgctcaccggagtgtttccctgtgcagccagagtccatcgccttcaacccaaggcttccccacgtccccgccgtcgcccaagcgctcctatgttcgcactcaaggtgagcaaccttcctatgcacttatttcgtccgttactgccctagtgtccgcacaattcatcgccagagttgatccacgccaccgttagaccgcctcgccgtgt

SEQ ID NO: 196480 - DNA, 329 bp, Zea Mays
cggagctggtgcggattctggtgaaagcaaaggatcgtttctgcaagactctgaagctggagaaaaggatgtctaccttagccactcctgcatccacgacgagatactacatcaacggcgacgagctgggaggaaggagtactctgtcatgccacaagtgtaccatgagtctcgggaggatgcggagcgtgtaagaggacgacacttgttgggcatgtcatcttggcgtgctccgcacgagaatgccaggaagccaatacgaatatacctcaattatgatgccgtcgggcattcgcccgaccgtgattgtaaaaatgttggcgacatcg

SEQ ID NO: 196481 - DNA, 300 bp, Zea Mays
ggtgacgaaaagggaagcagattgactaccagcacaaccatgtcctcaagtggaagtctaaaagttcagatatccctagcacaggcaagaattgtcctgtgctttccatctgagttttcatgggatttgagccacccatctgtcctggataagttcctggtgatcgaccatacttcatgtctgaacatggtagaaactgcatcacaccctcaaaacgaaatgcaaaatgaggttcatcttagcaagtcgtgtacctcaatacatttggctgtaggggacatagatgtatatttggttaag

SEQ ID NO: 196482 - DNA, 531 bp, Zea Mays
ctccggaccaatattgttcctctccggaccaatattgtgatgatacatctttatcagatttttacatggatgtatcctccccagagtcaatatcctgtgagcagaaccagcctgaagatatttttttcaagagcgagtctagcactgactcttctccagtaccctctagcagaaattccaccacagaggatgctgataaatacttaggtcaaccatcaaaacagttgctggactccaaaatcgttcctttcagcaaccaacacacgtttaagaacatggaatatcaaaaacctctggtattggataaacaatatgcatatagaagcaacaactcttctattcacaattcaacaaaaggttgcttcagtagagatggggacatggtttctgatttatgtgtgctagagggtaataggaatcctgctcctgctcacctatggccttatcaggggaagttccatcataattttcagcaacctgtgtatggtaattccatcattcctgcatttggtggtacgagatacaaaccac

SEQ ID NO: 196483 - DNA, 367 bp, Zea Mays
ttgagacccaaacagtgtttagggaccgagttgacactctttaaaagtttatggacccggttaacactgagcaacaagtttaaagaccgaaaatatattttacccattgaaaaatgaaccaatcaaggataattgggcttggccttgttgcctagccatcgatgtgttggtgtcgtacgttgctacttgacattggactatatttagtactaggtgaaaaaaacacacatcttcaaataataaatattggcacatcaatatcattcccaccttttatatggtgtttcaaatggctcacccaacaaaaaaagtatgcctattttctgttagagtaaaatacactggtggttcctaaatttgtagtgtt

SEQ ID NO: 196484 - DNA, 2777 bp, Zea Mays
cgttgatggtggttagggtttcgccgcccgcacgctcgacctgctgaagaatcgcccccctgttgaagaggtctgcgcctcgccctataaggctccggggaagaggagatagacatcagtggaccccggcgcgcggctgatggcggagcaggagcggagggacgcggaggctgggggcgatgccgcgggcgcagcggtggcgtctcacaccagcagcatgcaggtgaggtctccgcaccctacttctcggctgtcctgtacgattttgggagctttatgatgcgtagatccgctcgctgctatttgattggctaaacctgcgtccgttgcgtgccttcattttagtttgttagtgcgtagtaggttctggaagggagctgtcggaattttgcatggaggcggtggggaatttctgtgggccaaccgtgccttagatccgagttagctgccgttggagctggtaaattattgttctgagagggattgggtgtgcttatttcttggtgaactgtagtaatgagcgagatatcataagacttggtttttttgttcatgaggaatatgtgggtatgtttttttttgttttttgtgctatccccatgctgctgtaccagcacctgcatgtttgggaagtagtgaggcctgctttactgtggagttagcctgtgtcacttggtttctcactctgtcagtgaacttattggtgatagtctcgatgtgaacagttcagcacaatgagattgacaatttaaacaaagacgaatgtgccctgagcatgatgtaatcactacccatatgccatatcatttcgtaaacgtggggcatacttgattgaattatattgatacaatatatcagctactaccattttgattatttctatgccggcagtagtatccttctatcttgaaaactgtagagccttcccatctcatctgaaatttctatacaatcaaaagttccagcttaggtggatgtgatctacattgataaacttaacatctaggaagtaggaacagaagttgttttgatttaaatttattgcatcatttgattatatgtaccggtgggattttgttcctctgaagccaaatatcccaacttcattgaatgtctcacttcattgtagaaaaacaatcgacttttggtagtttgacctaaaagaaagataataaaaggcacccatgatactccctttcagtggttgttgcgtatgtcagaaaggtcaaaacagcttgtgatacctgccagctgatctatggtcatatttgtatccgtagttaactagttatactacccaatccaagtatcggtcacttcagtattaaacaaacactgatagccatgatttgttagacattgttgcaatggactagagcacgtgatgaatgtttcacttgcacagaatttttattgtggataagaggcccttgcagcagcatgtcattaggtctaggtgcagcagaggtaccaaggatagcaaagtatgacagtagctgggcataatgtgggagagcctagagtgcagatctaaccacgtcaaaagtcctacaagtcttaacgttcatatgattagaccgaaattttgtttttaggaatttgcaaattttgattagttcttactgtgttagtcattggtccaacgtccaatgaatgtttaatttgtgttaactactagcctttctagggtatctatatcgaggaggtccacacgcataatataatgatgaagcattcttctattttctgtctctcgagctctctagttctctctaccaagctatatctgtctgtctcattacaatccttaaccccattcagccatgtatattactaacgatggttacaattctaactgttccagcgtgtcaaagtataccgtttggctgatggtgggaagtgggacgatcaaggaacaggtcatgtttctattgattacattgaggtatgaagaatttctttgctaatatgggtggtatttataatttcttattcatgggtctaagctaattctcatactttctcctgattttctttgatagtgcccaaatatttgtttgcctcttgatctactttagttttgctaccctagtaccttgttgcaacatgcttcatttgaccctcattctgtttctacaaataatgaaattgtcaactattcatttttttcactgtcaagggaacagtgtcccaatgtaaaactaaagaaaaccttgtcgaagtagacatcattttcatatttcatactgtaatggtgattcatggaacagtgtcccaatgtaaaactaaagcaatagtccactaaaaatgaaaataagcacaaattacttgatgatgattcatggatcaatatatcggtgtaaaagtaaagaaatggtccagtacaaatggaaacaagcagaaattacttgtagtctatgcctctatggcaccatgatattctgtcattgtattatgatttctaatctgtgtgcttactttttggaccttatatgatttattatttcgttggtttcagggttcgaaagaactcggtttgactgttttagatgaagatgacaatgagacgctacttatgcacaacatcacatctgatgatatttacagaaaacaagaaggtgaactaactcagtatcactctgtttttgagctaattcatatcttttttgcaacttcctaatccatttcttttgttagaaacaatcatttcatggagagatcgtgaagcagcgacagacttagcactaagctttcaggaagctgcaggatgctcctac

SEQ ID NO: 196485 - DNA, 350 bp, Zea Mays
ctccacgccaaaacgggctgcaaaacagcccacaaatcccccaaaccctaaatcctgactcactccctccaatcccacccgaaatttgggcatttggcggcggctctccctccaatcccactctcgccacgcgctctgcccgctcgccgcgcgcctgctcgtcgctcgccactcacctgcaggcttggactggtatgtgagacaactctaggaggaccacactgcgcttctacacttacgccattgatatgcaggtgtttgagttttggttgtgatggaaatgccttgtttgcagttttgattgtgatggaaggaggcagtgtacgggacaagggaaaacagccatgtat

SEQ ID NO: 196486 - DNA, 1112 bp, Zea Mays
cttgaccaaggtcttgatgccgatctgatgtctgaaatcgaggatcaaatccaacctttattcaatgatggtctccgacaacggataattactcttgtaaaggttggacctgatgaaacttgaatacaccatttgtatgccttttcatttttttggttcaacgaatttaattgggcattttttttttaaaaatcatggtgatgttaaggccacatcctgtaaactcagcactcaaagagcggttctaagctaaccttttgggctcaagtttgaactttaaacgcttaacaacatgtagagtagtgtacatgggcaggggtcgaccttttgcactaaattaggtgggcttaagttgcttttgtgttggcttctccctggtctcctgttccatcattttctttgcagttatatctgaagctagttaattccagctatttagtatggcttaaaaaccattttaaaaatgcaccttcaaaggtttagtcctttttctttgtgagtaatgatgactgaggtatatttaactttccataaaggagctgaacagggaagaaccagctggaattggcagtccaagctctgagcgttatgtgcttgatttcagaggggctcttgtggaaagaagggcaattgtctcgagagagagattaagtttgagccactgccttgccctttctgcacttattaaactaacgagtaagttaaaccttgtgttaaattgcctctatcaaattggcctttttttcctagcgcttgccaggtaatgttaattgttcagtggcatgagccttcatactgtgcttgtttaaccttttggacattccaatttatgggaagcaagcactaatgctttattcaatttcatttaggccccaaagaggttaaggatgtattttcaatattgaaagactgtgcagctgaagcaaatcaaaatagcagtgtggagctccaggtttgaagtttgaacaaattactctggaatgacatgatggttgttgacatgttgtttgtgtgcatctgtataatctgattttgatacacaaagttactaactttatcattgcagatcacctatggacttctgttctttcttgtagcaacttttatttctg

SEQ ID NO: 196487 - DNA, 482 bp, Zea Mays
gggaaggggcgccctactggagagcttcctgtgtcggctgttggtgtcccaagccagcgtccctgctgctggtcagccgcggatacaacagttgtcggaggtggggaaatggcatgggggcgccatggatgaggaaaggaacgacacatccatggaatgggtgcacaggtgcagaggagcagggtctcgcaaatggagaagaagatgggcgccatggaccagagctcagtagacgccgaggtcgataaagactaggggaaaccgacgaaattggtgaaggtgcaggggagccgagctctagggagatgagttcccatggcggtggctggctgcctaggggaagacgccagggaaggggagggtgtcgagcggaggggatggaggagggcttgggcgctgagagggtgcagggagggggaagtcgtgtagggcgccggccaccaggaacaagggagttgctggaggttgaagatagaagggcg

SEQ ID NO: 196488 - DNA, 394 bp, Zea Mays
tcaagaaccatcgttaagttcctgtatgtcacagtagcagcatcagctgtaacacatgttaatcaagagcttagtgttaccagaaaattggagatcaataaataaagggtgcatgtgtttcactggagcttatgcaccgccgcctgtttgttgattggtaaatgtatctttgcatcgattacaagcaattaaatctacccttcgatattcatgtcgttatatatagcatgcatgtgtgtgcttactatggtcattaatccaagcattgttcctggtgacagttgttaagcacaatttctgaaggaatcatggtaggggattaaattttctgataataatgtcatctactgcactcagcgaatgcccatatatatgtgtcgtcgcgacgtcgcca

SEQ ID NO: 196489 - DNA, 323 bp, Zea Mays
cttcaggattgggaagtgacaccatgcggttattagtccagtgattggagtagatggagacaatgacggtggctttcccttcactagcaacgtagatattacatcagatctcggtgtgagtgtgtatggcgagagggtatggcaagcattggttcacatgtcagtcctatgcctatttatgaatacggtgtgagggagggcgcaaccaacatgttcttacacccctgattaggacatgagcatggtgttcgactcggtcccctgataaaatggatgagatcaacatgacaaagctatcaccaatttgttaagtttgatttatg

SEQ ID NO: 196490 - DNA, 840 bp, Zea Mays
tgcaaagttcaagattcagatgatgtctggtatatcttctgtttatacgaagttatgaagtcaagctttattttctttcctatttccaagtgaacttgactaaaccataataattcacagctacaaaaatcctcataagagaattcatataaaacaatttatgttttttacacactggaaaaatataggatgaataattgattgccttatgtaggatagggtaagttgagatagtgattgcagaaattactacttgttcacagtggaagaacctgcgcttcttttctgtcatcatttgaagcttgggcaatctgttctgtttttatcctctaattacatcagttttaatttgtgtttcatttttggtttataatttaggtataagaaattggaatcttgtataacacctcctatagaggcagcacagctaaagaagtttccagagagactatctgccattcctcccagaattctggagggtcaggtcccagacataacagaagaagtctatgaggaggataataagttgtggaagaagcatgttaatacttataagagggtgaacaagctgataggttcttcaaggtacaggaatattatggacatgaatgcaggccttggaagttttgctgcaactcttcattcttccagttcctgggtaatgaacgttgtgccctctatatcagaaaggaacactcttggtatcatatatgagcgaggtctgattggtatataccatgattggtgagccttatgcttctgccattcactgtcgaatgagatgctgatgtttgggaactgatctcatgtttttttgcaacgttgcactgttggcaggtg

SEQ ID NO: 196491 - DNA, 380 bp, Zea Mays
tttatgccttgctccggaagtgactgctaaagttgataaaaggctattgcttccagactggttgcccaggctcttcatctcaattcgtgggttagagacatcagctcaccactctccagttggtattcagcagtacctcctctgatgggatgctttacaacaggtggtcctgaccaatgaagaggataaacatgaaccgaggcatgatgtttctggtcggttctcttcgaaatcctgctgtaagatttttctcatggggtccatcaagtttgaaccttggaaaagattgtggaaatctcccccccccccccccaatgcaagttgttcctttggctggccataacaaataaatgctgaacagctgacagtttacacaagaa

SEQ ID NO: 196492 - DNA, 4451 bp, Zea Mays
gcagtgcttgctaccctcagggaggatgaggaaaaagcttctgaggtgcaaccggaaggagatggtgctgttttggtgcatgaagaaagtaatgcaccggaacaacccaaccaggaagcttcaaatgttgttgctagtgaggtcttgggaggtcactcttctgacttgcatgaaattgaggtgatattggagggagatggattgaagattggatcccatcagtctgatgttgttttagaggttggagctgccaccccttttctaaaatctgagattcaaacaagtcagctctgtatttatgctgctgatggaatcagtgcagtaagcagcagttgggtatatactaccgacaaaatcaacgcgctaagcattttggaaagtagtgatgttgccttcttttatccgttattggtattaactcttaagtagcgtgaaagaattacatacatctctaaggaatacgctctttgttcaaacctgcaaatgttatactgcttctggtgctacgtaccttaatggacgaagtatccgtcatgcacttgtttatcagttgcttcttatgtccgctagctttttatgacatcctagtagggtaacacctcggaatgttatgtctgatatatttatagaagtcttggttcttttctgttattatctgttaatgcgtattggagacttgaagcgatgttgcaattttttgtacagcgttgcattcttactgagacgcgctcactaaataaggcagtggaaagcatccccatgttggaaactggagagcaagctactggtggttcaaagtatttcactatccgttgcatattatttatgccattagctatatagattctgtttgatgttgctaagcatggatttggtatgtcagctgattctgtagtcacttctgtattgcagccagaaacctctactagaattgccaaatagcgcttgctctactgctcatcatgaagaggtaataatcaaatgaggcttccatgattttcatgcagcatatgcgtttttcatgttttatttagtgtgatataagtaaccatgtgcttgcagttaatgtttcttttatcctcctccaggccagcaagtcggtggaagatggtaattctattgggattcaaggtgcatgcacttcaaggaatactgaagctatccaatgtgatgaaacatggtatgatgacaacatttgtgttgtttgcagaagtagggaaatctcagatatcctgaagtaagttactctgcagtctaattaagttatctctttttgatgggaacatatcttgtgctcaaaggggtactgtgctcatgtgcacattttaaatttgggactttcatcttgaatctaacagcagcaccacttttatgaaaatcccctcccaccatgggagcgaggtgaaagggtttctttataaaattgctgctgctgtgagatgcaagatgaatgtcccaaatttaaaatgtgcatgtgagcacagcaactctttgagcaccggatacgtcgccctttttgatccatgttattttcttaataccgaaatcacacaaatatgaacctatagaatcgaaagatggaacatgatcatgctaaaactaagcagcttctgtgatagaccccccttctaccagttgacttgatcacagttgcaatcttgtttattctttacgcaggcaaatggtactccgcattgtttcagttatctgtgtttcactagcactatctggttattttactcccatcattggctgacattataagcgataaaacatgctctagtcactatgcccgtccatcatatttatctgttcattccagatgtcatgcctttcataatatactgttgaaaatactgtgcatataaaatcagaagtgttaaaagttcgtgttagaatacaagtgagttgcccacctctctctatcagctaaagcttttgagttgaaatggttggtgtatgcaactcaatgtggtatcaaagccagaggtctcaaatttatatcctgattagcgcaattaaataaaaataatcgttattagttcatattccacatttgaggtatgagaggcttgatgtgagggggagtgttagaatacaagtgaattgcccacttctctttactagtttaagcttttaggttgaaatggttggtgcatgcaattcaatagtttgattaccagatttaaaactatatatgaataagtgttatttgtcttcaaagtatgactttgacaacaaaacttttgttgtatatttttggacatgatgcaatttgtgttatggatgtgtttttttttttgaatcacatttgttcattttcatgtgatagattcaaaatgataaagacgcctttagtcaaacttaaaatggtttgatgccttgatggatcttgcagtggtacttatttgtaactgtatggagtgaagttgtaggttattactgtcctgaattctgggagactacgtagctaggtttagagatattgtaggctaaagtttgagtttgataattataatattcagatttatgatgatagaatgtaggaaaaagtaaatgtaggcgaacctaacaaatccagaaacaagtggtacaaaagaatgcagtaaagctttcctaaaattgcctacttcttgctacaacaattttagaataaatacattctcaaacgagtgatatgattcatgggtgaacagtgaactctgtttcaaggttattgaacagtttttaggtgactgaaagattcgatatcaggtgaaagataaacatgtgtttttttatctcccatttcggttgtgcttctagaatttaacaccttatagtctttgtggttgatgcatctttcaaacatgttttgtggaacagttcatctctaataccatgctgtaaatgtgaaaattgtgttccatggttcatacttgatttgcagggatcttaataaaactaaaccccttaatataatgatacacagaaaaaaataatatgaagctctcccctgtcttcgaaaagaaaaaaaaactaaccccattttttaatttggtaataggtcttgtggtggaaaaggatgtaaacgacattaccatctttcgtgtatggatccttccttggacgtgtccctaggaatatggctttgcataatgtgtatgaaaaagaggattcagtttggtgtatattcagtcagcgagggaattgaatctttatgggatgtcaaggaaggtaattatatcttataaagcgtatgccagtttttctttgattgttatcattcatttattaattctatcgcctctccattttaggagtggtgaacagcaagcaatatttcgttaagtataaaaatcttgctcatgtacataaccagtgggtttcagaaagtgatatagttgatagcaccccgcaaggttctgatcttatctccaaagttagcaagaagattcataaagaaaaggtgattactcgtgtgatgaattccattgcttatctttttcacaggattttaggctctgcaaaagtatgcatgctgatggattcttttctgattttgatttcttagacaataaggtggaagcaggaatgggctgaaccacaccgtctgttgaagagaagattgcttatgcctcaaaaagaagccgaagttttttttaattcactaggtgataaatttgtatactgtaatgtcgagtggctagtgaaatggaaggatctgggctatgaacatgctacatgggaactcgagtcctcatcctttttatgtactcctgaggccgaggagcttaaaaggagctatgaggaccgctttaaaactgcaagaaaagcatctgatccttcaaaagtagacaaggtatgctatagaaaacatttatttgtattaactggcacactgcaacttcatttgagaagaaagtgattataatctgtgcattttcatcatctagggtatatgctcatccctttgctagtccacaacaatcaacaagctctattagttccaagcaagtttgtatttttctgcaattgtctgtcagtctgtcacattgctttgctaagctgccacacaaataatgagctctattagttccaaacagtccttagattgcttaaagagttcacatttcacaattttcagtgatgctaaactatctatgtgctatacaggctaagggggggatatttcagcaactcgagagactgccagatggttgccctcctggtttagacgatgaccatttgagatcacttaaccagcttcgtgagttctggcacaattcttgtggtgctattttcatcgatgatcaggtagaatagaactatctaaatatttagccatcatgcatgaaaaaggtatatggatttgttttattggcaccttccacttaagttcttggattctgtagatttagttgtgcttccagtttttgcttgtctttttatcagttgaggtctatggttac

SEQ ID NO: 196493 - DNA, 539 bp, Zea Mays
gttggcctgttgttttggtagtctataacctcccgccatggctttgcatgaaagatcacaatattatgttgtccttgatgattcctggtcctaaaagcccaggatatcgaattcatgtgttctttgagccacttttggaggaccttaaggatcttttccaaactggtatatccacatatgatgcatcgagaaatgagagttttactttgcaaggagccgtgcttatgaacataagtgatctacctggtttaggaatgcttgcttctcatatggttcatgggaaatttgcatgcccaccatgtggtgaaaatgtatggacgaaacaactgaagaatggtcgtaaatcatgtttcctaggtcatcgcaaatatattgatcttgatcatccgtaccgtttcgacgcaagttcctttgatggaatgatagagcttggcaaggagccttcaacttattatggtcgtccaattttgcatgagatcactgcacttggtaatttcaaggactcaaaaacttataagtcagtaagtagtttgttctct

SEQ ID NO: 196494 - DNA, 551 bp, Zea Mays
tgctcctggtgataaaaggaaaaggccaccttccaaaaacaagtaggctgcgctgtgctagttgtctttatgttttttttgttatcctctatactgtgtatcatgacatattctctcttttagggtatccaaaagtaacaagaagactccaactcccagtgctcctggcacttcagtccaacctagtgctaataatgtgaaacagccaagaccaatagctattgaaaccaacgacaacaggtgcgaaattgatcttcatataactgctacatcttggcatgccttctttgttctgggatgtttctgatttctaagaaattgcagttctgcgtgcctttcatgtttgattcataaagtggatagaaataagttctgtatatacaaatggctctggaagcggaggcccaacctaggtctaaaatgatataggtgagcgccagctagataactgagactaataaaaacaattgtagcagttctgacaagcgtggtatcaataacctcctaccaagggggcagtgaacaaccgtgattttttcctttgtctataa

SEQ ID NO: 196495 - DNA, 691 bp, Zea Mays
ttgcaaactcccattttttattatacagagtgttaacttaattgctgacatgatgccctgattattcttctaggtagagaacttgctgtatcatgggcattatgtgcggtttgccttgtgggacacatttctcacctttttggagttaatatgccactgatgcacgtcattcattccactggatttcatttgtctctgtcaatatttacatttgtcggtcctggtcgaagactaatacttgatggcctaaagagtctgttgaaggggtctccgaacatgaatacgctggttggtttaggtgctttgtcatcctttgcagtcagctcaattgcagccttcattccgaagctggtagctcctactctatttttccaaaagattttttttggtttgttgcatgctttgcagatattgttggccagtttcatcgtttaaactcctttagttaccctctagctctataatatgttccgttaatttgcatcatggcatatcgccttaatatgtcagtagcttgcttatatcgttccatttacctgcaggggtggaagacattttttgaggaaccagttatgttgatagcttttgttcttctagggaagaatctggagcagagggcaaaacttaaagctaccagtgatatgactggactgcttagtattcttccatctaaagcacgcctaatggtgga

SEQ ID NO: 196496 - DNA, 418 bp, Zea Mays
cttgatgccaggcaggatgatgagataccattaaaacacaattatttcgatgttttccaaattattatccaagcaccaagagtgatcaaagaatttagtccagcctccatagagctcgtcaccatgttaatcgtcttgagtcaccaatcgtcaaattgtatagtgggcggatcactggaaaatctgggaggccaaaatgtataagtagcaatggacattgagaagatgcaagaggccaagatgcggtggatcatctcacttttctgatcacatagcagacagcactccagatgtgccaactcctgtagagctaagcgatctgctgtacagaattgttatgggctactattaaccaatggaagaactggcatttcttgggggtccatgaattccatatcaatttccatggctcaaaggg

SEQ ID NO: 196497 - DNA, 516 bp, Zea Mays
cccgtgcgcatggtggcgctcccccgcttgtgtgctgtccccttcccacgtgccacgctccgccagtgcatcagtgagttcgatcatatatctagcaacgatttccaatttttagttccgtatatggtcatgttgttacagtggttgaaacaaatctacacgtattgatttaatttaaattattaaacaggagggcatgtgccacctatgaccccacctccaccagaagcatcaccgccggaatcaccatcgactctaccagcatcatcatcgtcaactctgtcagcagcatcaccaccgacaccaccagcatcatcaccgtcgtcgactaactccaccagcgacatcaccgctagagtcaccgccaactccaccaacaacatcgccaccggaaccgccgtcgactcaaccaccggagtcaccattgactccaccgccgacactagtgacggcgccaccggaatcaccgtcaaatccatcgtcgacgacagtagctatgccaccggcgactccatc

SEQ ID NO: 196498 - DNA, 424 bp, Zea Mays
gcttcctgatggtagaataaaggtctggatacatgttgctgacccaacatgcttggtcaaacctcatagcatcattgataggtcatttctgctcttctgttctttactttctatcactgcacttggtatttgttacaaaaccgtgtctcttgttggcagggaggcaatgcacagaggaacatcaatctttctaccaaccactacttttccgatgttcccagagaggcttgccatgaattctatgagcttgcagcagggtaaagaatgcaaatctgtaactgtatctgttattttaaacctagacgggaggtaattttctacttacaccccattttttgctgctttctgagtgggttcttttcttgtttcctttgagattgacttttctttttcttttttttaaaaggaatttcttaaaaatgta

SEQ ID NO: 196499 - DNA, 358 bp, Zea Mays
ctactctagtgaggttggaccgtgccttttgttgtgatggctggaatgacatttttcctgatgcagtcttgcaaagtttggcggctggggtctctgatcattgtccgctcctgcttggtttgaatgtggccaacaagggtaaacgcagattccattttgagagcttctggttgaaggttcctggtttgtttgatgcagttaagcaaagttgggaggctccggtgcaatctaactgtgccgttgagcgtatgttcatgaagctgcagcggctcagcaggtgcctgcaaaagtggggccagaggaaagttgggagcatcaaatcacaattagaaattgctaaagagcttctccatcgctg

SEQ ID NO: 196500 - DNA, 394 bp, Zea Mays
gttggactgccgcctggacgcctaggcgtaggcgacgccttttaaacagtggttgtcactctcgtcttcctttttccacttccacgtctagggctgctcaagcctttgatcttgttcattgtgatctctggacttctcctgtctccagcctctatggttacaaatactacttggtcattctagatgacttctctcactttctttggactttcccgctttggttgaagttcgacaccttttccaccctcacacacttcttcgcctgggtctccacccaatttcgtcgcccggtttgtgccctttaatgataacggtcgagagttcgacaacaccgcgtctcgctccttcctctcccacgacgttcagttgcgcctctcgtgcccttacacttctc

SEQ ID NO: 196501 - DNA, 451 bp, Zea Mays
gaataaattcgataaacggcatgaacataatcatgtgtcattagctttgtacacaataattaaaacactcttcgacaccaaatttccagtaacggtcggtatacatgattaattggtcaaaaaagacgacatacaagacgcctctgtttcgtgctcaagactcaaggaacttggcttttccacatccaaatgctgatcgaggccactttttgtacatgctcttgctagctaacagcatccaaacaaacttgaagtggacgccttaccccgacatttgcacggtattttcgagaaaaatgtctcctattgtcatgtcctatgacccaaccgtgcttatctcattctgaacatatttagctggagcagttcagattgttgagggcataaacttcaatgtcttaagatggcatcagtaattttagtaccaaatcaccccagtgcaaagaaccgt

SEQ ID NO: 196502 - DNA, 1807 bp, Zea Mays
gtttatttttttcatgtttaatatacacttttttcatgtttatgacagaagtgttgtacactgggaggcctaacagtagcatgggtcaatctttacgagaccttgagaacgaccatgcagatttccagttgacaccacatgatccccattctgtggttggagaagctaatttgccgcagcataatgtcccaagggacagcgatctgagtcctcttggcttactttggtctgagctggaagggcatccaaaacaacctctctcatcaaatgtacttggtgtaaatgaacgtagaaactccaagcctacaacacccaaggacattctacctgtaaacatgagacaagggccacttagcaggatgaatgaagtttctagtgtgcgtgatgagtggcctgcaaactttggacggctggacaatatgaatggccctaacatttctggcagaatccctcaggttgaagctgagcatcatttgaattttgatgggcacctcctgcttcagcagatcagacgggagcaacagcaacatcaacagcgacaggagcaattgatggcccgtagtaatttagagttttctggtgcatttcccgggcaggtgtttgattctttgcaccaacaccgacagcctatgaatcaacagcttcctgatgtagagcatcttttgagagtccagtttgaacttgagcaacagcagcaacaccaactccaacaagagcagcaccaacggcagctacagcagcaacgacaagcccagtttttgcaacgacagcaacagcagcagcagcaacagatgattcttgagcaattgttgcagcagcagctgcagggttctaattttggaccaacaaatatggttgatcaagtcttacttcgtgaacatgtatttaatgaactgcaccagcagcctcaccatttgcaaaggcagcatgatgcagctattgaacaacttattcaagccaaatttggtcacgggcttcatagggagcaccataatgatatgttggatgttctctcacgttcaaatcagagacaaatgcttcctttagagcagcaaattcttttaggccttcagcatgagcatgaacaacaacttcagtcccaacaattggcaaatgctctgcggcaacattcaggcagggaagaagaaatgcacttaagtggggtctggccaatggatgatgctgcccagtttatccgctcaggaaccagtccaaatcagagacacggttgtttcgatctcctggagaaccttcagagatcgtcatcgtttgatcatcatgaccatctagaccgcagcttatcgttacaggaacgattgcatatgggtggtctaggtattcactccctagaacgatctgattctttgcctggtggtggtcctggaccaaacacagatgtcataaatgccctatcacgccatcatggacttgggcagttggaaacacatggtgatgtataccctttgggtcaaatgcctatgcttccttcaggtgttcatcctcagcaacataggcatcaggaacagcttcctggttctcacataggaaggcgtgaaaggcactggtcagatgccaatggtcagttgcaaaatagtctaatgcaatcttcacacatcaaccagttgcagatggaagtggagaagcagaggaggaatgtggaaatgaacctttctgttgacaatccacatgcatgggcagccctaatgaataaagagaggaatgcagaacaagatttgagtgatatgattcacaagaaacttgcccttcaatcgcagcagtcccttggttttcctgatgtttctgttgc

SEQ ID NO: 196503 - DNA, 902 bp, Zea Mays
caccactgctgctcaaggcagtacgttcaggcctgcttccgcaggtgcagaaccagttctggagaccacacagttcacaaggccagtgcaagctcaggttgatcatagttaccgggtggtgcaaactccgctatcacagcttcctcctttgtcttctgtgcatcagcaggcaaatgatgcgcagaggcagaggtttggtgttcaacaagcgatgataagtgcagtaagcatgccagtggtgaccagttcaggcacaattcctgtggtggttagctcggccactgttccatcattgagatatgatgattgcacaatgtgccaaaaagcattgccacatgctcattcagataatattatccgggagcagggaaattctcgtgcaacaggcaaccttgaggcagctccaatgttttatagcccccatcaagacagtggatccaacaaatctagtctaggtgcaagttcaggaactcctacaaactatgtggcggaaccaagagctgggaacacagcagtgatgacacaatttaattcgactcttcctgccagaaaacctgcagttcaggcaactgcatctccggatacaggtgtgccggttcaacccaccgtgattcctttaccagtgtccagtgcacctgctccagatggagtatttgtcggtcattctcctcaggctggggctgaagatcctgtcaggtaccagcagcaactattctcttatagcatgcagccagcacaagttctagtgaatggcccacaaggcattgatgccagtgcatacaaggattcaaatcatccagcagcggaaccgctgagagaatatgcacacaatcttcttcatgactatgccagagctatcgatgttcatacgcaagcagttcatttgggtcctattgcaccac

SEQ ID NO: 196504 - DNA, 832 bp, Zea Mays
catatagcccaactaaacatcgatctttgtcaatttatggcttagtagtgatttttcccctttcccattcagacttgaacaagatgtcactgccaaagaggccttattgcttacagaaaaggaggcacacgacgcaacaaggaagactctgactgaagctcaggaagagagtggagaacttctgaagaaaattcatgataatgataaacatattcttcagcttcagtttactatacaaaggtacattattgttgctaggtttacttgttccaacatatgaatgttagagaatctgatatatatggaagggcctgagtctggcaatcttgtaccggccggctatggtatagatggatagagggaattagggagaggagtccggatcctatggatcctgtgtattattaacttccatagacataggggtttccttttgcctctcatcctcctctcatatatatgtacacagtctgtccctcaatgaatataccaatcattactccacaatctcattcacttacaagttacaatgaacttatgctagcttgcaggtagtcaaatttgcacctgatttttttgtctagggtactaattatttgcagaacagttcccatccctcaaatacttgacatataaagtcttatttttctttcccaaaaacaggcttgaggaaactacagttgcaaatgagaatttgctgttgagggagagggagcagaatgacataacaacaaaagcgcacaatgaaagtcaagaaaaatatgaagaattactaagcaaatttgttgatgttgacaggaaaatcgaccttcttcaaggtaccatagaaagg

SEQ ID NO: 196505 - DNA, 537 bp, Zea Mays
aagacgaagagcacgaagaaggcgctgaccgagaaggccatcaccgtggtcaccatgttcatgcccatgccgccggcgccgcccttggaatctgacatcgctccagcatctcagaaccggcgcggccgtctgcgcaacagccagaacgcgcggctggttcatactctttgggctgccccttgagtacatgggagattaaccggcttgactccaccgcgacatacctgggtggctgggcgtctgtttcctcggcacggcggccgcttcgcctccttggctgcctgcctgcctgcacggccgacgcgcgttatccgctccgcatcccgacccgtcgtaccagggtagttaaagagcaggaggacgaggaggaatagacgctgataggggcaggcatggcgacggcgacggcgacggcgagtgtgctctgccctctgcgtctgccgcgcctgtgggaagttgtttagtttttagctcctcctaatcgcgattactaataatctatgctcgcttgttgtcgaccgctggggacacggcgat

SEQ ID NO: 196506 - DNA, 544 bp, Zea Mays
cagcagatgatggttgatcggttgcctgcatgctgaacaactgagcttgatttgattctcctgtttgggtattcattagctctggcgcttctgcttgcggttgaggcggtttaatcttgtacccaaacatttttctggtccccttgttgttcttcattccattcagcagatatctatgtgactcatccttccttttcaccactgtcgaggttggaatcttgtcgttgacctcatccattttatcttcattgggattcatcatctaggtagggggaagaagggagagttagacaagatttcacaaggttcatgatatatacaaagggcaaatatgaaacaaggacatttagacatttataatagaaaggaagtgaccgctagcgtgaaacaaggatggtgttgtattttgacagggataggttaatgggattgtgttttcaagggaagactagcaagaaaacaaggttggcacatagattcttcgattcgactcggactctgccaactgagcaggtacaagaggaaaagggtagggagagaaaag

SEQ ID NO: 196507 - DNA, 284 bp, Zea Mays
gttgaaacacactaactatgctacaataaaggttataaaagtttggccaaaatagtttgttaaagacctcaaacaagccattccattggaggcttcctagagaaatctgaaattcagatttctgaatttcagcctctaactcaaaaccgagcgtgttcaccttaatccctatctcaaaaccataagctcccattaacaaaaatgtgctaaactaacccctctaccatatatctgaggatggcattgggattcgaaccctagacacgacaaaaccgaagatttgc

SEQ ID NO: 196508 - DNA, 365 bp, Zea Mays
agtggctagggagagaaaaccaggcatcgatgctgctcggagcgcctgctccaggggagctcgacaatggagggagttggagatggagctaccgtggggaacaagagaggaggatggcgtgggggagaagtggaggtggctgggagaaaaagaaagagtggcggctaggggtagatagataaaagccaagtgcaagtgaagggggtccatatttatagagaagccctagggttagggtttttattgggctgggttgggctggcccaaaatatttaatcgggttgcgctaattatttcccggaataaaaatgctcccgcagaattcgtctgtacacagaacagagtgaactagagttcggacgaac

SEQ ID NO: 196509 - DNA, 441 bp, Zea Mays
agtgcataggggaagtggccattttgaagagacaaaatggaagaatatcaaagttggagatgtaataaaactggagaaggataatttctttcccgctgatatgattctgctttcatctagctatccggatggaatatgttatgtagagaccatgaaccttgatggtgaaacaaatttgaaaattaaacaagctctcgaggtgacattggatttacaggaggacacaaagttcagagaagtcagacaaacaataaaatgtgaagacccaaatgcgaacctctactcctttgtcggttcaatggaatggagaggccagcagtatcccctgtcacccctacagcttcttctccgggactcaaaactacggaacacagactacatatatggggctgtcatcttcacaggtcatgatacaaaagtgatgcaaaatgcaacagatcc

SEQ ID NO: 196510 - DNA, 415 bp, Zea Mays
ggccaaggcaacacctgcagcagcctgcaactgcaatccttcactgtaggaggcttcaggttttgggtatggaattcgaaatgctcttccctctgttttgttggtattattctattttctttattctaagttattgtgttgttattatatcaaagtttataataggacttaccaactaaccgtatgaaaatatgatgataaatccctgcggttgatcactgacgcttcagtaagttatccaatttcaaaggagaagtctcaaggtttggaccccaatatgcgaggtaggtttgatggttttacaagaattcttcttgcatttgattcatgcttattaagaggtctattttttgcacttttgcagacaaagttatctattcatctccaaattttgatcccaaagttttcctttcgt

SEQ ID NO: 196511 - DNA, 310 bp, Zea Mays
tagacatacgattacgatcatcaaggcatgaacttgagatgccatactcggttcggcgagcgagccatcattgtttccatcactgtccttccattaaaatccacacgaaaacgattgcggtaaataaactcaatggtaaacagaaaaacaggtgaagaaaataggcatggtaaaagtggaatcgtagttcaaggaaccagaagcacggggactttggaactgagagcgagaggaagagctgtgggaagcataaccaggatacactgggataatcagacagagacagaatgaatgtgtttcactgctggag

SEQ ID NO: 196512 - DNA, 515 bp, Zea Mays
ccaacttgcccttgctaaagaaatcctccataagctggaaatagcgcaggatggtagagtgctcagccctgctgaatgctggctcaaactcagactcaagaaacaggcattacttttatcatcttgcaagagaactattgcaaggctgagagcgaggatttcatggctcaaagatggagatgctaatacaaagttattccaccttcacgcccgtcaccgtaaaagaaaaaattttgtggcatgtcttgttgatggggatcaaaacctaaccagccatgaggagaaagctgcctgtgtggaccgtttctacaccaatctattgggaaacagtatggacaggatacgggcaattgagttagaggctcttggaatgcccagttttgatctgaccgatctggaagcccccatttcagagcaggaagtttgggatgccatcaaatgtctgccctcagataaggcccctggccctgatggattcacaggaaggttctacaaggcttgctggacaattatca

SEQ ID NO: 196513 - DNA, 373 bp, Zea Mays
tttcactttccaaatttcttgttttatctttctcattttctaaatcaatgttcatgctagcaagtctatcaacaagctcatcatatgaatatgaatgattagtcacattagcattatatacctttgtattaccttgtgacatcaagcaatgtggtgtaatagatgggattgtagtagcgatatcatcgtccgagcatgaacaatcaccataatcatcaagtatggttgagatagaacaatcatttgcatcacttgagtttgagccagcaccatcatgattatcaagtgaacttatggtatgccttccatcattatcacttgaccatgaggtgaagcaatcttccacaaccaccgtgttgaggatgtgctccac

SEQ ID NO: 196514 - DNA, 362 bp, Zea Mays
gtacttctgacctttataaggtgcaaggtacccctttctatttggataaccagaatccacaagataatattttcctgcacaaacaaaaatatcaagttaaatacatatgacataaattaatatcgtatgatacaaaaataaaacatacttatataccttccggtggatgcgggaacctgtgcgcgtaagttatcaaagtatcttgtaatactctacactaccaaaaaatcaccctattgccacgacagatattgcaacaacactatttttgttgcattagatgttatttattgccacgacctttaaaagtggttgcaatatatggaccgttttgccacttttttgtgcattgcgataaccat

SEQ ID NO: 196515 - DNA, 292 bp, Zea Mays
cccaagttttcagggggtgatcctgtagtatggttggatcaatgcatggaatattttaccacttacagggtttccaatgctatgtgggtgtctattgcttcgatgaatttggaacatgttgcagcccagtggtggcagtatcacaagttgaggcatgggttaggtggttggcaggagtttacctcagctgtggttgctaagtttggtgctaatgcttatcctaaagcattgaggaggttgttggctttgaagcaaactggtacactggattcttatgtgtcagaatttgaac

SEQ ID NO: 196516 - DNA, 1526 bp, Zea Mays
ggagtgtttgcttctctgtcttgatcggggaggcgccatggcggacacccgcaaattcgtgctgcccggccaacccccaggtacggctcgctcctcctgtctgcttctcctccggggttggggttttgcgcgctccccacgggagagcacggagaattcgatggttttacggccacagatgcgttttcgtttcaagacggagagaaaagcaactgcacgtgccgtgtcgatcgaggacgagtcatcttaaatgctttattaagtacatctggaaaaagggccgtgcgtcccatgttcttgcagttgcacttgcagtccccgcgaaatttcaccctcttttttttatatctacaaaaaaaaaaaccccggtccattcccggcctttgcaaattcgctctatcgccccgcggaatttcgagctggatgacgggatgagtttctctttcatcggccacgtattttgtttttcgaaagaaagcgactggggctagtctctctctggcgttttgctgacttttccgaccaataattcagagcagacaaaaaggggtttcggtaccaagaacgaggagtcgaggaccgtatgcgagtggtggtggtcgcctggtcggagcagttgttggcgttgactaaccggggactaactaactaacctcgtcgtgaatgaatctgcagacatctcgcagatactgcaggaggctcagaaccggtggctgcggcccaccgagatctgcgagatactgtccaactacaagctcttctccatcgccgccgagccgcccaacatgccgaggagtacggtttctctccctatgttttttgtgctctctttaggtgcatgctgtggcttctgaacactggcctcataaatatgcttattaaattccattagcaatcgtgatgtatttatgctgtgggctatggaagagttgttgtctgctggcagcttggcatgggcatttcggctgtgtatatttctttggagtagctagtgatacagcttatggtaaatttttcgcttgctttgcgggctcgacaggtcttcctctgcttgctatgaagccatcgaaaacatgttctcattctgaaacagaaatctggcacaacttgatgtgttgggggatctggtgggtaaattttatggtaaatagtttgtgattttcgctaggcaacacaaccacatggcggttttcctttcgagtcattgctgatgatacgtcagccacgcccagtgtcctctttcattagttttttaagaagaaacgtagttttgtttcggttagcacaaatagtacaacagttacattatagccctacagtttgattgctcgatttggtcaaagctattcttatagtagtattagctctacagtttgattgcttcatttggtcaaagctattcttatagttcggaatgctggccctctcattggcactgattctcattacttaacttccatctgatcgcaataggtggctctctttttctatttgatcgcaaagtactgaggtacttcagaaaggat

SEQ ID NO: 196517 - DNA, 629 bp, Zea Mays
cagaaactgacgttgatagtcttcgacagtgctggtgcgccgaaggtccttgagatcagccatatcgttggaccgtagaggtggtccaaaccgcatacgggtgaactcaacgaagcgggaccaagtgagcacgtcgcccgtgtcccgctccagagtgtagaaccactctgccgccacaccgtccaaatggagtgatgcctgccacaccttctcatcggatggagtcctcatgcccctgaagtaagtctcacatttattgatccatggcagggggtcggactcaccatcgtagtggggaaaggagacattgggtcttcgatagccaccatcgtcgacgcggtcacgaggagcagatcttgtgctagccatgaccccgacaggcgccgtcggactcaccatcgtagcgtgatccgctgtccatgcagttcgaggcgtgagttaatggtggagagctgcgccaatatttgatccaatttggctgagtcgaaggaggtcttcgcaggatcgtgatcgacgccggacatgttggtcgatgcgttggaggaatctgataccaaattgatatgtcgtgagcgcataggactgcgcagtggtgatcgcagtaaggcttgggactgtggaagggatct

SEQ ID NO: 196518 - DNA, 292 bp, Zea Mays
cttttccagcctaaaccccctcgcccccgcacctctttcttccccatatggccatactatcacactagactcctctcctctccgctccgcgccggcatggcctcctgttcccagcgcctctcacctaccgtgtgccagtccccctcacgcgccacgccccccctcggataactactagttgccgtaccgtgggagcgccgcctcgagtctcaccaacaacacctgctggtgcgtagccgcgcccgcgcccccgccgcggctctctggttggattcccgtgcgggatcggcgg

SEQ ID NO: 196519 - DNA, 1086 bp, Zea Mays
gtagctggtatgtagcactacaattttgatgcagagacttggacctgttgtcacatgaaattgggagaaaatgaagctccaatgggctctgtcaggcatctgaactgaacttcgccatggtacagtagcctgataggattagaacgccagcgcggcttgctcaccgccggcgacctctctgcgtgaagattcgcgccgccgccgtcctgattcgagcaccgggcttgaagatagcgactgggtggaaaaatatcatctccccgtgcgctggacgccactccggctcgtcgccgtgcctcccctcttgcttaccgcccgtggaaaaggcttttcaccgccgtcgtgccttcgccgtggcctgccgcgtggctttggtttccaccgcgtcgccgtgacttctcacagccgtcaaatcagctccggtatgcttgccacgccatttgccacgaactcaccgcgccagggattcttccttatctccggccgccgcgttactcgaccaaattaagcaccgccgtcgaagccccctataaattgagcccccgggcagctacgctaagtcatcccgaagctatagcacccgctcccaccctcgatcaaccaccagcacgcgcgaatttccaattctccccaaatccggtctccgccgccgtgaagaacagctcgccgcggccagctcgattccggttagctcgcgtccttctgttgcttgttttagcatccgtaggcaccccgcgaactcctcgaaccgtccaattgaactagatcaccaccactcaccgggaacaccttcatccctctgtaacgttctcggtcaccgtggacagggcaaagtagagtgccattcttcaaattaacttaggggaaacgttctctaggtaatgaatttggtttaggccgacgctaagcactggtcttggcctcctacggccggtctgcgtgctcgccggagcacggccgtgcatgaacggcgtcgtggacttcaaatcgtggatagatagaaacccggagggtctttttgttatgtgtcagcgactcctcaaaatagtgtaagggcgcgttcgctgttagacaaagacgcgaggg

SEQ ID NO: 196520 - DNA, 312 bp, Zea Mays
atggaggtctgcttagtgacgtagactctgggcccgtgctggactcgatgtgtaaagccggcctgctatcctccccacagttggcagcgaggcagtgatcactgctctgttgagccagcctcatcgtcaatgaggtgccgagctttcgctagagctcccgtcagccaccaagtacccaacttgagacgggcagcaagccggcggccaaggcacttgcccatacaccgagtcccaggcccagaagagtcgtaactaaagcgcatccgcaccacccttaatgcccccgcacgggttacaagccctcgctactga

SEQ ID NO: 196521 - DNA, 414 bp, Zea Mays
gaggaacttgaggaagctcagaagcgaggcccagaacccagtcggcggctccattggcaacttcctccggcctcgtccagaccaacctagagcccaaggactcgagttctcctccaaagctcccaaccgttagccaccaaaaggcttatagatcaatccaaaaaatcctccctatcaacccttcctccacgccggtcctgtcagaattgtcaatcccgcagagctcgaaaggcaagcaagaacccaggaataccttgttgggaggggaaaagggaaaccgcgggctcctctaccgtgtctccagttccatccagacccaaggacccggagatggaaccgtgaggaggagaaccaccaagcggcgtgcgcaagaagacaccaagacagagggagtaggaccgcctcggaccctcg

SEQ ID NO: 196522 - DNA, 535 bp, Zea Mays
caccattgacgaccatccccagcgcgcggttagcgccgattacgtccttcttattactcgctaaaccatcttatctatctcgctgtgcgtgcgtgcgttcatgcacgcgtgcaggagactgccgggatctgtggagggacgaagagcagggtcgcgtcaaactcaaaccaaaactgaaactggggaggatttggcaaacgcagggagtcaagaacgcaccgcgtgctctccttgcaagctgttgcacatgccctcgatctgatgagcaacacaacaccttgcaagggggttggttcgggcattgactctcttgctctgtcctcccgtcgtcgacctgccactctctcctcggtccatggccgggctgtagtagaagctcgtccgtcagacagctagctaggagcttagaccatgcatgcatgcatatgtagcttgtaactgggattcttccattgtaacgtgcctgtacctctgcctctgtgcatgcacggagcgaggttgtacgtctatggagattgcagaagtctaaaaccgg

SEQ ID NO: 196523 - DNA, 369 bp, Zea Mays
atgaagagactgcattgagggttcttaatgatggtaaagtgctccgaggtcctcggttcagcctggtgtttaaaagatggtccagattttctcatgcctcttcctcaatcatgtcgagcttggtggaagttgagattaccggaatcccggtgcatgcttggtgccgctcaacagctgaattcatattgggggattcttgtatcattgaggaggttcatccggacactctgttgcagaaaactcttccatcctttgtagcatgggcttggtgcttccaaccgaaacaactgcaccgtgatatgattctgcatattctggagccaggcccacaaagctctgaacggagatgcttagcctataatataagcg

SEQ ID NO: 196524 - DNA, 275 bp, Zea Mays
atcattttggttatggatccttcaaaaatcttgatatggaatgtaagggggctgaactcgctggtgcgccaagattctacgcgtgaaatggtggactcctctagggtggatgtggtctgttttcaggaaactaaaatgcagtccttctcaattcacaccattctttccctgctcggatcagacttcagttcgtacatttgtctaccttctgctggggctagtggaggtatccttgtggcttggagaagaaatgttggggtttcaggccagaaaag

SEQ ID NO: 196525 - DNA, 512 bp, Zea Mays
aaaaaatgtctcacatcataaccatttggaaaattccaagaaagcaaggcaagattatgtaggttttcctgaagacgagagcaaggaatattttcaccagtcagatgtgcaaagatcagatttgtctagtaagaagaggatagtgaagaaatgggaggagagtcagtacaatccagtagctcaggtaagcaaaggagctatcaaggaaacctatagggatcagaacttaaaggaagcaaagttgatgtcattgaattctgaagaactgttttctatgacgagctccaaaccaccgaaagctcaacatgctgatcaggttttgttttatgatggggggcgtacgaacagcgagttagttgaggataacacacactttagtggcaaaacaggtctccctgagcaagaaaatagtctttctgataaggctttagacttgggcaaacctgctagtgatgtggcctatattcagacttcagctgtaacttcaagttcttcaaaggcttcagtctcac

SEQ ID NO: 196526 - DNA, 1276 bp, Zea Mays
aacaaaggggtcatgtcatgaacgaaatcaaataaacaatattacagcttggttgtaagcaagaccacaagaatgatacctgttgtttcctccgccagtcctcaaccccttcttttgccatggtggctacaatcacgacacacagcggcgcaagcgcgctcactgccgtgtatggtgcaagtggagtcaaggcaaggataccagagacaaggaagtagaaattggccaccctcctgaactgctcgaagagggacttgggcaggaaggtggccagattgtactttgtcgtcgacacctcattcagcaggtaactgaatccctcctcttcaagcctatcaggctcattgacgtacacgactctggagaaccccactgtcccaatccgtaagtggtcatcactagagcccccgtgacaacgcatgaaagtcaacaatgtgctgagcttaagtttctccagcctcttcgtcggcgccattcctccagactcaagtgaatcactgcaccaaagctactcccagatgccccaagaagtcgacaaggccaaaacctcacgggttttttttggaactccccgccgtagcagccaattcgctccaaccttgtccaaatcaatcttactgcagaacgcaattggcaattccctctgaagaagagcagctgagattcgagcagcaagaatctccaagaatgcagctcgcaataattcagctcctctcccaaccaacaagtagcccccaactacctaaaaaaagcaaataaactgcacagggagagggactgaaccgagagccaccccaggccctcagcagagaaatcagctcctcccaggatcgagaagacgtcaacactcaacagcgcggcgcctctgaaatcccggcgtgccgccgcggccctgcgctccggaaccccgtcctcctcctccgccccgctacgccaagactcttgagacgggaacaccagatgtctcgatccatgcggcgcccggctttcccgcggcgctgcgtctatgctctccccaaggcagaaaatggcccacgagaggacgactataggtggcgggaatctcccttcgcgcgggggcggcaaggtaatgcccccccgacccagacggggaccccacctcacctcaagcggagcggctcgggttccgttgccttgcctctttccgacggtgaatcatgtggctcctctcgaagggaaaaatcgaagctccgggacagggagggaggagacggacgagaggggcgaggtcaatggaaaatgggagtgagcaggc

SEQ ID NO: 196527 - DNA, 515 bp, Zea Mays
agggccttaaacagctgttggactaccctgagcagatttaagttgatcgtctgattgcccactaggacgattaatcactctatatcgcgattaggctgacgataaggccgatcagttcctctgatcgaatcgacacctctgatcgagtactggtagccgatcagaccgactaatcgcggttagttggaggatatgtaatcactgctccctccaatactatttcttaggccggtgcagtttgagaaatttccctcttgttaggcgtcttctaggaaccaaagcaggcattaatggccacatggaaaccaaactgttggctgcaactggacactagcatttttttgtgatgtgctgagtagcaaccacatgcatgtatgcatgcatgatgcatccaaggagtgaatgcagtgaaacaggaatccaacatagggctgtgaccttgcaagtatgagctcacaatactgcgccatttaatgcctcttggtctatggtgtttccgtgatatctggaatttg

SEQ ID NO: 196528 - DNA, 291 bp, Zea Mays
ggggcacctcaaaatggacttgccgttcgtcatcaggaatctctccaagcgaagcaaccaaagcactgacttcctcagcagagggtcgcactcttaggcccaaaatgccatcagtcacaggtggatttgacacgaagagggtgaaggctttgggaggaggcaaattccaggccgagtacgccactggagcaccaacattagatactttgcccctgagaatcatttcaagtcggctcaccaagtctgcagaagggattctcctgttggtaacccgagtcgggtcggctagcc

SEQ ID NO: 196529 - DNA, 596 bp, Zea Mays
actggagcaggaggcgagagtggcggcggcgaggagcacgaggtggggctcggaggtgatggacgccatgccggaacaggaggcagcggtagcgccggcgaggctcaggaggtggaactcggagtcgttggatagcatactggagcaggaggcgagagtggcgccggcgaggagcacgaggtggggttcggaggtgatggacgccatgccggaacaggaggcagcggtagcgccagcgaggctcaggaggtggaactcagagtcgttggatagcatactggagcaggaggcgagagtggcggcggcgaggagcaggaggtgggactcggaggtgatggacgccatgccggaacaggaggcagcggtagcgccagcgaggctcaggaggtggaactcagagtcgttggatagcatactggagcaggaggcgagagtggcggcggcgaggagcaggaggtgggactcggaggtggtggacgtcatgccggaacaggaggcggcggtggcgccggtaaaaagcaggaggtggaactccgacgcagtggatgtaataccggagcaggaagcgccggtggctctggcgaggagcgggagat

SEQ ID NO: 196530 - DNA, 348 bp, Zea Mays
cctcccccctacagattttcactttccaattcctatttatctcttcttttgttctttaatttggttcgtacgtacaagacttctcggatcactcgtcttctttgattgcatcatcgagacctgcattttcccttccaaattcgtcactcactctggttggccgccttctgtcttctgatccaatccggttgaaatcctccgtctccttccagcaagatctggcacataaggagaatcggcaagaaccattctgcaaatgaggccggatacgcggcttgaatcggcggtgttccagctcaccccgacccgcaccaggtgagctgccggatctgctcgagtaactcccgg

SEQ ID NO: 196531 - DNA, 658 bp, Zea Mays
cgcactgctaggtttctccaccaacaaaggcaggctcgtatcctcttcaagctggacatttccaaggcttttgactcggtttcatggccgtttctcattgaggttttgaggaagatggggttcggacagatttggtgtgatgttgttagtgggctgctggctacctcctccactagaatcttgctgaatggtgttcctggggagatcattgcgcaccaaaggggtctaaggcaaggcgatccactctcctatgttgtttattttggtcatggatgctctaaatctgctcattcaaaaggcttccgatgaagggttactccagcgtctatcgtctggagctttgcatcacaggctttctctttatgcggatgacgctgtggttttccttaggcctgtggcttcagacataaatataatcctagagatccttcgactttttggggaagcttcggggctcaagactaatgtccagaaaagtagtgtgttccccattcgttgtaccgaggatgatttggtgtgggtccgagattgtctcccatgtcccttgtcggatttcccttgtcagtatcttggtttacctctgtctttgggaaagctttcaaaggttcagttgcaggcattggtggacaaagtagctaatgtgcttccgggttggaag

SEQ ID NO: 196532 - DNA, 514 bp, Zea Mays
cttccagacatgaatccaaattggttcatggtgatatgcgtcattcctcttaggcgatgctcaataactctctcccatagcttcatagtgtggctcatgagcttaatccctcgatagttggtacacctttgaatatctcccttgttcttgaagattggtactaatgtactcctctactcattgggcatcttgtttgatcgaaaaatatggttgaacaacttggttagccaaacgatagcaatatccccaaggcatttccacacctctattgggataccatccggtcctatcgcgttgccccctttcatcctgtttaaagcttctttgacctctgactcttggatcctgcgtacaaatcatctatttaaatcatcaaaggagtcaaccaattgagtgttcacagtctcattctcaccattgaaaagattgtcaaaatacccctgccacctctgcttgatgtcttgtcctttcaccaagagttgatccatctcatccttaatgcatttaacttggt

SEQ ID NO: 196533 - DNA, 409 bp, Zea Mays
ggggccgcaaaggttgtcctcggcgtcgccaagaagaggcgtgcgatttcgtaagtataaagtgccatcggcattggatgctcagtgctttccactatggaagatatatctcaagcttttctcatcctatcattacccccctctagctctgccttgctgtaaatggtgatttgcatcatccttcaggtcgtcgcactcagttgcaaagtactgcgcaaagaagctgcccgcgaagtgtgcggtcctcgccgtgagcaatggcaagattgagttccggagagagtcgagcgtccatccaggtaaggtctcggcagaagttctcccgtgtggtgatgatgagatgtattgcgtagtgccgttccgagctcgtcaggctaaagggggcgcactttctttacaagaaaataaa

SEQ ID NO: 196534 - DNA, 427 bp, Zea Mays
tataaccagagatgcttagggtaggggatgtccaaaggtcataatggacgtggtcgaaggggcgagtggtgtgggagatggaagaagagaagggcaagcgagtgtgacgcccaaacagccaggcatggcaaagagaggtagtggtgccgcggggcaggtgatggctgaggtgcccgagagtttggagaggacgtcgttaccagcgtggccaagacgacaatgccaagtggaggcagaggcaaccgcaacaagggtgtagggtgtggtaacacgagataagggaggtggggtaggcaagcgaataggataggggacccgagatgtcgcatcgggtgaccatgacatgagtggtaaggtcccgtatggtgtccccaaggatcgaactctatagaacaatggttgttagtggtgaagcgacggattgaga

SEQ ID NO: 196535 - DNA, 544 bp, Zea Mays
catccactaaattcttctatcgtcgtcctcccttaatcagccgattgtgtttgatccacctagcccacgtgaatttcatcagcgagtagatcaagctatcgattgtgttttacctttagcatcgccccctacaatgggagcagatcaagctatccatcccatacatgtatgtgagctaacatcactgcaacagagaacagcagagaagggagaaaggaccagtgaacatttatatatccccattacatttatatatctgtttaatgctaaagatcaagtctgacaaatattctggaggcaaaggatataccgaaggtagtactggcatggagactgccaaataacgccaatgatcagacacgtgcatacaaatccaccatgggctactgcatgagacctagtacagtaccgaggtatggaaggtttaacatggttcctgttgatcagcaacagcaaggcattttgaggatacttagatgtgggactaaccaaatattttctaggcttagcaggctatggtaatatttagatttttttagataat

SEQ ID NO: 196536 - DNA, 397 bp, Zea Mays
ccaccgatcagagaggaatgcagtgctgaaacaatcttagcctggaggtggggatcctcgcctatccaaagacggttcttgtaacggatcagaccatccttcaatgagaagtgggcaacaactgctgaatcgatagctagtttagccactaactctttagtcttgctgtccgaattgtaagtgtgttggatatcagtcagccattgagggataacaacagaaaccacattgatttcagtaggaccatagcgcgagagagcgtaagctgcctggttttctgtccctggacgatactgcactctatattgaaggcccaaaaatttggtgaacactttgtgctgccaaggagtatggagacgttgctcatttaattgtgatagacttttgtggttagtta

SEQ ID NO: 196537 - DNA, 524 bp, Zea Mays
cgcgacccgcgtccggcggccgcccatcgccagtgccgtgacacgtcactccgacgccgtcgccaccaaatctcctggcaacgcctcacgtcttctagttctaattccagcctcactgctgccatcacctccgcctgctgtgtgtcttccacctcgcgctgccaaagccgacaaaccctagcccaactctccctaccctcgcccatcccactcctttcgtccgattcgtggaggcgacggaggggctaaggcatgacgaccgatgggcagctcagggagtgggtctccgacaagctcatgagcctcttgggctactccaagagcgtcgtcgttcagtacgtcatcaggcttggtatgcggcgttcgtcgagctcctttctttttcatgttgctcgattctgttcctcttctgttcgtttactatggatcatgtgtgtgcattcccagcgaaggagtgctcttcacccggtgacctcgtgggcaagcttgttgagtttgggttcagctcgtctgcggagacccgc

SEQ ID NO: 196538 - DNA, 506 bp, Zea Mays
cggactactgctctcagccttcagggttcaaggaccatgctcgtcctggctttgtctgtcgccggaatatctctctatggtatgaaacaggcataacgagcctagaacagtcgctttgctgctcacttcctgactctggggttcattgaggccaagtctaatgcctccttgtttgcctaccgcaatggaactgatacaatgtgcttgctcctctacatctactcctcccaactcgagttttatatgaaggatctaggccctcttcatcactttctcgagatgcatgttcaacgtcatggcgtagtctgttcctatcttagtgacaatacatggtagatgttcttgctcaggtcggcatgtccgactacaagccttgcatcatgcccgttgacactcaacctaaggttgctatagaggatcccaacaaccaccgcaacttggttggcgcactccagtacctgatgtttaccagttggacatatcttgtgcagtttaacagatttgtc

SEQ ID NO: 196539 - DNA, 451 bp, Zea Mays
ttttagtgtgaagtgaaaggctggcagataaactgcccagcttgtatcactacactacaggagaatgtcactggacagcatgactaaaccattaacaaaggatgattctgcttctggtctaagttttcttcccctcttttctgcctacagatctgcaagctcatgaagtactgctactgatagctggtttccttcttagttatggggagtgctatatgcgattagataggaacagatatcagaacactaatagcgtgtttggtttgcaagatgaccggtctgaaataatccgattcaaacaccgaagctgctggaactgtttggttaacgtagtggagccaactcgtccgtcacaaacacgttcagcaacataccaaatctgcaggttgggtcggttcctccaatttcgccagacaagtatgacgagtgtatgctgaacgtactcaaccct

SEQ ID NO: 196540 - DNA, 738 bp, Zea Mays
tccaaataatattgtgacatactggaaacttgacaaaactgaagataaatggcggcgccgactgaagctcaagcggaactataagtttgatgagtgcctttgtcatccatcatccatcaaatctagtaacgataatgctgccccaactgttgacccatctgctaatgccaagataacagaaaaaatgaagcacttacttttgaaaggagtgcgtggaattacaggggatatcagttctgaatcatgtgaggatagcaacgacatgattgatcctccccagaatgtcccgccagagaaccacactgttagtgatacttctgattctgcagattcctcagattatcctgctattgttcaaaatagaaaagaaagttcatcaaccagtagtgataatgattatatcgaggtaagcaggtccattatgtagttgcagaatggctgtatgggtatttgttcttcttccccactcaatatctttatttctttctcatttcccaggtgctatcatcagttcactgtgttcttgtaacccccaaaagaaaactagctgggcaattgactatcacacgaaatgccctacatttttcttttgaatttctagttgaagggactgggggatcatctgttttcgacagatttcatgataaaaaagattcagactccaagaatgagatgggaggtgtggaaaaactgaagggcaatcttgatggaggacgaggcaatgctgctgaatctagc

SEQ ID NO: 196541 - DNA, 368 bp, Zea Mays
gttattataggaaaactccgccaaagaaagacacttgtcccaatcctttccgtagtgtaacacacatgccctcaacatgtcttccaaaatctgatttaccctttcggtctggccatctgtttgaggatggtacgctgagcttcgtattacatgggtcccaagcgattcctgcaattgttcccaaaatcgtgccacaaatggtgctcctctgtctgatactatagtcttgggtatcccatgcaaacgaactatctggtcaatgtagatttccgcatacttctccatcctgtgggtggtgtgtactggcaagaaatgagctgacttggtcaatctgtccacaatcacccaaatagaatcatggtgcctgg

SEQ ID NO: 196542 - DNA, 532 bp, Zea Mays
gaattgtgtgtgctatcgtcatttaggcgcaggacgaaagggaagccaccgttgattactcctagactgaattgtaggcaaattgttgaggttcacgcggccatagtcgctatgacaatttctacatggccccagacacagggtaagttgaactgaagagctctgctccaaagaagctttgttaactacgttgtgttctttgttaacctcctgcccattttggcaccgggaggaaagttgcttgtatgctttgcaggatagctaaggaaaaggacattcttgcactgggacgacaacaaaggaagcgcacggagctgggcaattctcagtttagatgctcaagttgggactttggtgggtttaggttatggtcgttaaaatgcctcgtatttgctaggcagaactgttctttggatgttgttggctgtggtgattgagaaggaataaatgtcatgtaatataaagagtactatgtaacgcacaccaccttttgttagaatgtgaactaccttttgctacaatgtgagatcaa

SEQ ID NO: 196543 - DNA, 443 bp, Zea Mays
gaaaagacggggttcatccaggagaaggtgacaagttcaagaatatttgctcttccatatgggcatggccgtttgacttctgcctgctgtcccacagatggattcaatagtgcctctgttacgctgctgtctgtgaatctgattcctgttttccccctgactgaaattgcaaacagataagtgcaaacaacaagcatgcacatatcgatccattcttcaaatcctatatcttcatgggttgccaaaattgacctgagatcaaatacaacgatggcaactgattgtagaaagctaaatatccaccatgtccgaattacctttggaatttttgtagattttgctttctgaaaactgaatactgctagtgacaatattatccacgatagcacctgcaaaccttcacaaataataaagggtggatacttgcaatcacttattctttc

SEQ ID NO: 196544 - DNA, 559 bp, Zea Mays
gaaacagaagtgacagagcaagttggactcaactgttctggacattcaggcaaatttcttgtaacctcagcttatcattatccaaaagaatggcaaaggcacatttttttggaagttacttactgtgccttcatattctggcagattcttctgtttgcagtggagtgtcaccgctagaaaattcttgtgcaaattgtgaagagaaaatggtattacacagtgcaaatgaccctgttggagtaacagtgcatggtttgcatctttcaccttttaactgtgactgattgttctgttacctctccccttgtatttacgaaaatattctcaatcatataccttttattaaatatgcatgacaacaatctgtcgtacttagggaaaagtaattagatgtgagtatacaaacttgtatgatttagcaaaccacattatggtcctgcactcctgcttgttaagatgtataactggcttactttaacatttaaccacatgtcataaatacactaacctgttttacatttattttgattaagaaaatggtgtacgtgtcctggcagat

SEQ ID NO: 196545 - DNA, 780 bp, Zea Mays
gttttttgatgcgatggatgtggatgaagagggtgtctattgtgatgtatgtgcttcaatgattggaaatatcttaaccagtcctattgtacaacctataggagaagaaaaccagcaatttgataaaactacaaatttgaaacattgcatcgcatctgaccctcctatacccacaggttgtataggctatagcaaagaagtatctcttgatcatcaacttgtgaacagtgaatcgtacactgattgcctggaccaggtccctccaattcattcaatggggcacacacctcaggaaatgctactggggcgggaggaaaagattgacgcagagcatagaaagaaacatgttggggactcattaggaaatacaaatgatattgtcttccatcaatctaatgtgactgaatgtgaacaaatagaaccaacatctgtggggcatgaccttttcatcagagaccaaatggataaccataatcatggatcgtcccaatataatgaaactatctctgaaactgtgaccagtgacagttctcatcaaccaggatcaactacatatcaaaaccctaaacttgaaactactgagggtactgggatatcagtactattagtccctaagtcaaacagcaataaatggcctattgtagaagggagggccctggctgctacaaatatgttgtgttcagaaccctattatgcaagagatggtgtcagtatgatgaagcgtagctttggactggacagcacttcagctgcttcttccagtgatcttggatcttcaag

SEQ ID NO: 196546 - DNA, 375 bp, Zea Mays
gcaaaactctgctcctcgcttaaacccgcgagcctccggacccggatgttgttccggttccgcccggccccctcgtagccatcgcctccttttagcgccgccatcccacctcgccggcggccatggcgaccccgtcttatgcggcggtgaagtgcctcaacacgtcctcgtccagccgcaagcgtttctcggtacgcctcttctccgactgctggctgttccgctaacacagaatccagctcgcggaagagttttatggatgctaatgagctatgtgtttctttccgcagtttaagagcttctcgcagcgggtggaggagatcgacatcgatgtgtaccgcagcctccacacactgaaggcggagccatccagcg

SEQ ID NO: 196547 - DNA, 280 bp, Zea Mays
gtaatcttcttggcttcgggattgctttggatacagaattatttcttacatttgcacgagcatctggctgcaagtccacctttctgctaccttgactactgcttccagcaaatgtgttggcagccctcgcttttcttggatgggcatttatttggtgaatattgctccgttgcctactgggggttgctgggtttgagtgcactttatgtttggtgactgtagcattctgttttctgctgtttggcacaagcacactagacgaacttgtgcccagttggtt

SEQ ID NO: 196548 - DNA, 462 bp, Zea Mays
tggcaatgaagtgtgcatatttagagaaccgatcaaccactgtcaatattaccgattttccatggacctttggcagaccctcaatgaagtccattgcaatatctgcccatacttgtcgtggtacttctaaaggctgaagcaggcctgctggttgaagagcctcggttttattcttttggcagatgacacaggagcgcacccaatcctttactagtgccctgtctctatgcatgaagaagtctgatctgcctatgtaatgtcttttgtactccacaatgtcctgcagaatttgcggcctctagtattgctggaatgagtgtggaggaggctggtacaagcacccggttgccatgcattattagtccctcctgtgtatgccatggatcccccaagctttcttctttgatctgcgcactgagctgctgcccttcctcgctgtgtgcacattcttctagatctttg

SEQ ID NO: 196549 - DNA, 522 bp, Zea Mays
tttgctaactgaaaggcaacaaaatgaagcagctaatgctgcacttgctgaatctcaagcgagaaatgaagcactggtaagcaagcttgaagatgctgtgaaacaaaatgatctcctccatgaagctgaccaaaggttagtgtttattccagaaagtaatgtggccaactctgcaaactgtagcatcatcaataatccctaatttgcatatctataaggtcatagctattctttaagaacaaaaaatagcccaataacacagtggcattaattattgttagctgtacagattaatcttttttcttttcatccttctatatgtgttccatatagtttgcatcttgttgaatgcagatttcaagaagctacaaaaaatttggaatcttcactgacatttgagaagcaacgacatgaggcaaatttgatagaattagctgaagcacgagaaaagattgaagaacttcaaagagaagttggggacactgatgaaaaattcaccctgcttcagactagtatacaaag

SEQ ID NO: 196550 - DNA, 579 bp, Zea Mays
aaagcttcgagctagacaaaaggaaaggattgctcagcgacacattatcaagaactatgctgatgataatcttgaagagttcatgactccatacgactctattgctaatgaacctgctgaaaatcctttggtaatcgtagaagatctaaattcttcacagctatctggcgcgaaacgtttcagtgactcaactggagaaatgaggcaatcctccaagaaatcaaagagatattctgaaatccctcaagatctttatgccaaaattcctggtaacacagcttcattcaagcaccactcaaaggccactgatgtattcaatccagggaccccaaatcacttgctacctgtacttggcctttgtgctcctaatgctgatcaggtgaactcatacaaaaactcaatttgtgcaccaagcataaaggagcgtaaaagggccagtggtgacattgtcaaacaactgtcaactcctgctgaccattctaatgtgcatagaaacgaagctcaatcagcttctgataaggccatctttcctggtgcatctgaggaggctttgcgaagaataagtaacatgattccaga

SEQ ID NO: 196551 - DNA, 802 bp, Zea Mays
cctatgcccaaccatggtcagtttgcggcaacacgggcaactacacggcggccagcacctaccaggacaacctcagccagctcgcggcaagccttcccaagaaagcctcttcgaacacgagtcccctcttcgccacgggtaccgcgggtgcagtgccggacctggtgtacgctcttgcactctgccgtggggacatcaacgcctccgcctgcaaggactgcgtcaccataggcttcgaggacgcgcagcagctctgcgcgttcaacaaggaagccaccgtgtactacgatagctgcctcgtcagcttctccaacgaagacttcctgtcgactaccgtcaacggcaacgagaacgaggtcaccgtcctcatggacgcccagaacttcacggagagcgcggactacatcaggctcctcttgttcactctgctgaacgacacgtccgagtccgcgatcaacagcatcaggaggttcacgaccgcgcggatggacattagctccctgccgacgatttactgcgctgtgcagtgcacgcctgacctcaccgccgacgagtgcgccgcctgtttgcaagacttcccgcaggtgacgctccagtacctcgacgggcagcgaggaggtcgacttctcggggtgcggtgtaacatgaggtacgagatctacaaattttaccaaggggaccccatgcttcgtattatctctttggcttcggcagtgccaacgatcggtaaaacccctcccggaacaccagtcacggtgtatccgcagcctccacctgcagcgccaccagcgccgcagatgat

SEQ ID NO: 196552 - DNA, 665 bp, Zea Mays
gtggccgtcctgtggatccaaaggctcggcccaaagcatttggagaagtcactgttgctagcaacgttcctggtgccgagttgctagatgaaaatatttcttcagaaggggaaagttcggacgatgagtctgatggttttcactccgatgatgagatggacttgacacctgcccctcctggaacagaagaaaatatggagggttcatctgttgcaaacaaacatgatgccgatggagataccaaagaggaagatgacgcatctgatgatgaagatggtacggatcaagatgactccaacagtgatagtgatgaactagacgatgactctgatgtggatgtgggtactgatatatctgatgaagacgaaggtgacgacggtgaactgaaagaaagcataaatggttcagaggatgaagctttagaccagaatgaagacagcgaagaggaagacaagtcaaaaggcagtggctctaaagcgcagaagaggaagttaaatgattatattggacagctaaattctgctgatgcaagccttcgagctctgaagaggttagcaactgccaagaaggctgaagaaccatctgatgaaactggtaaaattctatccgatgaagatttcaaacgcatcaaagaactcaaggtatgtggattttggatggcttat

SEQ ID NO: 196553 - DNA, 336 bp, Zea Mays
tgggcatgcgggtgatcgacagacggcaaggaagaaggggtgggcgggatctcaccttgtgacgacggcgaacggcgaggcttgccggatgtgaagaactcgcaggggatccttggtcggccagagcgagcttgccgccgctgttgctacatgatgagggatgccagggaggtgcggccatgggaaggaattgtggtctgcgacctccatggcttggcactgcaggagggcgatgcggtagttgttttggagagaggagggagagcgggaaaggacgtcgaggtgcttgaatgggctgcacacggacggttctgaggctatagcgcagtgggcgtg

SEQ ID NO: 196554 - DNA, 946 bp, Zea Mays
gttcctgcacggactcaaaatgtgataataatgtagggtcagatctatcatggaaatctcctaaaagcacttcgactgccctggacataaataattgcagatcttgcagtgaagtgtgcattcgagtcccgtagtccaccacaacatgatctttagctgtgccagttaccccatcatgatgctgaaaaagcgccaaattcctccttgctgctgtcagtttgtgtgagaaactgatggggagcttcgcacactgaaacttctgacagtatcctagaacaaatgaacccagaatctctgcggcacgaagcgtctgttcgagtacacggtcaacagctttgaagaatggccttgatacatagtaaccactccagtaatcctgatttctatctgcataggtaaaaaaatctcctgaaagtgttggaaaaccttgcagctcagcagaacccagttcacctggccgtgaatagtttatcttttcagcttcatctctcaatgtggagaagtaatcctccagggtaccaaatttgacttcagcattaagatgaggatttgagtttatgtaatcaaaaagtttctcataattgcggaattgtacctctgcttcctccatactaacatatcgaaaatcatcgcccaaaggaatgagaagtgtattcgttctgtacagggttgactttttcctatactggtctagaagcgttgttgctctctcctccacattgtcaggatttatctcaacaggatcagatctccatgggcaggattcatagctgaaaccacgcattcgagcaaagtcaaactggcagcagattgctggttctggtccacacgtgtgtggaatatcataagaatagaagggcatcatgtgaacaaatatgtcagttgtttcttcaatatcccagttctgcctccacaaatattcaagattctttttcattgcaagctc

SEQ ID NO: 196555 - DNA, 552 bp, Zea Mays
gttcgtatggtgaataataggtcggtaggtattgttgatgccagtagcaaatgtagtcttatggagttttacgccatgtgtaattgcttctatgttagatcccaaaaatgtgccattttaagtgaccggtgtagtaacaactttaagttgagcaatgattaggaaaagctgattaatctgctccaacccatgtttttgagttgtgatgtctaaaatggttcgcgaagtccaatactgcgattaaccaactcatgttaagtagaagtcgatttcgttaagtgattgtcatatatatgttatgtctcggatttcgataataatagactagccgacgcgtgtgatgtatagcggcctatattgtttctctagttagccgaattgttagatgacttggttaagctcgtaatcacggtgtattgcttgttgtggtctaaatgtgtatggttacggtcgcgagtaaaaagtagtagtgctcatgtgatgtctaatttaaaacgccagtgttgggtgattatcgtggagaatgcgttgttaattggttgtagtaatttt

SEQ ID NO: 196556 - DNA, 1277 bp, Zea Mays
tgagcgacgaggtgcagcctttggccttgctggtgtggttaaaggatttggaatttcttccttgaaaaaatatggcatcgctgtgacattgcagaaaaatttggaagacaggttgtctactttgttaccttatccactagtgctatatatagggatgttgtaaataaaatcagtattgcatccatctgtcataattttccactaaattatgtgctgcagcctttgtattcagttttcatgtcttgttattctctaggcatttgagtaaagtttatctagggtattcaatgggaattttctgattgtcaaacattatagtgttgattttttttttccatttgtgcagaatgtctgcaaaatctcgtgaaggagctttacttggatttgagtgcctgtgtgagaagcttggcaaactatttgagccgtaagtgaggcatctcttcacttaactgttgctctgattccaattgattcgttatattttctttcttgtaggtatgtcattcaaatgcttccgttcctacttgtgtgtttctctgatcaagtcctagcagtgcgcgaagctgctgagtgtgctgctcgggcaatgatgtctcagctcactggtcctggtgtgaagcttgttcttccgtcacttcttaaggtatcaatatatcttatttgatgctatcaaatcataacatttattgtgtccaaatgttctggagaatacaagtgtccagttcatctagttatatattgaaatctgacaaccacttaacttctgctgaatatttaggccattggcaccacaaactactagtttgttttcattaacttgaaagagcagaacatcttgaggtccatctattacatttttttttaaaaaaatctacacattctggaaatttgttggcttattttcatttgtgctgttcgtacctttatgttagttgtttaaatgaagataaaataggtattcagatactttacaaaattttaagctagtcacattcactttcaaaaagtgtcatacggtgaatttacttagcttgtctaatacaagtttccttgaagcgcatatttggatgaagatcattaatgttggatagattagaataatgggccaaccctagagagggttggctatatagagttcatacacgggcctcatgggcctagccacatgggcctaatccatatactctaacaattaacatggtttttccagggtctagaagataaagcatggcgtactaagcaaagcagcgttcaacttcttggtgccatggcatatt

SEQ ID NO: 196557 - DNA, 281 bp, Zea Mays
attctacgcagttggaaagcaatatccgtggagtagcattttctgcaagttggttgaagccaatagacgattggcctttggaatctcctggtccatcaacgggcgcatctcgtcctgcacaataccaaaaacgtggggttggtggaaggcgtggcagaagacgttcggttgcatctgaatctggtactgctactgctactgatgaggacaacagctggacttggtggactggaggaaatatttcaaaacgtactttgcagaggggggctcttctacattca

SEQ ID NO: 196558 - DNA, 329 bp, Zea Mays
ctcctccttccacgcctccctcaatcatcccacttctttctttgccctcttcggcaccacgacttcctatacgcacctctgcgtctttcattgtgtctgctatcctaacagctccgccaccgctccccacaaactttcgcccaatccactcgctgcattttcctcgggtactcctctgaccacagggggtccagatgcctcgatcttctcacccattgcatcatcatctctcaacatgttttcattgaggatgcttttccccttgaaggctcatccccacctcccgacatcaactctctccttcatgttgatctcgtcgacgtacttcc

SEQ ID NO: 196559 - DNA, 338 bp, Zea Mays
tctccaaaccttttgttgcctgacaccctggagctaaaggatgtggctgtttaccgatgttctgcttggtgtttagacccgtccttggtgcctgcttcaagggagctttggatcgtcgaacctccctttgccgttgatgggatgtcttctggcaggagaacgctgatgtatccaatccgcatcacattctcgtctgccccacggagggatggatccgatcctaagcttcatgctattacttcgggcggggatggttctggtcacgtgcagcagggatcccctcctttttcaagacctccccattcgagtgggagaaggggagaacatggtcattcggg

SEQ ID NO: 196560 - DNA, 409 bp, Zea Mays
ccgcgtcaagcaagcactaccagcagcagagatgccacagcactgggcagtaccacggccagtaccacggtcagtcggtccactagtgaccttccctccctccccattccccaagcatgcatatatttatgtgtgtgccttggaaagcctgggctcttaaaccagaccagaaagaaggcaggtgaggtgaggtgatgcagatgacccggctggaagacctgacccctgctccatccatggagcattcctcgaggccgaccctggggtttcccctgggaactgctctcctgctcctcgtcatctttgccctgagcggcatgttctcgtgttgctaccactgggacaagctccgcgccctcctccggtctcggcatcccgacatgttcctggaggccgaggagcatacggc

SEQ ID NO: 196561 - DNA, 529 bp, Zea Mays
ccctgcaccgactccggcgcgacttccatttttctcacatgaaacgtgtgatgcaggatctgattcgtggctgtgcagtctgccaacgcaacaagcccgaccatcagcacccggccgacttgctgttgcccctgccggtgccgcaaggggtatggacggacatcgccatggatttcgtcgaagcgctgcctcgcgtccgtggcaagaccgtcatcttcacagtgatagaccgcttcagcaagtatgcacatttcgttcccctggcgcacccgtacacggccgagtctgtggcgcaggcattcttctccgacatcgtccgtctccacgacattccccagtcgatcgtctctgatcgggactcggtgttcacttccaacttctggagcgagctgatgcgcttaagcggtaccaagctacagatgaccacgacatttcatccccagtcagacggccagtccgaatcggcgaacaaggtcatcatcatgtatctcaggtgcttgacgggagatcgaccccgcgactggctgcg

SEQ ID NO: 196562 - DNA, 1270 bp, Zea Mays
gaataaccagctatattattgcattctgttgtaaactggcttaccaccagtagcatattcttttttgcatacctactactacatgtgccattatataacttgtcctttcagggtgaccctgtggaaattgcacgtgttattaaagattcagtaaaacagaatctgaaaagatttcacgaggaagcccggcattctttaattagcacccctgaaaggaagttggctctcattattgatggtagatgcctaatgtacgcactggacccaactcttcgtgttgatcttcttggattgagtctaagttgccactctgttatatgctgccgagtttctccgctgcagaaggcacaggtaaataacgtttcttgcagagtaccattttcctcttacccactgaagaattaacaatatgggattttgttggaccccccaacacacacacacacacacgcactgacacacacacgcacaggagagaggccagaaaaggaataaatattttacgagatatattactaatcagtgaatgctttactactgtggttggtttttactctttagcatactgtgtacactcatgtacttctgagttgcatttctgatgtgtgatcgtgctgttatcagctgtcattgtttttatcgggggtctttagtttgaggtatcagctactgttgtgataccagtcctcgtgtttgtactagatatgtgcatacttacttaggatgaggtgttgattagcttggccattccattcatcaaaccaaaccagtaggaagagcggacttgcaggtccattatcaaagcaaatgggggcaatagtctctgattgattgcatggtttcattgcacagtcttgtatacgtgaaaatataaaatgctgacattaatgtgtatatgtaggttacaagcttagttaggaagggtgctgagaaaataactctcagcattggtgacggtgctaatgatgtgagtatgattcaagctgctcatgttgggattggcatcagtggccaagaaggaatgcaagctgttatggctagtgactttgccattgcacagtttcgttttcttactgatttgcttcttgtacatggacgatggtcttacttgagactgtgcaaggtatggttatagttgctcaactttaacctagcatatagttcaaagtactgaatatgagatgttctgttgcaggttatcacatacttcttctacaagaatctgacatttacactaactcagttctggttcacttttcaaactggtttt

SEQ ID NO: 196563 - DNA, 526 bp, Zea Mays
cgccagccacattgttatcatcatcggggtcagcagtagaggtgcacacactcgccaaggactgagcattcatgcggcgatgattgcttggtgcacgagctaccaggcgccaatccagccgctgagcagagaggtcagcccagacacctgaatcaatgcgtccgatagcggcagtccgctacacgatgtgagggtgacaagcagttgaagcacctacccttcaagtctttagggatagggtggcaggggcgaggtggaacgcgcaactgtctcagacgagaccaccagcactcatacatctgccaaccagcatcatcccagtcaacctggtgtaaggacttccagatgggcacagggcttgtggcaactggagaagataatagggcatcacgttaggaggcaacaacactagagcttggactggatttgttccagcgttgcgccttggatcttatagcaaaggcaggagaaggaaaggaaacaggcaccgccagggtaggggaggctacacgagaaggacacacag

SEQ ID NO: 196564 - DNA, 353 bp, Zea Mays
caagtacttcatgatgttggtggggatgctgtatcgctgtggtactagttcctggaggatgtggatattaaaggcccaaggcctcagtgggtgggctcagacttcggtcctcatcggggttgaagcgtcctccacagcgctagttgtaccgatgttggttgcctggaccctttcacacttcctcgttgtgccctcggccaggcatgcttcacgcgcgtctgcctgaccttgggtgcagatggagtgggactcgtgttgtgtcttcctcgagctcggacgactatccaaatatggtgttgtttcctattagcgtggatgtggtacattagttagcctccagctcccggtgtcgt

SEQ ID NO: 196565 - DNA, 401 bp, Zea Mays
aggaagaattggctgctatcttggagctcctgccttgtgaattaaaggaattcccgtgcaattatttgggactgcccctgacaatcagaaaaccatcaaaagccgagttgcagcctctcattgacaaggtatcaaacaagttactaggttggaaagcctctcatgagttgagcagtccggctcgtgatggtcaaggtggtcttatcatcaatccccatctactatatgctcgctttcgacctccctaaatgggttttcaaagctattgataaacggcgaaggggtttcttatggaaatgacaagagaaagccaacgaaggtaactgtcttgtctcatgggaaattgggaatgcacccagcgacccctgcagtttggtggcctaggaattcttaatcttgaa

SEQ ID NO: 196566 - DNA, 977 bp, Zea Mays
ggggaccctggacccacgggtgggatactcagtctctcgccaactctttctccacaatgacgctggcaccgcccacctccgtctctgactgggtggctgactccggtgcctcgtaccacaccacgccggacgcaggtattctgtcttccacctctcccccccacccctcccttccgtcctccatcgtggttggaaacggctctgcccttcccgtcacctctgttggtgacgcggtccttcccggtcctttccgtttatccaacgttcttgttgctccccacattattcaaaatcttctttacgtccgtcagtttactactgacaactcttgttccatggagtttgacccgtttggtctttctgtgaaggatcttgccaccaggacccttctcgctcggtgtgacagccctgggccgctctacacgcttcgcctgcctgcttccactccaccgacctctgcaccgcctgttcttgcagctgccgcctcttctgtgacttggcatcgtcgtctcggtcaccccggtcgtgatgtgatgtccaagctctctagcagcacctccgtttccggttgtaggggatcttttgagcacctctgtcatgcttgtcagttaggtcgccatgttagactcccattccccatctcctcttctagagcagcaggcacttttgatctgatacactgtgatgtatggacatcccctgtaatcagcatttctggctataagtattatttacttattcttgatgacttctcacattatctgtggacttttcctcttcgtcagaagtccgacacctttcccaccctgtcccacttcttcgcttgggtctccactcagtttagtcgcaccatccggagcatccagtgtgacaacgggcgtgagttctataataatgtgtcccgtgacttcttcctctctcgtggtgtccacctccgcatgtcctgcccctacacgtctcctcagaacgcccgtgct

SEQ ID NO: 196567 - DNA, 340 bp, Zea Mays
ccaaaagaaggtgttagcaccatcaccaatttctgtgacaagcacagaagagaagagggctttagcattgctggggacatgaacagaaagattattccagggacgggtagggtcggtcctttgcagccatagccatctcatcctaagtgcccaacagagttcagggaggctggaaattcccaaacctccaaagttcaagggtcaacacacttttccccaagccaccatacaatgccctcctttaacctctcttctgcctctccataagaaacctttccttatcttgtcaatttccttaatgacccacatagggaaatcaatagccatagcagtataaaca

SEQ ID NO: 196568 - DNA, 397 bp, Zea Mays
cctgattaataatatgcaacacaacattaacccatgtagtgctacttgtacccccaactgtccattctagtctccggtgcctgggaactgatgaccgttctagtctccggtgcctgcctggtattattcctcctgttcccgccagcattgcctgcactaacgagcccccaggacgacgtcagttgctacagtgttctatagtactgtacctgtacgtactacatgcaagagtaaccttctaccaaagtgagtgaccgccactatctcttgtccaagcttttctctatactcttctttttagatttctaccgtaacgttcaattttcttccctgccgacagcagcaactgtccatgtcgttcttgaagattaagtaggtaacagaaaagcaaggcagc

SEQ ID NO: 196569 - DNA, 399 bp, Zea Mays
tttgattgctcagctgctggaattattgtgaaagcctttctagaggtatgatacatgtttcaaatgaacatttgtttctcttgtgcttgaagttgaaggtcatatgattttgttcttggactgtgtagtattcatagtgacttgtttatttcagcgcctagactggagttctacctcctcggcatcttcgcagaaggatttcattcttcttgctgcctgtgaagcacatcagacgcttccccagagtgcagaatttcctgctgatgtgtttacggcttgcctcacaacgcccatcaaaatggctttgcactggttctttctccccccttcttttttgtgtgtgtactgttccttctctccttttcttagcatgttgtgcttacactagtacatgcctat

SEQ ID NO: 196570 - DNA, 458 bp, Zea Mays
ccagttctgttcttgtatctgttgtttctggtctctgtttcgatgccagttttggttcggttctaggctgctagctgttgattctgctttctgtttcgcttctgtttacgacacctgaaccagtttttggtaccggtgggggagcactgtcccaatggctggccgccgttcgccgtcggcggatcccggtctcggtcactgcgaagctcccgaaatgagatccggtggcgctttagagccctcgtccgttccaatacgcagtcggatgctgggttacgctcgcctctaaatctaagcttattatttatgcctttgcttcgtattcgtcagatctgatttcgtatttctgtctcgaccgaaattttgcgcggtgcagtgattataaaaacattcctcgtactgatgggtcatcctcgtgaacgactcctatacacccatagaatctgagcacccaaaac

SEQ ID NO: 196571 - DNA, 482 bp, Zea Mays
tgaactgccgactgtttttccgagtcaaaggaacttcatcttcttcctcctcgtcgtccacattagcaacacaggcagcacccccattgggatcaacaacagaaggagcacccacattgggatcaacagcagattgggtacacccattggggtcagtgtcaataaattcagttacaggcatttcttcagcagcaggaaccgaagtaccagcgtcccgatccaaactggatactcgccggaggcgtctccttttctttttctgctcatcagcagaaggatcaggctgattggctcggcaaggacgcctcgggcgagtactggcaggcttctgaatatccaaagttgtatcagcctctgggaggggcgccaccaccgatgtcccagcaggagcagcatcagaagagtcctcagccagcaaatcaagcatatcacttgtctccgcatcgctaggattcaggggcacctcaaagtggacctgccgt

SEQ ID NO: 196572 - DNA, 876 bp, Zea Mays
gtagcatggggccggggctcgggtggggagacgtgagccgcgcgttatgcttgcgtattttgccgttattggctgcgtaaatgcggcgcgggtcgacgtggcagttggtgggtctacccacgcatgcatcgattctaggtggggcgattatgcatacggaatttgaatgaaaaagatgcataaatggtaacgaggggccgggggtcgggtgtgtagacgtgggacgcgcgttatggttgcgtattttgccgttattggctgcgtaaattcgcatctgacgggacgagagtggtcagatcgggtagtggggtgacgcgcgcgtcgatcgggaacgtggggacggtcgcacgatggcgtgatgcatgtttatggaaatgtaacacaatgatcatgtaatcgtaacggatagctcacgtaaatcttgcgacatgcaaactgcgcagcaaatcgcgcaggagattggatcatgccatgaatataggccaggacggtttaggcgagtataggaggtgaaaaaaaaacgacctacgcacagcccccgcagcttttgttcatagctatcgaaaagttagggcatacacaaaggagacggcgatgacgacaccctgtacgagcgatggccggaatgctgtaactccaccggctgcgttaccggcgccaggaattgttgaagaaggcaacacagttcatcaaagtttgatgggaacaagtcagcggatacccatgcggacaattggtgaacatgagcaggacacaccacacattctccaaagccatgtaagttcaaaggaatacccatgtattatgttatacaattttcgtgcaagttatgatttcaccgaatacacatgtattagttatacagtccgtgcaatt

SEQ ID NO: 196573 - DNA, 428 bp, Zea Mays
ggagggagggagagagaaagagaagagagaggagggagagggagtgtataggaaagagagtggagggagagagagagaggagagagagggaaagggaagagagaggaaagagagggagagggagggagggaagcatgcatacaacgccatttccttaatttgtttacttagttgccactcgcacaaatgagaagcatgcatacaatgccatttcctctaccatagttaccgtgttaccgtggtcataatcgccttcacggtgtacgcaagagagacatgaatggcatagaaagtttggacgatacccataaagaagaagatgatggcccaaatagttcagtggcaaatacgagtcatcgtcaatagcgcgccacacacattccataaaattacgatggtgtgttgactgttgccgatgcacatttcgt

SEQ ID NO: 196574 - DNA, 593 bp, Zea Mays
tcacctgaagctcttcagtttgctgatgctgtaactttggtccgaaagaaccaggctatgctgtgccactttattatgaagcaattccaaaggaaaggacacttgggtagtgaaattcttctccagagcttgttgttcctgttgcactcagcaactgatctattttgtccaccagagaatgtagttgatataattttgaagtctgctgaaagcctcaatgatcagcttacatgtctttacagtttttttagtgcagggaataagaaattggataggataaaaatacatggtctaagaagacgttggatgcttctccagaaactggttctggcttcatcaggcagtgatagtactagagaacttgccagaaataaaagagatggtttccattttagaagtttagtccctccatcaacatggatacaaaagatatctgatttctccatgttttctagcccactccctcgatttttcggatggatggcagtgtcttgctatgccaaggaatatttaaatgagaagctgtttcttgcttctgatttctcacagcttacatctttgctatcaatttacatggatgaactttgtttgat

SEQ ID NO: 196575 - DNA, 858 bp, Zea Mays
cctctattgtcttcagaccaccccttctccatcacctccgaagtttgcttcaaaaacagtcatcacatgccagtctatcatggttcgtcgcctttacatcacagtgaagcatatttgtttggccttttctgctcaattaaatattgcctgtgattttcattcttaggtaaccctccaggagcaatcgtgcttaagaattgcttcattcttggctgatggagttgtacccaatcgtggtgccatattgccagagtcttcaatcaacagcctgacattttcacttaaagagtttgatctctctgttccattagatactgatgaaatcgcaaggtgcagtggaaccaagaatactaacccccaatcatcattttcgggtgcaagactgcatgtggaagacctatacttctgccagtcaccatcaactaagtgtccattgctaaaccttgacagagatccagcttgcttccttctgtgggaatatcaacctgttgatgcgagtcagatgaagtgggctacttggtcttctcacctaagtctctcacttgaaacttctagcacttcaaatggacagagagcagtcagtgattctaatttgtggaaatgtattgaactagatgatatccgatttgaggtagctatggttacagcagatggtgggcctttgttggatgtaccacctccagagggtgttgtaagaattggtgttgctttccaacagttcaagtccaacacctcagttgagcaattgttttttgtgttaggtttttatacttactttggtcaagtagcagaacgtatctcaaaggtcagcaacgctaacaagtctgagtcagtgaagtcatcggctgacaagtcgga

SEQ ID NO: 196576 - DNA, 292 bp, Zea Mays
ctcgtcgtcagcgtcgacgacgagaagggccttctctttcttctttgcacggcagtccttggccatgtgtcctcggtcgccacagtcgaagcatcgcccacggtagcggctcctagcgcgtatggagctcgggctgtcgctatcgtcgtcggagtcgtcgtggccgtcgctacagccacctcctttctcgcggccaccacgtcgtcgatcacccccgtgcgcacgattcttgctgcgccgacgcgcctgccactgctcctcagtgagaagcaggcgcccaagctcatctgtc

SEQ ID NO: 196577 - DNA, 300 bp, Zea Mays
tgcacgtagctgcaggcggaaggctggacggtagcagggggcaggggcgcagcattctctgcttgcggtggtggacgagcagacgagagcaggggagcaccggagcagaacagtgatagcgttatggcagacagacagacagacacggagccgcagaacaaagaccagcacagggatgtgcccgcaatcctgcctcccctatctccttgtgtctcctggagctggcggacaactggaacagcaacaccttcagaagcagcggcggcagatatgagcgcatggtgccgtcgaacctcggac

SEQ ID NO: 196578 - DNA, 279 bp, Zea Mays
gtgctgtcaggaaacaaaaatgtaacttattactcagggtgacatcctctccatgctgggagttgagtttactgaatttgtttttctaccttctgttggtgctagtggaggaattctagttgcttcgaaaagaaatgtaggacatacaggagtacaaaggatggatgcccattgtgtttctgtccagttttgcaaagatgatggaattccctggtggttaacttgtgtgtatgggcctcagactgatgctgagaaaattcttttccttcaagaaattta

SEQ ID NO: 196579 - DNA, 318 bp, Zea Mays
ctttaagttgtaaatgccccgaggtttcaaaaaaggaaatgggcgcacccctttggagttcagctcgtgtgaaaaactttttatatctgcagggagtctcttcctcggtgcactagtagcctgcataatggctttaaagcgtggggactcggattcctttggtgtctcacacggatcatatgcacactaaaaatgcaagcaaaaagatgtaaggatggattagccattgtttacttaaatgaaagtcatagggaagaagaaaaatagaaatatcactaccgcagcctcaggtatgtgagtaggtgtcctcaaatctcc

SEQ ID NO: 196580 - DNA, 299 bp, Zea Mays
tgcttgatgaagtgatcaagatacaggaacagataaggcttgagaggaaggagcatgaagattgtacacagtcaagcaacattagatttgatgctctacagaagaagattagtctattgctagaagagggcaggagtagagaggtgcagcttggtgaggaggagctcaagattgtcaaagctgagatagagatatttgtcttgcagcagtgtttgaatgacatgacagaagtaaattctgaaatcgcagaacaactgcgaaagaataaagaaatatgcaaggtccaggagggaaaaatc

SEQ ID NO: 196581 - DNA, 438 bp, Zea Mays
atcatatcgagagcacactgccactgcaagtaggaaagctagcgcatcacaatggcggccagaaccagcgtggttgtgctttgcttcgttgtcgcctccgcccttctcgtggcctcgtcatttgctgcccgtactccaacctttggtacgttacctatgtgtatatacacacagctctcatctagcacatgcaaatctaaagacgacgctctgaaaatattatccagttctcgccatcaattacaccatcaccatgcatgcatgctgcgtgcttccatattttgtgtcgtagaatcgagaagggagacgagggagacggttgcaggacgaaccgtgaggaatatgccagtgatcatccaccacccggagataccaagcaactcacgagccgcggtgccggtgaaagtgaccgtcggcgtcgacccagtgaccgcccac

SEQ ID NO: 196582 - DNA, 1191 bp, Zea Mays
caaggactacagccatcagctcaaactttcatccaagaaacaagcactgctggaccagtagataaccaatcagctaccagcaacaatttctctatgcaggctttcttgcaaggaaaacctagaaggtttcttcaggaactatgcagttatatttttagacataacttttaccacttgatatctggttccttatttgaagatcacattgaaaatattgctgaaacggttgaaaagcatggatttgtacagtggttatgaagttctacatcacgcctgtattttcttatcatgataacggtgtaaagttatctagtacacatgtgtcttgctattgtttcgtgcacatttaattgcttactccacactcatgtacttgtgattgcatgtaggtgattatgacatgtacgcatctaccattttggtaacatattaagaacatcatgtggctggaataattgagcattcctttgtcccctgcttttgtgctgtgcaggtttcatgcatgctattatcttacaattaacatgtcatttgttactttgtagagaaaaccaatctgctgaaatattgccatctgaagtagatgaaaagatgactgctactgataataaaaattatgttgatgatgggggaaatgtgttaccatcaaaattagaggtaatttgctactattaaggttttgcacaacaacaacacttcttagaatggatatagcttcaatggcattaggtattctccttatagggctgtacttgacatttatattaaaattaagttactgggtcactaatgcaggacatcacagagagtgactggacaaggttagagaattacgcaagtaccggagaaaaggttgaggtggagctgataaattgcagtgcgaaggggtttgttgtaagtttgtagttagctttcatatattttcatattttatcaaattatagaattgttcttttctgagccctgttatgttttccttgccaggtgtcacttgactcactgataggtttcttaccgtaccgtaatcttgctacaaagtggaaattcttagcctttgagacttggttaagaaggaagggtggcgatccttccttgtacaagcagagtttgggattagaggatagttttgaggttaatgacacaaacctagaaccagaatctagctcagtttccaaaatagctggtgaggac

SEQ ID NO: 196583 - DNA, 666 bp, Zea Mays
ccctttttcacaacaagtccactcactcctcatattatcccacagaatccacttctttcatgtgtcttccttccattcctgatttttcatctgaactatcatcttccacatccacacctgatgttcttattcccataacaccaccttccatctccacgtcatcttactcttccaaaccacctatcacccaaacctacattcgtcattcctgctctattccaacggctggtcctgatactgatactgtacccgattcttgtactaacaatactgagtctaatggtgtttttaatcagggatatcgtcttcgtgaccgtggtaccattgaacctccagatcgctatggttttccacgagctggtgtggcaattgttgaaccaactacttatcaggaggcttctgggattcttgagtggcagcttgctatgattgatgaattggctgctcttgaacgcactggcacatgggatatagtttctttaccctcgcatgttgttcctatcacttgtaaatgggtcttcaaagttaagacaaaatcagatggttatattgagaggtataaagctcgtcttgtggctcgtggtttccaacagactcaaggacttgactatgatgagacttttgcaccagttgcccatatgaccactgtacgaaccttgattgcag

SEQ ID NO: 196584 - DNA, 532 bp, Zea Mays
ccacccccaccttcaagcctcctcgcgtcgtcgcaaccgcagatctggccaacgtcccccgaccgatcgacccccctctccccctcagcgcggcgaggcacaggtgaggctcgtcctgttccgcggcttcttctgctttggtaattttcttcttccccaacgccatcatccccagcgagcggcctcacaacagcactaaccagggagggagccccgtccgttcccgtcgtcccgagcgagcggcctcacaacagcactaacccaacctcttcacgctcttccgggactgggggtggcgggatcctcagctgctgactccaaccccctttgatttagtttcctaataattaaaaacatgataaatatgtccccctccctctgttccccttcctccccccgtgcaattcccacggccctgcatccagttagttgcgttgtgtattagggaactccacgcgggaggtcacatctgctcgtctcatttatattagggaactgattgtttcttcaagataggagatttgttcctctt

SEQ ID NO: 196585 - DNA, 441 bp, Zea Mays
cttctatgtagtatcggacaatctttcgtagacaataatgcagtcaacgccttatccaaagcaccatgaccccgtagtatattcatccttggcatgcaaccaacctcgtttcggtcgaacaaaaaaaaatttggcatgccttagattcaattatatcgacttcgtctcatagaccaaacgacgaaacgacaaacggtgaacatcgtgattaaacatacctttttgcttggtacatacatgcaaactggcatttgatggcagccggcagcgtcagctgcaatcacttgcctgcctctgttttcacgtagctagttcatttgagcatcgatggcatgtaggaggacgagtgcattaaacggggtataatgggtgcgtctggggacatcactggtctaaatcgttggatccaaatgagcttgtcaatacaaacatattaatcgt

SEQ ID NO: 196586 - DNA, 778 bp, Zea Mays
tgtgcaagagaggatgtcacacgcaatcagttgatcaagttgagtgtgtgaggcagagacgacgctagtgaaggcaatgttgaaggcgaagcctctcggtggtggtgaggatgagctgtgataggttgatgtgcatacgaagaggtgtggcacacacgtgcgttcggggtacgttgcaggcaacacgatgtgccacggtcgaagaagatgaggccaatgttgtcgatgtcgaagacgcacgcggtcgacaggcggtgggcgacacaaatccgatgaccaatcgggaagaataaaagaactcacaacaacgcattttggaacatcaccaggtacccattcctccacaaccgtcaccacgatgacgcgttgagggaggcatggatgtcatgggcccacatagccatgaccattatggcatgcataagggacaatgacatgatccaatagacaggagagcccgagaagccactaggacgcgtggagaaaccggggagctcttgatctgttgaagctgacgacatgacgacgacgggcatgataaatcagaagggtcagccacacatccaaactgcgagagcacaaccccggtggagatcgatcacctcgacggtggcgcagcgacgatagacggtggcgcaatgacgatagcggaaggggaagccgaggtcgtaacctatgctcgtgttaccgtgaaggagaatagaattgatgtaattgagcctttagacgatttatatagagtacatgacttaggagataaggcaacctacgaatttat

SEQ ID NO: 196587 - DNA, 699 bp, Zea Mays
gtttgcctgaccctgaaccgagcacagcaatccctgagtggtgaccacaaccagcagttcacctatatcaccgtggccaggtaatcacaagcgattccccaactgtatagtgcatgttttgtgttctctgtagaccagtagagctcacgccgtttggttcttggactctaccggggtgtgtgatctagaacggagtcaagtcatcgtggaactagtgctgcgggcagcctcaccgtggaccgatcgactggagtcatccctggtcaatctcacgcacgcaccgagactttggaaggtcagtgaagctctctacgccattaatttgaactcgaccacgagattaggatcgtcagagcaactgtccgtcaccgctgacagtagagtggttccaaagtctctgcgggtaaattgagtgcacggccgagtttgccgtagcctggagagttggttggtaccatcgtcgtcgtctgcgatgtgtgatcatggcggatccggtgccggttcaccggagaactgtgcggcggtgtcggggccgaggcgttgtgaaagaaggaaagccgaggggcttaggtgcatctgtcagtgacccgagaattcaatcggagtgcggggtcctttttacaaaacctcaggcatgggctcctcagcgtgggccggctgtgcctgggatttaggacgtgtcaacggtttggctccggg

SEQ ID NO: 196588 - DNA, 386 bp, Zea Mays
gttgtaatatagcttttagtttctagttggtaccaaaatcaagagattttttttatacaaatgagtaggtgattatgaaggcatgggtatatatgtacaaccaccaaatgtgtaaaacaatgtctttaaagcatggataggttgggtaggacatagtagggtaaggaaggacttcataatgcatagtggatcttgattcctttggaagtatggcttgattcttattattcctcaacgagtttgatctccttcttctcgagtcttgatgtcttcatccgggtttgggacaagaggttaagatagatctgtaggcaacagatgggtagagggtttagtaggtagctatatgatagatgggattagttatgtaacctgttttgtaggtc

SEQ ID NO: 196589 - DNA, 368 bp, Zea Mays
agattctacagttgatgagttcctcgctcagatatctgctatttggcctcaacttgatactattggtccctagctgttagtagatacttgtgtcttgccagggtcagaatgctgcacttgagcttcctcctacctatgacttcttgacctagcttcatgacgagtttgagtcccttcgtgcttagctgcttgcttgtcatccctgcgtctctttgatggatgttcttgctagtgtccgtaatgaggagactcgtctacgtgctgctggcctgttgtagtcttcgatcttggttgttcattcttcgtctttatcgttgtcttcagttgcaccttcttttgcatatgggagggggcgtggtggtcttcat

SEQ ID NO: 196590 - DNA, 445 bp, Zea Mays
aggggcggacactaccgcgccattgagagtcgctggaagcactggtggctctgcgggcgatgtgcccaccaatttcttgaggacaccaacgtggaagacgtcatggagcctggcgccctccggaagctgtagtcgcaccgctgcctcgttgatgacttcctggacgcggtaggggccgacgtagcgaggctttagcttcccagtaggcgttcgtgacagcaatgctgccgaccgttgacggaggcggaggaacgtccagtcgcccacttggtagaccacctttcgatggtgctggtcgtaggcacgtttctgggactcctgggcctgctgtagccgatagcggacgtcgtcgaagaaggcggagcgttcctccatctcttgcgccactgctgccacccgcgtctcatcgggttcataggagcggatggatggggggtcacggtcg

SEQ ID NO: 196591 - DNA, 795 bp, Zea Mays
atgaccatggaaaatttagccaaatcgagtgagagaacaatccaaacataggttaaggttgtaaggcacattgggctagtcgatgaagacgtcattgggcaaaattttccatggtctttattttattttgagaaaagatgtagcaaattgatgtgtggtgttttacttgagtggacataaacacaacctagttacgccttgaatagaagggattataggaaacctggtatcacaaaaagttatttgctagcccaataacgtcttcatcctctagttgtactctaataccctctcgtgcgaatacagtgccctcaatatcataaaaacgtcatttgtggtttaaaaggtgatctattgttttgaattctttatattccaactttttagtaaccgtatggtggaaaaatgtgccttacaactttaacctatgtttggatagttctctcactcaatttggctaaatttttcatggtctttattttattgagaaacaatgtggcatattaatatgtagtgttttatttgagtagacataaacaccgtctaggtatgccttgaatagaggggattataggaaacctggtatcacaaaaggtcattagctagcccaataacatctttatccactagttgtactctaataccctctcgtgcgaatacaatgcccttgacatctgggaaacttcatttttagtttaaaaggtgatctattgttttgaattctttatattcctgctttttagcaaccgtatagtggaaaaaagtgccttacaaccttaacatatgtttggaaag

SEQ ID NO: 196592 - DNA, 431 bp, Zea Mays
ctgttctgacgcaagtgactgaaggaaacaagcatgtggtaacctacctaagccggaggctggtggatgctgaaacaaggtacacttttatcgaaaagttatgcttatgcctatttttagcatgcaccaagtgtagatgttatttactgtctagtcattgcaccgttgccagtcaaaccgatgtgattaaatacatgttgcaatacccgattatgagtgataggattggtaaatgggcttatgcacttatagagtatgacttggcctaagaaccattgaaatctatgaaaggtcaggtcgtagcagattttattgtagaacatcggatcaatgatactcataaactagacatatcatacctcactgttactccctggactttatattttgatggatcagtttgcaatgaagggcaaggaattggcatcgtg

SEQ ID NO: 196593 - DNA, 483 bp, Zea Mays
gtcaaacgttttcttgcaagtcgcaggtgagaactaggctcgtttcaccggggttgctatgtgcaagatacagtgcaaaaggcacagtagtgactagtgaacattgatcctgcgatgtcctcttcattcagtacaaaaccaccgtccgttcccatcatgcaccttgcatcacatcacaccgtgatgcccagtgcccatttcccccctatccaaaatggatgcacaagatgcgcctgcctcatcgcttagcccacttgcattgcatgccaacctagctctgcgactcaagttactgcagcaccgatagacctgcaccttctgcgcatgcacgctagctagctgccaaggcccacctattctaccactcaatcattcaggaagcatctgcacaaacactagcacgacaaccataacagactagccgcagagctgcctaatcacaataattccaaggcagacagcgacagcagttcaaataggctg

SEQ ID NO: 196594 - DNA, 449 bp, Zea Mays
ggcgaggtggggtccccggcgtgacgacgtctagcgatttctcactggtgtggtgctcggtcgtggatccgcgggccaccgtggatactcgcccacgatgacgttcgggactcatgtgggggtacaatggctccacgacgcccagtgaatggtgaccattgtcgtcgtgggcggggtggtgccacgaggcttcacctattgctcactagagtttgggcaaactgcggattcgccttactacgacgtcaaaccaacctgctgcatatctcatggtgagactcatctccacgacttcacctatttgtccttcacgtgtagcatgggtataatcagggtttatagctcgaggcacagaatgtttttttcgtcggggtctccgccataggagccggtggcaccgctagcggctgtccgaggatgggagatgaccttgttaccgtcgatttcat

SEQ ID NO: 196595 - DNA, 457 bp, Zea Mays
gccgccaccgatggaacgtcggagtgtgaacaagcagcaggctgcttctcgtctggtactctggtgtatataaaatagaaccataacgagcaccgtgttatgggcatctgatcgttgactccatttttctttgggtggccacggctgtcaatggacgaccaccaagaggcgcctcctcctccttctacttctacggttctacccccattgcttgctcctccctgatcagacacagaccattggcacatacttcgtctagacgggagtagtgcagtgcaggacacacagcttcagcgcggcatctggttcgttcccatgctagttccaattccaacacgaagccatgcagccactccacgtttcatgcaagagaagccggagccggagccggaaccggaacacactgcacgtacctccttccaccggcctcgcgccctcgcccttgcgctgctgctca

SEQ ID NO: 196596 - DNA, 789 bp, Zea Mays
gaggctttagttacttctggaatcaagactggaatctatcatggtcaaatgggcagcagagctagagaggaatcccataggtttttcatctattcactgtgtgctctattttgggcgtctgttcgctatgttgtttttcttgtacatccattttccttgtgcaatgtaaatccttgactgtattgttttgagttttgaccactgctcaaatgatattctaaaccatttgtcagtatctcctctggaaatgattttgttgaagtatttttattgacctgttactgttagatatgcttcaccttgccattatgtgaaatgaatatcacgtggttcgtaagtgccatgatttggtttagtctcagcattctctataaaatatttactagattgtctttgttctgttagattcacattggccatgcaatcagttaattagaaaagtaaaacctttacaaatacgtaggtcacagggcataacaatgatcagttgtttgatttatgcatccagtttgtacaaattatggtggcagctttataattgaccattggttgttttgctcccgcagatccttcattagggatgaagttcttgtaatggtggcaactatagcttttgggatgggtattgataagcctgatgttagatgtgtaatacactatggatgtccaaagagcctagagtcttactaccaggaaagtgggcgttgtggaagagatggactgccttcaatctgctggctatattaccaaagaagtgatattacaaaagctgatttctattgttctgag

SEQ ID NO: 196597 - DNA, 723 bp, Zea Mays
aggtgcttgttggccctatttatttttgtgatatttaatgaatcacaatgttagaaattggaatgttcttaattggaacattagaggtttgaatgatgaaggcaaagcccatgcaatgcggcaaaaaattgaagaaagtggttgttccgtcttctgcatccaagaaacaaaaatgaaggactttacccctcattctttcaaacgtttcgcccctagcgcttcaccaaatttgcctttagcgcctctagaggtgcctcggggggtattatgatgggttcgaataattctttgcttcagggctcgatccaagaggttaatcttttctctattacggtggagtttgtctctcgtctttctgcggaccattggaagttaacaatcgtgtatggtccttgtattagatcggatcgtattgcttttatcaactggttgagctctctcgacatctcttcaatagataactggatgttgttggggatttcaatttctatcgctcagcggccgacagaaataagccaggagggaatgtttctgatatgaataccttcaactctatcattagcagacttggtattatcgaaatcccccttaaagggtgaagtttcacttggagcaatatgcggtctaatcctttgttggttcaattagattggtgtttcacttctattagttggactactgctttccccaacaccttgctttttcctttggcgaagacctccg

SEQ ID NO: 196598 - DNA, 498 bp, Zea Mays
ccgtgatcccttcgacgccaggcacctctgcgccattggccttcgcggcttcctcctctctgcgattcccaggcaggactccgacatctctctgcaggagcaccgggtgaactgcggtgcaggggatgtcgccgacctgcagaggctggagaaggagatttcagcacctgtacccgccccggcgctcgcggcgttcccgctcttttcctcgagaatttgcttctcccccctgtggaggcagatcctcttcgtcaccttccctcgggagctcatcgtctttgacctcagctacagcactgcgctttctgttactccattgcccagggggtttggcaagttctcggatgttatggccgatcctgatatcgacatgctctattgcacccatctcgacggcaagctgagcatctggaggcgcaaggagtgagtttgcagtcctactgtttatctgggtagtattggatttagttcaaaacataaatcagagattagtgaatg

SEQ ID NO: 196599 - DNA, 323 bp, Zea Mays
ggctgcttatctctcaaatggcagcctgtctgttgtggaacttccagcacctgatacctgggaagaatttgaaggcaatgggataagtgttgatccttgctgttctgacttcactttgaataactgtatgcacctcacttggatagatacacgcaccttgatcggtatctgttgctatagtgaacacctctcttcaacaaaaatcaggtccagtgaagccagtaaccttgtagataaacatgattcgctgtttttcatccatgagattgaacttaaatgttcagagagttctgtgccaggttcagtgtgttcatctggttggc

SEQ ID NO: 196600 - DNA, 665 bp, Zea Mays
cgagtatgtcagccaagttgacaagcatgacagaggccctcaaaatgtgccatattacaagaagaatctagactgctggagatcttggtcatgacgtcaggtctagggtggtcgagacgacgatgccaagtggtggaggtggtggtggagaccgggacgggaggtggagacacgccggtggaagagggccggagcgtgtagaggggcccaacgctgtcacatcgggtgagtggggtcttggtggccagatacttcacagaaaaactagaggggtcaaactcaatggaacaagcattgtcggtggtgaaccgacggacagaaagaagattgtgagtgatgtgtggggctacgagaacgtcgttgaggtagaacggtctagggagcaccgaggcacctactgaggtgactggaagagtggaaccgtttccaacgacgatcgaggtagggtgtgtggaaggaggtgggtgtgagcaagatagcatgccctgtggtggggagtggtgtgataggatgcaccgggagtcgatgacccagttagaggatggtggagccaacaccatgttgctgtaagcggcagcgaaggcggtagggtcccagcctccagcgaacgggggccatggtgtcgtggtagatgtccctgtaggcggaagctgaggcgggaccgg

SEQ ID NO: 196601 - DNA, 545 bp, Zea Mays
gatagggcctttgtagacagttggccgactggtggcgtggcttgagtgagccggcgctcgtgagctcgggccaagctcatggacgtctggaggttcggtggtctcttcagcccgacctccgcccgcaagggttcaccaaggcccgcaataaagagctcaacctgctggttaggcgtgatgacctgcgcacgacacaggagctgtgagaattgtcgctgatcgtcctccacggtgccggtgcaatataaggctttcagctcggccaagctgttgtgtcgaagtggaggcccgaaccgcatgttgatgtactgggcgaagcggcgccatgagaccataccgtagtcgagctcgaagccgtagtaccagtccaatgacgcgccttccaagtgcagggacacgacccacactctgtcgtcgtcgagtgtgcgcatcccacgaaaacatgtttcacacttgttgagccatggaaggggatcagattcgccgtcgaatgatggaaacttcagcttggggcggcgattgtgatcctcatagcaatcacggtc

SEQ ID NO: 196602 - DNA, 566 bp, Zea Mays
tcaccctttccccatcagactagtcttttggggcgattgagcctttccttgagttggtgtgcttaatgaactgttgggctccgggcaaccctaatttgttgggcctcggccaaccctagctaggttgggtgtatcatattgtcccttcttctcttataaaaatgagttaatggcaaccacaccgatccaaaacgggtcaaaggttcaacaaaagggtgagtcactgaggaggctggatgatgtatatttatatgggcagaaactacaaataagttagagtccaactcaatggtaaccgatcaagattctatatctcgtcctattcagttacaactctatgcagacctaaataattaatccatctatattctaacaccctcaaaatcgaaaaataatagaatcgcctagaaatccaccattctacaatagttggcagtccgtgctggcctcctgctgcatgttccatcttcaattcttcatgatcacctattgttgcactcccaatccacaatctgtacttctgtagtgtcgctctacttaggttgcaagtgtttcttggtcaccgg

SEQ ID NO: 196603 - DNA, 301 bp, Zea Mays
ctttcttcctgagctttttgatattttaaaagaccagtcatacatgttgacagaagctgaagctgcaatttttcttccttgcctcatagagaaggtacggttagtacaaaaatgcatatttgatgtgttatcatagttcataatacaatcatgaccaaattactgttctgcagtctggtcataacattgaaaaagtcagggaaaaaatgggggagctgataaagcaaatgatcaacatttactctcttcccaaactaattccctatatacttgaggggctccgctccaagaataaccggac

SEQ ID NO: 196604 - DNA, 350 bp, Zea Mays
tgagtttctaaagagtgtaatgcatatgaggttttctggttgtgatgggactaatcagttttagtttgcatttgtgtggtgtgaaatgccgagacttcactggatcggggcggacgaacagagtaaagcgggtggtgcatcagatctcatcaaatgttgtaactgtgaattccttaattgtttagccggggaactaagttgtaagttcatttgtgttaaattctgttggaggctcagtttctgggatgttagattgggtgattgggtcgatttggtgagggaaaaacacttggtgcctcgttgggatgtttgtttatgtggggtcatgaatgttgttgtctactggctgg

SEQ ID NO: 196605 - DNA, 992 bp, Zea Mays
cacacagcaaagtagcgtaagtagtaacactaaaacctctgtaagccttaatacaatcgggaaaggctcaagaaaagggcaagctgagcatagcaaacctgcatcgtcttgccaagacccatgtcatcccctaggattcctcctgttcccctgcagtgcagaacccagagccatcggaggccctcgcgctggtgggcgaaaagcatcttgaatatctttcctgggagcttgtatggcttggatgttgcagcagttccagttggatccatcttgaagtcctctgtcttctcccatccaacatcctcagcattgttctccacagctccaaggttctccttctcctgacccagctcatcgtcgctgacaccatggttcctgaatgttggggtgttgggtggtctccttgtgaatcccttgcttcttagctgcttaacagcataatctgttcttgttccttggtcctcctcgcagtcgtcataatcagaatcggaataagaatcaacaaaggatgaggcctttgataccctatttagcctcccaacatccttggtggtccctttgttcttccccttgccacggacgtcatcacaggcataatgggtacaggctgaggagactaaatcagtttcgatcttgacctcggagcgtctggtgggagccctagcttcatcagagctagaaatttgaaggggtgaggaggcaccggcgtgagcatccacatcatctgggctatggtcatctaggtcgtcgtccacggtgatggcgcacggcaaaggggtgagctgttgtgtcctggacctcgcggcggtgctgggcttctggacggatagagagtcaaatcgtgtggtgaggtcgtctaggatgtcgagtatgctttcaccgtcgtcctggttgtcccactccgcctcctcttcatccactcgctgagtggcggtggtggtggtggcaagcttgcataggcggcggcggccggcgagcttgaccttctcgac

SEQ ID NO: 196606 - DNA, 276 bp, Zea Mays
ggaagcttgtaaatctgaagactggttaaagaaattttcaatagaaattttggatggagaccggtggatagacacatctgtggttaaaaatgttaatgctttagatggtgtccgctttttgctgttcttctagcagacttctaccttcagaacttttaattgttaatgtcttttctggtgcatattatcctacctggatggcggatgatgcagaactctcccctaaaaagtttgcgactttaggtgtgccgtggttagctgtaacccgccggggtg

SEQ ID NO: 196607 - DNA, 699 bp, Zea Mays
ggaacgtgaagatcaccaagagccacacgcgcacgaacaaaatgaaggtcaatctccacatgtttggtgcactagtgctgaacagggttggatgacatgtagacagtactgatgttgtcacagtaaaccaaggtggcgcggcacagtggggcatggagttcttgtaataactggcgcggccaggtagcttccgcgacgacgttggcaacaactcgatactcagccttagcgctagagcgggatactgtttgctgacgcttaacatgtagacagtactgatgttgtcacagtaaaccaaggtggcgcgacacagtggggcatggagttcttgtaataactggcgcggccaggtagcttccgcgacgacgttggcaacaactcgatactcagccttagcgctagagcgggatactgtttgctgacgcttagaggaccaggagatgagactatcacccaggaacacagcaaaacctgaagtagacctgcgggtatctggacaaccagcccaatcagcatctgagtaaaccactagctcggtctgtgcagaaggacgaagcaacaagccagatgaagagtgccacggacgtaacgaagaatgcgtttcagtgcaacaaggtgaggctctcgagggtcgtgcatgtgaaggcagatctgctgtactgcatatgcaatgtttggccgagtgaaagtgagatactg

SEQ ID NO: 196608 - DNA, 595 bp, Zea Mays
gcgaaaccgttgttgtggttgttggttgcacaggcaggattgcaggaaggcacaagaagggcaaaaggcaggcagacccgcgcgccattctctagaaccttccacggtccacctccctcgttcctccggcggcacgtgcccgtgccgctcggctcacccgcaaccctccctccacgcctctcctcgtcgacgagcggacccggtccacgcccccacccccttcccatcccaatcccagatcccggccagccctccgattcggccgcgaccgtggtgggttcggtccccctccgatcggggcagcagccatggatcagagccggcgggcggtggagtcgtactggcgctcgcggatggtggacggcgtcacggcggacgacgacaaggtcgcgcccgtctacaagctcgaggagatctgcgagctcctgcgtgcctccgacgccagcatcgtcaaggaggtcgccgacttcgtcctcaagcgcctcgacaacaagagctcccttgttaagcaaaaggtgggtgcccctgggtctggaccccgggtgcgttgttgccttgtctgtcgagggatgctgctactggtggggcacgactg

SEQ ID NO: 196609 - DNA, 537 bp, Zea Mays
ccgcctccatctccgcccagggtgtccacctgggagttcctggacccgtttggaacttatgagagctactacgagcaaccaactgctacagcagctccatactctcctggcaggagtttgaaggatgtgcgcgaggaggaggggattccagacttggaggacgaagacatggaggtagtcaaggaagcttatggtgatgagaagcaccctgtgaagggttacatggggaacgggaaggccgcaaagggagagggtaggagcagcacgggggatgaattgccccgcaagtccaagtcatctgaggccagtggtagtggtagcagcttggagcatgacgttcatgtagtggaaaaaagtgttgtcggagaacaagttcgacactcggagccacggcagcatgttgccggtctaccacccacaggatcggaaaagctatacattgatgacactgaggtggtggtggagatcaggactcaattcgagcgtgcctcacaatcagctggtgaggtatcaaagatgcttgaggtcggaaagatg

SEQ ID NO: 196610 - DNA, 572 bp, Zea Mays
caatctatgaaactcgaaattatttcaggtaactcgtgtaccactttctggtactcgaattacccgaatccagctcgcctgcgactcctccaatcctcctacttgcttgcagtttgctcgtgcccccaactccccagtctcgtgcccccaactgtgtctgtgtgcgcgtgcatgtgccatatccttgtctggctgtatccgttggtgttggcattgccgtcttgagctcttgggtcttggcaaatggcgatgtccatgtctccttttgaattttcaaccggtaatagcagtagcactagtgctcaactgcactagcagtccgtctccctgtgagtttttcaaccgctaataccagtagcactagtgcacttctgcattagtagtaacaacccatcacccgtctccatgagaacctgaattctaaatgtatttttcttgctgctagtgagcttcttcgtatgttttttcaaaattgtgaactttgtattcttccactttaaatagacaggctaaatgtatttttcatgatgccagtgagcttctttgtatgtttttcaaaactgtgaactttg

SEQ ID NO: 196611 - DNA, 445 bp, Zea Mays
gaattatctggtttcttcattagaaggacaagtgctgaaaaagctgaggtgctatatctgataatgccttgctctaacatggtcatgcactgtgcctcaagctcatccttttgaagctgtgggtacctatatggccgaactgctactggtactgttcctggcagaagatggatcctgtgatcacaccttctagctgggggaaggccactaggtgttgtaaacacttcctggaactgttgtagcaagcggtccatcataggttttgaatcttcacttgctgcattgactgttcgaactgtcgggtgcatgtgaatgtcatctcgtgaggagcccatgcctttccatagaatccgcttgcctcgtctccagaaggcaagacacaagtcttccagatcccaaagggttggccccagggtgcgcagaaactggactccgaggataatat

SEQ ID NO: 196612 - DNA, 292 bp, Zea Mays
agcatgttacgatctttagcctttgttcttggaagaagcaaggctcttccctatccagtttgcaaggcaaatccggcgtggggatttctttatccgcatcttaactttcgattaggtcgggactctaggcacctgacttacctaagtgtatgtatgctaatgacgagacacacatgcatgaactagacccacaatgcatggcctgagtttagcatacagatatacaaacagacgccagctaacttatctgtgatgcaagggctgatttcgaatacatgtatataccgaccca

SEQ ID NO: 196613 - DNA, 420 bp, Zea Mays
cataatttctgatgatatgggatcagaaagggttgcagttgggtcgacatgacctttcctgatgtcatcattggtgagaccaattccttgccacctaagcacacgtccatgttcaaccaaaccgggattatagaccggagatgggatgaactcaggagcctcaactcgtagctgagttctagtatgtgactcatttttagaggatgatgtattatattccatcaccacttctttccctttgtccatggacggttgaagaacctccttttccaccatggcgacctttcccttattacagggttgtggatgttgatgttgatctactaataccacctcttcatttggactaattggatttgttgttgtcactgttttggttggtggtgccccaagtatgcttggaacaagttttgatgaccg

SEQ ID NO: 196614 - DNA, 443 bp, Zea Mays
aataagtaaatcaaaataatcatattagtcgccaacattgatagagcccataggaaccatgtagacagccaaatatgaactgctaaactaagaaagattctgtacaaaaccatatggtgcaaacaaataaaaacaacacactaaccttgcaaaaacttttctgattgttttgttaccctttctgaaaaagagagggagtcatttttataaggctatctgcactcatactacccgatttctctaccctaaaaggaatatttaatcctggtcagcgagattctctactctatccaacaattctccgtggtcacaattacccttgttgggggtcttcttctccgccgaagatcctcaaaatatagaccatcggcaaagcgacactgaggatttccttctgtttatgtcgaagctcctcaagacgaagatctcatctgaaagcagcg

SEQ ID NO: 196615 - DNA, 655 bp, Zea Mays
tatgtctgctggagatagaggtggtgttgctgatcttattgctagcatcaagatatccaagatccctattatctgcatttgtaatgaccgttatagtcagaaattgaagaatcttgtgaattactgccttatgctcaacttcagaaagccaacaaaacaacaggttatttttttttgccatgttcagtcctagtgaagcaatgagcttcagaattactaatgtttccttgaattacaagaacccagcaccacattctttacttttgttgtatctaggcatgcacaatttagttagcctggtgcaattcatgtcatgtatgaaatgaatctgtatttggtttgtttctgattctaaaatttgctgtttgtaaactatggttttattgtggactctgaacttctgaacattgctgtttgtgtacacttgcacctaattgataaaaaaccctggccattggttgtcacaagctaccaactacaatgctctttctgttgcaattcttctcatcttacatgatgtatacagttgcatgtgttaaaaagagagaactattaattttctacctggacgtggatgactggatgttcattttcttttcttggttctaacttctttacttgacagatgggtaaaagattgatggaaattgccaaa

SEQ ID NO: 196616 - DNA, 2379 bp, Zea Mays
attgatgtactccattgctactatgcccatggagaggagaacgaaaactttcaaaggcgaacatattggctgttggaagagtaagtgctgactgttgcattcatgtcattccacactcatttgggtggtagactggtagttaactcatactcagaggaaaagtgtgactgatatgactttcttatttttcagggatttcactcatattgttcttgtacattacctagaagtcaaggtacattcttttcatagtcgattaaccttctctctcatctttcccctttttgtgtatttccttgttgggtgacttgtcactggaaaatggcttgtgggagatcttatttgatgagtacacatcggatttatcacctgtgctaggaaatacgtctaaaacacctatattcaccagctgtagtaacaaatatatctgaaataccacatgagctaatgctcgctcacatacttgtgacatcactgacatgtaccaatgaccttgttagctatggtttacaactgcccttccatcctatacttggttttacatcccgcttgggatcctcttttgcattttgtggtgaccactttgctactgcagacaacacaccccattctcttcaggtagggtacacatttttttgatcaagaaacactgttggggaagcccctacaataaaattctattaattaaaaatgcactgtacaagagaaaggcgaaaaggaggggaaatagaaaacaataatttacaaagaagaaagccaacatgatatcaaagatctaagatctgagttcaatctaatcatttgaagcttcaacgtgtgattgaagcagagcctccaagaagagaatgatgggaatgcattttctgaagatagcatttgtttctttgtttccaaattttccaggccaaaatagctaatatcttcttaaaaaaacttctttccaaagagcacctttgcaaatgttatcattgtaaagaaatctaaagaatgatcctaatgaattatgacatagttccagcaagcatcactgaacgggcaatcaagtaggagatggtatgtagtctcttcacaattgagatcacacaaaatgcaactctaatcattgttagaaacgatacaccttttccttctgagcagacttctagtattgattctatttctgaagagcaaccaaataaacactttgatctttttttgtcactttcgatttccagatccatttgaatggaatgggggactgatgaattgaaagtttaatgaataaactttacttgactgaaaattgttattgacccaagaatagatccacttgtctttgccttgcatggtgccttgaattgtcgtgattgtaaatttaatatattcctcactggcttctgttgacaatggagtaggaaaattgtcaagaagattcaaattctgtaaaaacatagcaagagaacagctcttccttttggcaaacgaataaaggcaggggaaatccaacttgaacaacttattattctaaatgtcttgccacagcgaaagatttaccatcaccaacaatcggcatagcaattcccctataatgattagctaatcttaaaatgtctttccaccaaaaggatccccacttagaagagcaatgagggatctaacccgaattatagtgtgtattccaaattaattccacctagggaatatcaagccttccgtagaacttatgcaggtgtttcatgagcacagcctggttctgcaacctaagattaataatccctagaccgcctttattcttgggcgtgatgaccttttcccaagaaatcattggtttgcgatttgtattgatgtcatttcctttccaaagacagtctcttcttgcacgattaatagaattgatgactgaaatagggagtctcacagtacacatggtgtaggtctgcaaagcagataaagtagaattccctagagtcaatcttcctgccatcgaaagcagccataccctgaccatgttcaaccgtcattcaattttgttcatgagggggagaaaatccctgactttaggttcagtagggtacatgttttcgttatatacctttctaaagtgtgcgcacacaaatgactctgatttgcatttatttggaaatggtccacttttgtttcatatacaataaattctggactatgaatataactgtatggcatttcttgaatctaatgataacttaacatttttcgcttgtttatgtttaactttccagggatgcaagcaaagtttcaatcgtgtgaaagaagaacttatgcagctatcgaatgtcgacagtccttcatgttcaaattccatcactagtcagaatcagatgggcccacaaaacatggaggctgctgaaagcccaataagcg

SEQ ID NO: 196617 - DNA, 540 bp, Zea Mays
catgaattggaatttttagcatttgtttcaagcatgtgaggtgattgcttcctgtttttgttttttggcagggatttctcctacaacaaggacttgggcggtcctcttcctgcgtccatcggaagcctgagtaacctcgaaaacctgtgcgcaaccaaactttttaaggagttccaatcgtccactgatttcaatattttcactgcctggattgttccttgacttatttgctctccgactcctccgcaggattcttgtcggttgcagcttttctggagaaataccgaaagaactcggacagctcaccaagcttagatttttgtaaggagaccaaaccaacctgaaacctttgtgtctatgcctttgatctattagcaaccataaacaaacaaggatataatcattttttgggattgtatcttctgttgaacaaaaagcttttacctatctatatctatccaactgtcacttgggaaatcaactttagtttgtcctctttggtcagaacagaaaggaagtaaaattgaggtcttacgttct

SEQ ID NO: 196618 - DNA, 1216 bp, Zea Mays
ctgatgagatgggtcttggcaaaactgttcaggctatggcattcctgtctcatttggctgaggttggttgatttttttaacatagaaaatgtttccactagtcaatccagtgcttgattattattttgtaccaggatatttttttgggtatctgaccgatctcctgttatttttaactcattttttatgctttcaatcagttaacatatctacataaattttagaataaagtactccctttgttccaaattgtaagtcattttggcttttctagatacataattaccaagtatctagacagtgtatatttaggtgcatagctaaactgtatgtaccttggaaagctaaaatgacttgcaatttgtaatagaaggaatataaatctaacaccaaatggttgaatgctaaccatttgatatatcacacaggacaaaaacatatggggcccctttcttgtggtggctcctgcatctgttgtgaataattgggctgaggagttgattagattctgccctgacctaaagatacttccttactggggtccagagaggatgattcttcgaaagaatatcaaccccaagcgtctgtatcgcaggtgagttgctgtctaggagagaaacttgtgcgagtgatccttttctttaaaaagcgtataacctgattgcctaatcatctaaccttttctctcttaactctgcagagatgctagctttcatattcttattacaaactatcagatacttgtgaatgaagagaagcttttgagacgtgttaaatggcaatacatggtattggatgaggcccaggctatcaaaagttcaagcaggtgactttacatgttgaaatctctctctctctgtgtgtgtgtgtgttttcattgatttattaaggaactatcgtatatgccttcccttgcttgacaaattatctctctgctgcagccagcgatggaagacattactgagcttcaactgtagaaaccgtcttcttcttactgggacaccaatacagaacaatatggctgagttatgggcacttcttcatttcattatgcccactctatttgacagccatgaacagttcaacgagtggttctcaaaggggtattgttctctctttttctagttgtactttctttattttgtacatacttaagttgctgatgttttgacagtattgagggtcatgctgagcatggaggagctttgaatgaaca

SEQ ID NO: 196619 - DNA, 612 bp, Zea Mays
acaaataacagcaggtttgaggcttacaaccagcgacttaacagagtctcttagcacgattattgagacccctcacattccaaatcaaaaaacagccagattccatggaaaacaaaaaggaggctaccaaaccgaccacagcaaccagctcagatctgctccacatggggcacctcccagccaaacagagccgctagggcagcaacatgatccctggacagtgttgaatgaaacagcctagcataattactagcatctcggaaagaaatattttcatgctcatcacagaaacccaaatgcctgcatactttagcagcagcgtcagatcccaattcagggggaaactttgccaccctcctgctacgcctaggcttgaaattgctaggcatcatctttcttcgcttgacaatcagagcaggagggggcaacagctcatcagtcggctttgtaagaccatctttgaattcttgcaatggggtagacagcatcagctcctcaaccacaatagccttcttccttctagaatatactttgaaacaaggtggcttggcattcaacctgcatgccaaaggcatagctggccccataggcagatcgatgatagaactcaat

SEQ ID NO: 196620 - DNA, 650 bp, Zea Mays
cacgagccagagcagaaggacctgcttcctggtccaagcatgacagtcgccgaagccgcctcttcttcttcttcttcttcttcttttcctcaacaggcgcagtcgggcggctaacttggcaaggacgctttgggcgagcaccctcaggcttccgagtctccactactttgtcaagctcttgtccaaccatgatagccattggctcagcatgggtcgagtcagaagattccccagctaacatactaagcacaacatctatctctacatcgtctggactagtcggcatctcaaagtgaatttgcatctcatcattgggaagattccgaagaggagcaattagagcctcaatgtcctcgggagagggtcgcactctaagacccagaccaccatcactagcaggagggttggacacaaattcagaaaatgacctatgaggtggtagattccaagcagaataggcaacaggagcaccaacatttgacactctgcccctcagaatcatatccagtcttctcaccagatcctcagtaggaattctcttgttggtgacccgggtagagtcattgatagcactgtacaaataagccgggtatgccctgtctttcaaaggctaaatattcttgaagacgaagtcagcgaccacaacttca

SEQ ID NO: 196621 - DNA, 320 bp, Zea Mays
aattggcgaactaggttagtctttgctgctagggatgggagtgatgcttgttacgacaaggttggtgagtgtactggattgtcacctttaaaaaaacaacagccacttcccaccccattaaactcactccacccaaatcttccaccaaagctatgagagatggagtgtttgagcaacctctaatagcccccacctcaaaacaagtgtggattctcaaacctaaccattttaagcgcccacttgatgctttgcccaacgtctctagtgtccccttcctagagcaccactaccatccaaagtgaaccatgcccacaaaaaag

SEQ ID NO: 196622 - DNA, 831 bp, Zea Mays
atctcggccgtccatcctatgatcaacggcataagtgatttcttccacccagtcattgccagcggcgatgtccagggggcgccgcggcggagcttggccggagctggcccaaccacgtcctggcgtgctaatcctaaatttaactggcgcatcatgtaacctagagggtagccaatgctgtgggagagtcattaccagagctagaagaaatggcgaagctgcccacgcgcacacccagatccgcgggggggagaatcagttccggcgagcaattcgcgcgccacgacgacaatgtagtgctccgattcgccaggtacgcatacgatgacgtagtccgaagcttttgaaccaagccctgggccccaatgacgacgacggcgcgagatggttgtggcggcggcgtgatgcgatagcagagaggatgcgagcacgggaggaaaacgcgagcgcagggaagaagaaaaagcggggcggagtagctgtgagggaggtttaaatggtcggataggtgcggtcatggtaggatatgcgcggtcgccatgccgaagttaccggcggactttgagccgagcgcgccgtggaagtagtcgaggggaggaaaggttagagctgacggcgtccggatccggagttgcaggggcgaccggcgaataaccacagcggaaaccgcgtacggcgcgggagttggctagcagcagcgaacggatctccaaccaatacgcccgagctccacggatccctcttccttcgcatacggcggcgttggcgatgaaccaaccggctgacacggaggtcccacacgtcagccgaccctgcgcacggtgagaaggg

SEQ ID NO: 196623 - DNA, 629 bp, Zea Mays
ccgaatgtaagcactgtaaaatgagccttggtggaacaagcacaggaagaacaacccatctgcggcggcatcttaagatctgtccagcgctacctgcaactgatcggatgcagaaacagaggtcatctccacatcctggttccaccattgagagcatctggaagttcgatcaagacagatctcttgaattgctcatcaaggttttagtgtccaaccttttctcctctccattgacaagcagcacaacttttagacagctatgggctggcatctgccctactaatgatgtgttatcggacgctgctattgaagagaagtttctcagtatttttgagaatgaaaagcttaagcttaaggaggaaatagcacttgcacctggcggagtttttctgacagctgcaagcagttctcttgaaactaagaacttcatctttttgaccgtgcacttcattgataaagaatggaacttgaataggaaaatcattagatgttgctttacggggtgtgaagactttgatgctgagtattttgttagcatgtttccgaatttgcaatcatgccacaatttcattaatgggaatgtgagagcagctgaagaagaaatagtgaaagaggcagtacaaaattgg

SEQ ID NO: 196624 - DNA, 767 bp, Zea Mays
caacgtcttgggcatccgtgtgggagaccttcagtgtggcatcggctgtcagctccaccggcgtcgctcactgcgactgagagtcgctctctgaagaagaattcagtgtggcaacagctgtcagctccaccggcgccgctctctgtgactgagggtcgctctctgaagaagaaatcagtgtgggtgaggattacccctgccggtgaagccccgatggagaaaggtctgcaggaacctagtggtcattcccagcgctctctctgcaacaagaagaaaaaaagaagacgttccaaaggtggcagaggtgctctaggcagtgacaaggctgtttcacattctctgtcagcgtctgaagtcattcctgaagtttcaccaccgcatttaacatctcgggttttggccttctcggatggtatggcaagggaagaattaaacttgagaagggccttgcttgttaccgttactggtacaaggccggaggtccttggttcagaggtattagaagaagtggcacattgtttcagcattaagttggaagacatgacaatccattctgcaaagcctgaggattttcttctattctttcctaatgaagagactgcagtgagggttcttaatgatggtaaagtgctccgaggacctcggttcagcttggtttttaaaagatggtccagattttctcatgcctcttcctcaatcatgtcgagcttggtggatgttgagattaccggaatcccggtgcatgcttggtgccgctcaacagctga

SEQ ID NO: 196625 - DNA, 565 bp, Zea Mays
gcccaggtggacgatctgctggatgcacttgacaatctggaaggtggtggagctgtcgaggcccgtggagatctcgtccatgaatagcaccttggtcgggccgaccagcatctcccctgaaaccaaacacgcgcggttgtagcaacggtaacggaggcaacagcagacgcgcggatgggtttgaggcggatgaaggagagggaggggtacctgttgtgaggcgcttcttctggccgccggagatgccgcgcattagctcgttgccgacgatgatatccgcgcacatgtccagcccgagaatctgcacgcaccagcggcgggtatggcgtcacagccgcggacatcgctaaattggtccaagactccaaggttagggatgcgatgcgagcccccgtcttgtcggcggggcaagcaagcgaacaccttgactgcgactgcgatcgaacctgcaactaactgctcttcctagcctactcgccctgtcgagtgccaacggcgagggacaaggaggtgtcgaggcttttgccatggagggagcggcaatcttcacgtccgacccgtcgca

SEQ ID NO: 196626 - DNA, 535 bp, Zea Mays
tactgaatcgaactaaacaacggaggtgagccccgcgctcaaatcactgccacacgcctgatccgacccccagatgtaccattcccacgcgcaatacaccgaatcgagacgtactagcctcgttaaggaacatggataaaagggggctacctcggaggggaactgtgcgcagaggcgctcgcagaggaatatggcgttgcggtacatgaagaggcggaggctactgtggacgcggtctaccattagggtttccatcgccgcccagcggcggcggcgagcgcgggtgggcgatatcaaggggattggggaagtagtgcggtggccgaaacgcaggcggcaggcgcagcaggggagtgtgagtgtccggactctggtcgtttgaatcagccgtttgaatccagcaggctcttgatttttgggtgcgatgcgatctgatagggcattccaagtttccaacgagtgccgtgcctgtgcgaaacagccgagttacatggccgacaagtgggccatagggttcgctccgaatatgtgaacg

SEQ ID NO: 196627 - DNA, 520 bp, Zea Mays
gacaaattataggggaattcacactttcaaatttactagcattacaaggaggaaaggtaattgtagatacagatgaaaatggtgtcccaaatgaaaggtcagcctccatccttgggcaacaccttggccatgtagcagaaagcccaaccttagcccctttagacatcccaagatttgacaataccaggtttaattcacacaaggaacaaataataaaggatgttgaggtaattttttgttatcggtgcaagcatgtaccttcattttttatatgtactaacatttaccttcctgtatgtagctaaagtttgccttcccaaggcaaaccatacatcttacaagggactggatcctaaggacagttaataataggtggcgagcgtacaactctaagttgaagaaacaatacttcaatcgtgacgagagaactctagaagaaatcctaagagagaagccactaacgactaatgaacatcaatggagatctctagttggaatttggtgccaagagcaacataag

SEQ ID NO: 196628 - DNA, 803 bp, Zea Mays
ttgttttgttttgtgtggagaaagaatgacactgttgctggggccaccatcatctgggaaatcgacgctcttgttggcccttgctggtaaactggatcctcagctaaaggtgaccttgacatttttgtctgtgaattggtttttctggggagttttcttttttattctctcacataatcaaaccaacttgcctaatctattccattactatgttctgtatcattcttgccatatcatttttccttgtcatattctgacagaaaactggacaagtaacctacaacggaacttcgcttactgaattctttgtacaaaggacttctgcgtatgtcagccagacagacaaccatattggagaattgacagtgagggaaactttagattttgctgcaaaatgccagggtgcaagcgaaaactggcaaggtaaggctccctttccttgtgctttgcaaatacttaggttgttcatttgaataattctgtcattgttgatatgccttacacacattgttgatatgtgtagagtgcttgaaggagctacgcgatcttgaagggaagagaggaataagaccaaatccagaaatagatgccttcatgaaggtccttatctaattcacatgtaaacttctcatattttattttgcttatctacataatgttctgttctgtatgatcagacagcatcagttggaggacagaaacacaatcttgttacggactatgttcttagagtgcttggactggatctatgtgctgatactgctgttggtactgatatggacagaggtgtctctggtgggcag

SEQ ID NO: 196629 - DNA, 388 bp, Zea Mays
cttaaaatggtcaaacatttccctgggaggtatgatcggatgattttactgtgcaaaaaagaaaatgtgtgcttctcccgtctaattttgaactactgtcatttttgaaccttttttgtataatccagtacctctgtaccctactgatgtgtgtttgctatattgtgtatatataaccaggacaaatcatgcactcaaagaacactggagaaatcgtatcaaaggaaaactgaatttttatttagcctcaggattgctagaacaagttccggacctggaagaaggtggtatatcagttccagagagcagtcagtcagaaattccgaaggacagtcagggttcagctgacaggagtggaccgccaccagttttacgagcacagcccaaa

SEQ ID NO: 196630 - DNA, 860 bp, Zea Mays
atgaaacgccgctctgagctgatttctatttataaaacctttgctcgtatgattcacactcaattttccactcacattaaaacctttcgttctgattctggtggtgaatatttatctgataatttccgccagtttttgacttcagagggtactcttgctcagctttcttgccctggtgctcatgcacagaacggtgtggctgaacgcaaacatcgtcacattatagaaactgctcgcactttgttgatatcttcttgtcccttcacatttttggggtgaagcagtttctactgcggtttacctcatcaatagacaaccgttatccaaactctctggcaaaacacctggtgaagttcttttcggaactcctccacgatatgaccaccttcgagtttttggatgtacgtgttatgtactattatcacctcgtgaacgtactaaattgactgctcaatctgttgagcgtgtttttcttggatacagccctgaacataaaggctatcgatgttatgattcatcttctcgtcgcatgcgtatttctcgagatgtgagcttcaatgaaaatcgtcctttcttttacaattctttcactcattcttctttttattccacagagtctacctccttcatgagccttcctccaatttctgaaacttcatcagtatcaccacctactgtttctaccccagatgtccttattcccatcacaccaccttccacttccacaccatctcagtcttactcttgcaaaccacctgtctctcagacttacattcgtcgtcctcgctctactcccacggccagtcctgatgacgatcctgttgctgatacttgtactaacaatgatgactctcatgttg

SEQ ID NO: 196631 - DNA, 592 bp, Zea Mays
gtcggaaacagcatcccctcctgtggtcaaccagattacgacgcacttggaccaggaggatctccagaacgcgacaccctcggatctccattcaagtaacctggggttggttccttccagaaccctgtggtgtatgcccccgaaggtttattccagaagatgccgggttttacagcagcatccccaagtttcgttggtcgactctcagttagttcagagctctgaaaacgtttcggtggatgtctccatttcgccttcggattcgcccatatcagatcagctcagatcttccttcagatgcagggttaccaagtctacagtgcatatcttgcctgctcctcagactggtagacctggggctgcgaactccactgttgttcctcctcgtcgcagccggcgtattgccggaattggtgtcgagaaccttgccacttccagcgatggtcagacaagattcaggaagaaggtgatgagggtccttcacgtgattgacgagaacgaaggcatcaatccagaggctctggatcgttacagcaaattgtttgacaagcctctctccccttcccatattcaggcgcttgcagcccttttt

SEQ ID NO: 196632 - DNA, 363 bp, Zea Mays
caataaggaaataattatggaccacagtcattcagatgatagaatattggatgatttttgtggacaaattgaagagatgcccttaaatgctgacaaccctgaagaagtttctgatatatctgacagtagagacgataattcagacatgcttcatgttgatattgaagaccgtgaatctagccctgttaattgggagatagatgcttcagaaactcaaactactattcctggaagtagtgaggtgcaaaatgaccatgcaggaaagaggacctctactgtggatgatagctcatcgtcttgttcatctgactcagtgccttcagttactgtgaatggatcatataaaggaggtgcctggacaag

SEQ ID NO: 196633 - DNA, 583 bp, Zea Mays
tgatgatgatgatgatggagtggacccacaaattgaggatgtcaacagatactactttgaggatggtgaagagaaaccagtttgtttcagtatcttgcctttccagtttggtgaggacgatagcgaggcagttttcctcagaaaggatgttttcttgtgtggatttgtggataaaaatcttcctgtgtacaaggaggtggtagcttggaagataaggcttgacagtgagcatcccaacatctatgtgctttctattgagcacaagtggataaagctgttgaaaccacgaaaatgctatggagacattgttcgatcaacattgattacggtgcaaatgctccacttttttgggagaggggagcaaagaagttcgaatcacctttgggatcaccttgatgaagtttttgggtatccatctacatgcttactttgtctttaccctcgagtatatgcttataatgtttattcgtttgtcttttgaagtaaatacaatcctaaacccgtggaggatgacttgatgaagcaccataccctaatcaagttgtttgtagagaaagatcaaaccttgatgaagtcaaaggta

SEQ ID NO: 196634 - DNA, 384 bp, Zea Mays
tgacaatgagatggtggctggactgtgaggttctgcggcaagggcatcgatatttataggcagaggaacgacagtttataatggagggagtctcgaccggcgtactgtgattggcgacgttgccacagtgcagtcgcaacatcccgaggttggtagggtaacttggctcatggtggggcattcatttagttgtgattatgacaagtgactggcgtgtgctcagacgggtgcacgaggtcttgtcgtagtgactttctgcactgaggtatcacttcaaggtctgcaacccggccctttaatatagcagtttggcgtgcatgacaaggctgtctcagggcagagggtgtaggtggggcttgccaggacgcacaaatgccaaggcag

SEQ ID NO: 196635 - DNA, 298 bp, Zea Mays
tctcactatgctcagttagaatgtggctgccatcaactaacttggcaacaaaattcctcctcttgcggtgcctagcatgaatgtgaaaaaactttgtattcgcatcaccttctcctaaccatgtgatcctagatctcagccttgccatagtacgtttgaaagaagacagcaacaatgagtgttttttgaggcagttcttgaaccagttttcagctggggagagggctctttcgtcctgtgccatctcaaacctgtgaagcagttcttttgccaaggctaactgcaatctcacatggcc

SEQ ID NO: 196636 - DNA, 442 bp, Zea Mays
taacaatcacttaacgcaatcgactcctgcttaacacgagttggctaatgacgtgactatttcccaattaccaacatacaccacctttcgccatttttggataacctgcgcgacacacagctattgtaatacatctcaagttcattcaaccccatcagtagagcactagcacatttcagaaaatttcttgagactacgacgataaggcatcgatcttatcatgcacatcaaagcatcacaagcgtgtttacggaaccaatcagttaacttgatcgacacactacccatgttctttgcctttcaaaatttatcgcacaataggtatcatctccatttgccaatgacaccaacaatacctactgatctattattcaccacacgaacacagttacacgccgcacactagtttctaacatgattcctacataactcgtacttcaag

SEQ ID NO: 196637 - DNA, 1014 bp, Zea Mays
ggctcctgcgatgagaacacggagaacgaaaacgtcaagatccttggagcttgcatagtggtacgtagtagatactctcgcatggttttgtaattcctacacagtgaattttgatgttaccgtatataaaataaactttggttttcgtcctacatacgcagggtgctctgtgcctgctgctactggtcatatacaactgctcggacaagttcctcagcatccgcgagcggaggaaagcgaggtcgagggagaacgccatccagctggcccggcagcagctgaaggcgcaggaggggtggagggcggcgaaacagtttgcgaggaggcatgtgagcggcatgcagggccatctctcgcgcacgttctcgagacgggtgtcgtttcggcagccggtggacccgcacagctccagccgcagggtgcaggaggcgccgctgatgacgcaggagatgtcagactctgccgtgtttgcgtccgagagcaggagcgagatcacggaggtggtgatgccgtcggttgttgtcgacgtcagcgacggcggagaggtcgtcgtggtggacacgaaggaggacaagcctgcgcccaagggaaagcacaggtccacccatacacaggtgttcaagtacgcgtacggcgagatcgagaaggagaagttccagcagcagcaggagagcaggaacctgaccttcaccggggtggttgccatggccaaggatcagcagagggagataacgaggccgttgatcaaggtcgagttcagggacctgacgttgatgctcgggaataataagaagaagaagctgctgaggtccatcaacggcgagctccggccggggcgtgtgactgctgtcatgggcccgtcaggcgccggcaagaccacgttcctcaacgccgtcaccgggaagctcaacggctacaagatgacgggctctgtcctcgttaatggaaaggacgtcaacatccgctcttacaagaagatcattggcttcgtgccgcaagacgacatcgtccatg

SEQ ID NO: 196638 - DNA, 374 bp, Zea Mays
cagaaatacaggtcctgctcatatgagaagttgtaggccaacaaagcaaattgattgtacttgctcaagtgcttccttggattcatctacaaagactaaggaagtaaatgatgcagaaccaagatgttctaaatctgtaaaaacttttgagaatgtcatggccaagaaaagaaaacgacctattctatcatatgatgaagatgccaaggccatgcagatggaagtgaggatgcgcaggagacacagggaaagtggtgtgatgaagctgcgaagatccacagaaaattctgatgaagcgatgtgtccaggaaattcaaataatcaacttaccaatgatcatacgaaggcaaggaagcagagaagggccaacaaag

SEQ ID NO: 196639 - DNA, 297 bp, Zea Mays
agaattcggcaacatctccatgaactctccaaaaatggagctttctccatggcttgtgttctccttgggtttccttgcgcaggctctcgtcatcttggctgacacgaatgcacaagacggtatgttccagtttttccgtcccttgtgtccttgttatttctgtgctcacttgctcattctgttgctcttctgtgcagcttctgggctgaatgggattcaagattcctggaacaagaagccatcaaactggagggtgggcactgacccatgtggagataaatggaacgggataagctg

SEQ ID NO: 196640 - DNA, 281 bp, Zea Mays
ctaacatgccacatttgcgcaagcaatagcatgtgttatggctaggaccctaacaagtggcctggttaggctgtagtactataaacaggcactgttgttgtggcatcctgatccaaagcttaatagaattgatagaatactcctacaaaaagacgtgccttctttttcggaaacttatcttggagtagttggagtgttacaactgctcacttgcagaaatagaaccatgggtgttgacgtgttgtattacgcccagctcagtctcctccatttagagggct

SEQ ID NO: 196641 - DNA, 417 bp, Zea Mays
aaggattgttgccacctcattgacttaccaggaagcataagtaatttggcaaagctgcgacaccttgatgtgcaaaaagaatcgggcaacattattgttggcatgcctcatggtataggatatctgacagatctccaaactctcacaatgttcaacattgggaatgatatgttgcattgttcgatttcagagttgaacaatctgaatggactaaggggacatgttcatgtaactaggcttgagaatattatgacagccaatgatgccagagaagcaaatatgatgggtaaacacttgctagaggctttgacactggagtggtcttaccaggatgaaggcatggacgatgacatgggcaaagaaattgctagtgagattcttcaaaatcttcaacctaacagcaacattatggagctt

SEQ ID NO: 196642 - DNA, 320 bp, Zea Mays
tgtctggcgtggtgatgaaaataggcagtgttggcatcgccttctttcagccagtgcagtccacttcttactcgggcaacagttctttccaaggaggctaaagccaaagagtggtgcttaagggagcgacgtagccattcctcagagggagacaaattcctttcgtcacgagcgatttccagcctgtgaaggatctcatttgccaacagaatttgctgcttaatgttgcccacttttttctgactccaggcttgaaggtgccttgcaagcctttttagcttgtcatggaaccgctgcaaggggcagcagacttccagagg

SEQ ID NO: 196643 - DNA, 345 bp, Zea Mays
atgggactgtcactgctgttcatcagaggagacaactttactccgcttcactctcaaaactgcggatgctgatgatttgtcgaatggcaaagcctgaggaagtacttattgttgaagacgaaaatggcaatattgtacgtgagacaatgaaagacaacgatgttcttgttcagtacaaggttagaaaaaggattgcccaatatcctagcaccctgcaatttatatgttctgcgcttcataagctttgtaatcttctgactgacgtgaaattgccattattttggtattatcagatcatgagggaaacactgatctatttatctcatcttgatcacgaggatacag

SEQ ID NO: 196644 - DNA, 304 bp, Zea Mays
cgccttccttggcgcctcggtgagtccgtgtcctttcctcccgtgccccacatcggttctaggtttttctgcaatacaatggtcactcttatgtgctctgtatgtaactatttactggtcaatgtgtatggtgtttgccattgtaggtggaggtgggtgaagaggaggctctggtatgctcaggttcactggtcgcagaagcagttcggtgtgagttgcgctccatgatgcttgaccatgggtggaggtgtctgggagagaatatttacgtggactcgaagtttgatcagaatgatgggaggac

SEQ ID NO: 196645 - DNA, 333 bp, Zea Mays
gtgctttcattaaaggtgttgtttgttctaagaatgtaaaacacaaacgcatggtgtcaaaacatgagaaccctaggctgcttcttttgggaggagcactagaataccagaaagtcacgaacaaactagcttcaataaacagcattcttgaacaggtcatatcatcattttccagttacatgttcatgcttatttatctcaatatgctcttaatattgattttcaaatgcaatgtgtacaggaaaaggagtatcttaagaatgctgttgcaaagatagaggctcaacgcccacaagtcttgctagttgagaaaagtgtgccattgcatgcaca

SEQ ID NO: 196646 - DNA, 423 bp, Zea Mays
aagcagcatctccgtaaggaatttcagatgtctgatttgggacagcttagctatttcttgggcattgaagttcagcagactcaaaaaggcttttatctgtctcaatccaaatatatacaagatcttcttgatcgctctggacttactgatacacgcactgttgcaacaccgatggatattcatttaaaacttcgtccgaaggatgggacaccactagcagatccaactcggtatcgtcacattgtgggtagtcttgtttatctcaccatcaccagaccttatattgctcatgttgttcatatgttgagccaatttgtatcaacacctacttcagttcgttatggtcatttgcttcgtgtgcttcgatatttacgtgggacaagatccagatgtttactctatgctttagatagcccacttcag

SEQ ID NO: 196647 - DNA, 1712 bp, Zea Mays
ggagaaccaaaagcagtgtagtccaaatcagggtattccgatatttttgtttgttcattagcctggcattcaatttcatcactgcaacttggatcaactgtggtgactaaagtttgtgcaattacacctttcatgtcctcctgacaggtagatccaaacttgtgtccctctgaatcaacagatgtagcaaccacctgtatatcatgcacatcactgttctcttggccattagtgctgcttagtttaccatttgcaagaacttcacgaggctgctgcaaaccttcctggttgtcaaaagttggggtaggtgcacttgcccctttctcattcatgctacctaaattctgggagacaccaatcttcacaccctcattgaattggtgcttttctaggctgctcctttcttcagttgccaccccaccatctgcaacgtcatctaatgatattccaccatcagttgatcgagtttcttggtcttttctagcatcatgccaatcctcctctgcttcataaaactcctctcctgtgtctaccgaagcaacatcagtctcatctccatcatcagctatctcctcgacggtagcagcaggtttgaatgaatcagggtccgaaaaatgtacctgtctcaaaagttgagccatatttaagatttttttagtaaaaaaatatatttaagatttccggtgcatagataaagagaaagtaaaaggcatataagggcaggtgagtttagtacctcagcccggaagtcccttgggaactgattattcacattccaagcaacatcaatatcatcacgattcagcgcaaggatgtttgattgaacgaatgcagtgttgaacatgatgcggaacattgtttccttatgctctatattatcgccaatatggatgaattcaaggaccacatctccataaacacggcaaaacacacttagttttatagggacttctgcctgcatcgcaaccattggtcagtagactttggatttggatataaacataccagtaattaggagacaatcacctgtccataatgtggaagatgcttgcttgtttttggcatctcataaaggacttttgcactcttgttaccggggcttgagtcttgcccatgcacacgcaaatatggcctacaaccaccatctacgtcaaaccgtggaacaacatggagaactactgaatccaagatgaggggtctgctaataggaggccattctgaaccacctccttgtcttgttatatagtgcaaatatctcaaatgtgaaggctgaggattcaagggaaaaaactgttgtataaagtcccttcgagcctgcttatagaccatttctagtgtcttctgctcaccagtgtatgttttgcgatacaaaagcagtccagccaacatgaatgcaagaactggccaaccccctctctcacaatgcatcaaaagcatattatgctgaccttccaccgatagccaattttcacatgatttcaagaaatggtggatcatctcaagctgaagcaatggacacccttcatactgttgtgggtagtccattactgtcatgtcatactcagataatatgtctgaaattcggcttcttttgtccccagaccaaaaattggataccataaatgatgcgtccggaaaaaattcctgcaactgcgcaacaatgccgctcaagtaatcccggtactcatcctcacccatggaatcagtcgaga

SEQ ID NO: 196648 - DNA, 784 bp, Zea Mays
cgtgtatgcacgaaagcaggtcttacatccctccgcaagaagatactatagatgttgttggtctaggcgataggtccttagaaaggagtcctattgtggaggggaacatgtccattggatctgtgcttgcttcagctggctgtgatgcacctttgcagggaagaattactgagcccttttcccagcaggataaacatgatcatactgctacagttgaaccaaaatcttgtaggcaaaaatctccaaatctatctcactgtgccgatggagagggggcagatgatggtggctccagcaatcagtcatctaaggtttccattcatgaaggaccgagtgctcatgccccagtaacttcaggttttgacagaatcagcggtgtcttatcaacagatgcatctgaacctgagcatttgtctgagtgcataccagcacaggatacatccatgatttcacagcttgacagcaggaaagctcatctgagtgctctgcaacaggaaagggttgagaaagtaaaccaaggtccggaagatatctctgcaaatattgggccagtggaaaaggaacatgttcatggggatctgactttgcaatctgctagtgttttactttctattagctgcaatggttctaatcaaggaactaaatctgaaaccaatcttcaaccagggactgctacagaggataggatggcttttgaagagcagaatgcggagaagtctcacttagaactcagtggtaccaacaaggctaatcaagctctgttcgatgatggcagcgtcatgaa

SEQ ID NO: 196649 - DNA, 477 bp, Zea Mays
gctgctgctgggcccagccctccgccgacgcctttgactccgcaaccccatgccgacgcggatgcggatcccgcacacctcgccaacatcatcattccgccggagtcgtcgcccaggcgcatcacgcgctccatgctccagcccaagtctcgccttcctaccgccgctcgttctcctgacaatgcggcaccgctcaaaccaaaactggaaccgccggaagaggaggatggcaagccggttccagcgttgaggcgcttcaccagatcactactggtcaaggacaaggacagcaacgacgacgacctctcaggcaccaccaccgccagcaatgcctcctccccttcgcccaaaaccaacaccacaagtaccagcaggagcagcaacaaggggaataagaatacaaacaagattcccaccaacctcagggagctgctcgccaccggcatgctcgaaggtcagcccgtcaagtacatcatg

SEQ ID NO: 196650 - DNA, 597 bp, Zea Mays
tgaagagctttgatagatattactttgcttcatttctgtatgtactctaacagcataggctttcatcttacaactttgatttgtttggagacatttttaatgacattcaattaacgcatttgtgtattgtatgttctgctaagatttgtttgggctagccattttgtagcatgagtgaagatgcatatttttatagcttatggatgctgtgaactgcagctagctgtccatccatagcatgtgaaagaacagaggtgagcaacgacgtagggagttacattttttatttaatccctggtttatgctttttgggtgcagaatgatatggaagttcctcaccagtatgtttctagggggatgcataccaaaagtagcagcagcaatagcctgcagagttcattccataagccatctaaagcaaatcaagctttgaagaggtctacaagtcaaaaggatttctttcattctagagacagcagctccgtgagtacctttgtcttcattatattccttggactgaaattggataagatatcaaataacgtcatccttataaaaaagttgtgctacagtatcatcgcaccatcttgtacaatg

SEQ ID NO: 196651 - DNA, 386 bp, Zea Mays
cctgccgtaaatccactggaacggagagcatatttaattcaggacttctgttatcattggaaaactcgagaaaatttaaatggaaatctactcctggtgtctcgtccttgcccacgcgatcttctttaccagaaacaaccattgatgtagtgccttgtctttccacagcacatgaatattcgacacactcagaacagaacttagaatgaatacaggcttcctgatctaacttcactggcaaggcagagttataacatggaaaatctgactctctgatcagaaaagcatttggaattttgttagaatctgaggctggttcactgtgagaacagttagtgacagatgaaaaatctatctcatgatattcttggcagaaggatctgaaa

SEQ ID NO: 196652 - DNA, 402 bp, Zea Mays
agcaccaggccctgctgcctccggcggcccagcaacagcaggtttttcatgctgctcctgtctccatcgcccctcaccaggcgctgctggcccaccagacccagcaatatgttcatggtgctcttcaaggacagggaggcacccccctgcaacacactctgcagaccggccccttgcagggaggcgctacccacggcatgctggctccgccaactactccatcttgggacgctcagtcccttgcatccgctttcagcactgtgtccctgactccgccccagcagactgactggtacttcgacacaggtgctacctcccacatgacctccaacgccggtactctatccaacacttcaactccctcccttactgcaccttcttccattattgtcggtgacggct

SEQ ID NO: 196653 - DNA, 649 bp, Zea Mays
ggcgcctcccgccattgcatgaggactgggctatcatcagcatccaacctttacctgaccatgagattgcgttcccggcggtgagggatgtggttagagaataccttgtggagcaccgtcaacttggggtgcgtgatatccagcggtcgcacctgggacaagttttggttcagtttagcagcattcttgaaagagacaaccttgtccttctcggtccgcagcagtaccttgatgcctccttcactgttcagcgacacaatgatgcttggaaccatagggccctgtattttaatcgggaatgttggctcatgttgttgggtttccctctggattatcgttcttctgagcacttgcaggtggctattggctcctttggcagattgattctgtgggaagaagacagacgcaacatttctaggactttgctcagggttcggatcacgtccctggaggaggtcccacagttcattgttttctcagacgctgatggctttcttggagattcgtggacggtgcagtgtgagatcatccagcaatctttgttgggaggtcagcctcaagatgaggacccagtgccagcggccccggcggacgggcaacagcttccctttgagttttttggcctgggtcaacctgtgccggcggcggg

SEQ ID NO: 196654 - DNA, 1554 bp, Zea Mays
atttttggcttagaaaatttatctggctaattgttttctgggattttgattctaaccattgatggcttgatttttggtgttgtttttccttcaacagttatgtttggtactcacagtatcttaacagtgttgcttttcttttgaatttaacaggtggttaattgtaaggtgtcattgaagcgtctggaagatctcctgttggctgaagagagattacttctgccaaatccacctattgatcctgatcttccagccatttctatcaagaatgggtatttttcatgggaatcagaggtaaattcatgttttatatatttttatttatttgccactatcatttattttcttcaatcttgtaattgctgctcttaggattatggtagttgatttcttgtccgctgattctctagctgtcggatattgaaaaacatgtcattatcacaactctcttcatggtagtctgaaatggacagtgaatcaaagtatctataggctatcatgctccatgggcaggtgtaagatagaaacttattaccaaatagcccactggttttgtaagatagctaaaaacagatggtatctgttgatgtcttcctagttttttttgacccggttgatgtcttcctagttgatcataagactcaaggtgctactctttttgccccttgtagtcttatatcaaagtcctttttgccaatatgagtgtacatctattactgtgaagttcatcggattttaaaaaccaaaattttgaatgttggcaggctcagagaccaactttatcaaatgtcaatctggatgtacctgttggaagtttagttgcaatagtaggaagcactggtgagggtaaaacttctctcatatctgcaatgcttggagaaataccaccagtatctggatcaggtacctcagtggtcattcgtggatcggtggcttacgttcctcaagtttcctggatcttcaatgctactgtgagattctctgctgctttgttgtgttaaatcaaaccctatataacttctgcagagatctaactgtgaccccacaggtacgtgacaatattttgtttgggtctccctttcaacccccacgatacgagaaagcaattgatgccacttcattgcggcatgaccttgacctactcccagtaagttttaaatacaagtattccaacttcactgttcaggtggaaattttggaaagctatggcacccatttgatgaagaaagagcttcctggagaacatgttccttcatttggaatgttttaatccagtgatgcctttgtattttttaatactggcgcactgttttaacttgctactgtacattaacaaataatgcatttggttatgctttctatcagggaggcgatctgacagagattggtgaaagaggagttaatattagtggagggcagaagcaaagagtttcaatggcaagagctgtgtattctgattcagatgtgtacatatttgatgatccactcagtgcattagatgcccatgttggccggcaggtgaattcaccatcttgcttgtggtttctattttta

SEQ ID NO: 196655 - DNA, 445 bp, Zea Mays
aaatgttttggcaaccaacattgcggagagtagtatcactatagatgatgttgtctatgtgattgattgtggtaaggccaaggagacaagctatgatgccttgaataagctcgcatgccttcttccgtcatggatatcaaaagcttctgctcatcaggtatgttactgctgataatatgtaactaggctctttgcaaacatgaaaagtccattaacagatgcagttctctctttattttattcacagaggagaggtcgtgcaggccgtgttcagccaggtttttgctatcggctctatccaaagatcattcacgatgcaatgccacagtttcagttacctgaaattcccaggactcctttgcaagagctatgccttaccatcaaaagcttacagcttggagcagtatcctcctttttagccaagtcactgcagccaccagatcca

SEQ ID NO: 196656 - DNA, 299 bp, Zea Mays
tgcccaggctaaaagttctagatttcatggacaacaacttcacaggcacagtccctgagagcctgtactcgtgcagcgacctcaccgcgctccgactgtcctctaacggcttccatggccagctctcgccggggatcggcaggctcaagtcgctcaggttcctgtccctgacaaacaactcgttcacgaacgtcacgaacgcgctccaggtcctcaagagcgcgccgagcctcacgactctgctgatcggcgccaacttcagaggcgaggcgatgccggaggacgagacgatcgaaggc

SEQ ID NO: 196657 - DNA, 521 bp, Zea Mays
gaactctactggaaagctgggaagcacgtggattcagttaataaattatgactggcatgccactgtgaagttaaaagggcagcagcagacagttgagggcctatggaggcatcttaaaccacctacaatggtcattggcttcagtgaagggaattactatgatgcaagacagcagcttaatgaatgtaaaggatcagttatctgcaatgacgatgtaaatggtgggttttgcatggaatctattcaaaatggggtgatacgattcaactgtgcagactctcttgatcgaaccaatgctgctagttactttggtgcacttcaagtttttgttgaacagtgtagtcgattgagcatctcgcttgacatagatgcaatgtttgggttgtcaagtagatattctgaatatgatggtagaaacactcgttctttgccccctggatgggaggagcgctttgactctgtaacagggaaatcattttatattgatcataatacacgtactaccacatgggaacatccat

SEQ ID NO: 196658 - DNA, 325 bp, Zea Mays
cgaatcaaatcgagctcaaataatttcatgcataaagtgcacattaagagatgacaagcaattagttgaaattaagcatattgtatgcctcttggtgatttactaaatgctaggggtatgcacaataatgtcacattagctatttcatgacgtaacaacatcagtgaaatatatatggggatgtcaggatgtgagacaaatacaacaatgatagagaatgtagtccatctcttcactaaaagaagcatgtcttggagatttgttgggtaaaggatgggtgtttgtgatataatcagaatccgtgggcttaatactctctaagaac

SEQ ID NO: 196659 - DNA, 745 bp, Zea Mays
cagtgccagggaatggaagaataccctggcggccttggccacccctcttgctgcgacggttggggtggtcggaacgtggagccgaaggcgccttgttggaagcagcaggagccttgttggaggccgtcgaagtcccgccttgtggaggtttggtggaggtaagcaggacggcggatggagaagacgcacgatgggccatcgtgagttcctccaacaggagagtggcccggacgtcgtggaacgtcggaaagcggcgaccgaggcgaagatgatggccgatgtcggagaaccggtcgctgaggccgcgcagaacgttgaggaccaacgtccggtcggtgactggttcaccaagatcaccgagggcatctgccatggttttgaaacgacgacagtaatcggagacatgtagatcaccttagatgaagtgccggaactgagcgtcgaggtggagggcgcgagttttccgattcccgagaaactgattctcgagagtcagccaagtggtgcgggcagtggcgtcgcgttccatggccatttcagcaaggtccagggagatggagccggagatccaggacttgacaacgcagtccatgcgtgcccagtcggggaaggcgcgggagtgtcgtcgaggatgtggctgtccagggagtatttgccagtgacgagaaggaactcatcgcgccagcgggtgtagttgttgttggcgaggtcgaggacgacgtgaacgagactccggatgttttgc

SEQ ID NO: 196660 - DNA, 372 bp, Zea Mays
agccgagccgatgaggcacaagtatttcgtccaaccctacacacaccacgacgacaacagtgtattgatatggttccagagttacccaacacatcaaccaccatatccatcatcgacaccaatcctagaaacctctgacttggccaaactagaccacattgacatagctcaccacaatggacacacggctagatttccacgattgacaactccccaaccttaaccaccataggagaactccatacctcttatgggtgtggcccatggctcggatggccactctggtgacagaactaaccaatagcggtagataggcacaagtagtggtaggtttgccgatggcatgcgtggtcctaaggatggcggtcgttg

SEQ ID NO: 196661 - DNA, 288 bp, Zea Mays
cctgcactgaagactgaagctgcttgagtcacgcctgttccgacgatttttgcagaaatcgcccagcctacgggactgattgggcttgaagttgtggcgcgtacgagagatgcctcatgccagagcttctgttattagagactgaagttctgcaagcgcgtgctgctgctctggagttttagcagctgtgttgagtggttgggagccatggagtcacggatggatcagtacgaggttttggagcagattggtcgcggcgcctttggtgctgccatcctcgtcaaccac

SEQ ID NO: 196662 - DNA, 3175 bp, Zea Mays
aatttatgcgcagaagttgttcatgttggtcagcttgttccttgtatagtcctacgagtcgacgatgatagtagagaaggaaaagtaaacaaacgggtttggctatcattgcgattaagcctattgtacaagggacttgccctggatggcttgcaggaaggaatggtaatttttaaccaccctattctggatgtacttcataagcttttggggcagaaaaatattaacattgtatggttgttccattgtgcacctctgtccttaatatttttatattataattcacaaccattttagtgtttggttcttgcttaaatgatttgattattctactgaaaaaagttgggcaaaaatttacatgcaaaatcagaataactaactggtagagcatgcacactcaagcttgtttttatctgtaggagcatattgcatatacgctcagaaaagatcagacccagtttcacagtgaaaaaaatcctaacatcatcccccttcttgttccttattgctattgggaacattcaccatttttaaagaatctcatttcctcctcaccccatcccatgagacatggtcacatggaccttccttccttccctcccctctctttttgtggagttcaccaggcttttcaataaattatttatctaactatttttttgtttataataaatcagttgtttctttgatagctatactgactattgaatctacatatgttgaggtgttaacagtcttgcaaccttatcgaaaacaaggagctcgatagggcatggttgactatattgtttttttgctacctgattactacttgatctgcagtatgctagatttacttgaccttttctttgtatgcctgttttgcgctccctgcttttctctgacttcctaaaatcttggctgttgaacttcctaaaacttgacaatggatgcatttaaagctattgggatatgctgtgtgacaattattatactagaaatgcgtccacaaaagtgttattttattattatatgttgatgtaaatttatagaaggtagactgctaaggccaaagtcacataatagggaccatgaaacatcaaataaaaagaatggagtcgttcccattggaaacaattagattctgagtcaaatcttgtatgcaatctgttggtctgcgtcttatcttactatgtgttatgagcctagagcccagcccatatgtagcatgttagggttaagggggtatattttgtgaacccaacacaattcaatgtatcagaactatcccttccaatatggtttctagccatccttcctgaccgccgccacccatggcagatgcgccaccctccctccgcagccgacgctggcaggatgtcgagcctggtcgcatctccacctgccactgccctcctttccgcagtcggtgttggtggggcatcgagtctgactgcgttgccgccccctctgcctccagttctcctgctgcctgggcacagggcctggtagcaccgccgcccgcccttgcccccatccttgctatgccgggtggtctaggcttcgctggtttcagtgtcgtggtcctcgctgacttggcctgggtgctggcggcctgacccatcacccatgctgacctgatcaccctagccccgtcatctctgaactgggtctaggcgacctcggcacgtgggaccttccgatctgggcccccaatcatggcccctctactgcccatatttgtggtcccacgatggccaaacctctttcccacgacgtcactgctgtccattctacgcttgctgcagcccttgcgtccgccaaggccgttgtagctgccgcccggaagtgtgagcgagtcatggccctcgtttgggagcaggaaagtattgctgtggatgccctagcttgttaacttgcggtggccgagtgccatcttggctatccttcatgttccaaattccaatccacccctagcttcgccggtggctaagactctctcggcatacgaggctgctatcaatgtcaacctccatgcttagacgacgggtgtccagagcattaggtccctggttctcgttctcctcgacatggctttgtccatgagcgtgtggccttcagggacgtccgtgtcctccacgtcccgatgaccttgtagcttgctaacatcttcagtaagggaattctatcctcagttcttggagtcatcttcagtaagggaattctatcctcagttcttggagtttcggtctaatctcaacgtctttcgtggctagagtttcgacggtctgtgtgcgggtggtagactatgtcttgttgtatgtgttatgggtctatagcccagcgcacatgtagcctattagggttaggtagtatatattgtaagtcctacaccattcaatgtaactgaactgcccatgtttgtgtttcattaggtacttactgcccaagtcaaaagcatcgaggatcatggttacattcttcattttggagtatcttcctttagcggatttatgcagaaggatgacaaaggtacacttgagcaataacttcatcagatcgtgaaatgctgatgtttattcatgtcatatctatataactccacgtttcactagctgatgttctaatagcagctgctcataacggattgcactccctgataacgtataattttgcctaggaatctagaatttcttctatatgttttagtttggactggacttcctgttctgcaggcttggtagcttaggagtttgtggttattttttttgtacaatttcggtattctatctaaaaaaacatacattttatgggaaaaatacaaatgaatctgttccttctctcaaatgctttatttttggtgtatttatgcataaaaacagtttagttcttacttcttagagtttcttttgttgtcctcatgtttgtagttcatgcacttttacaaggcatagtgtggagtatataaaacgttgtggtgttacttatgtaactttaagctgctctatatagatttatatgcttgctaaaagataaacattagtgtaatttgtcttacttaatatgtgccatatacttggaatctgtttgatctctcccattgccaatgctgatcgtgatattctttatatggaggtactcagggagatgtttaactgttgttctcttgtacagaagatgtgaagactgagcgccg

SEQ ID NO: 196663 - DNA, 961 bp, Zea Mays
gaaaggagagtaggagacaacacgaggcgccgaatcgaaacagggaaagccaaggcccctcccccgcgtacgcgtcactgtgcggcgcctcccccttcctcgctccgctttctgctctgttcgtgtgtgagtcgttgacgaaaccccaagtccatgtgggaggttttgacttgatccaaccaagaacgcgcatttcagccgtaaaatactcgtaccggtttccaggtccggtcgcgtcttgctctcttccgtccctcatttgccttcccgtccctgctattcgcgtgtgggcctttgcttacccattcttgcttccgctgtctttgctgcgtgtaaatctgatccagtacttgtgtgtccgcgtcactggggattctttactttaagttggatttggcaatgtcaatggaaggagcgatatctgatctgaattggtgacatttcttgctgctgctttggtcctggggtgggcggattggagagcgaccactgtcttgccggttgcttttggggtagctactgttcttgtgaatttctgatgcggagtttcgctcaggatagggaaaggagtgatctatagatttctaggcttctgtagggaaagaagtgatctttgatagatttctacgcttctgttggcgattcctcttcatctcaacttggggatttctgccgaggagactttcctgactggtttgggttcagctgaggagcagagatgaggttgtctgttcgtgtgatcgaggcccgcaacctgcgggccatggactccaacggcttcagcgacccgtacgtgaagctgcagctcgggaagcagcgattcaagaccaaggtgatcaagatgaacctcaacccgacttgggatcaggagttcagcttccttgtcggtgatatcaaagatgtgctcaagcttgatgtctatgacgaggacatcctccagatggatgacttcctgggccat

SEQ ID NO: 196664 - DNA, 476 bp, Zea Mays
aataaatgctagactgctagacaattagaggctagagcagcaggctagaaacactgctgcaggtcaacattcaagtgaatcaacacaacgttgcttatcccaaagagagaacagagcagattagcagaggcgtaccatctgacgaggaactcatctctagggctctaggcgtcgtcggttgcgggctggggcccggcggcagtccctggcgacgacattctaggcgatagtccctgacggcgatgatctgaagacggtggtccaggcggtgcgacggtttggcagctggcggtgcggagacaagatgaaagaggaaagaggcactcatgtatcgatgagaatgagagaagagagataagagaagagtattctgaaccctagtgggccaaaaattctcaagagacggcctcaaagcccatgttattaccatcatccattcatcaacccatctgattgtgggctagttggcagatcac

SEQ ID NO: 196665 - DNA, 546 bp, Zea Mays
ttgccaatgccaaaataattacctaatgctaactgttctatcggactaatgggtctgttaggactatgaactgtccaccgataaagtttgtgaaaaacaggagcttacctcccatgcaatgtcaagtgattagatttttgttcaaattaaaaggcaaactattgagcaaggtaaaggaagttattgtctttactgctaagcaaagcgaaggagcaagaagaatgacctcgattgaaattaagtcacagtaatttcataggagtgaaatggagtgatataatttgtagaaactaattgtgaaaatgtaggagtgataaactttgcagaaaccaaatcgaacctggcaccgaaggctgctttgtctgtgtcacgctcgcggggtcgctcctaccaacagcaacaacaacctacaagaggcacatatagtgttatcgagcagctgcacagtgaagcaaaggcaagactggcggcttatcagggagcgtgctaaatgaaaaaattgttgtgtcgaaacttcagatgattggggatggtagtaccatcaaa

SEQ ID NO: 196666 - DNA, 661 bp, Zea Mays
ctgaaatttggccacacacaacatggaaaccctcatcgggcacatcgttctcaggaagtaatccaacggctgggactacaccccagctcctttataaacaggccacctccccatcctttcgacgatatcatgtcacctggccgctagctagggtttggtctttacggccgccgccgcttctgcagacgtcccgtgccctttgctgtttcagcgttctttcttgtagtttcatgaagcatcttggttggtttgtttcttgagtgtctcttccttttctcccctttgctcctctttgtgcagttttgttcagagagacgatgttttcctcttttttgtcgtccttaagaatttatttctctcttctgttgcgagctctgatgaggactgtgatgaaaaacacaatcaaaacacaccatctttcgggactgattggctcgatacgagccatgctgccaactctgcaattctgacgtccccattccagcccgcagattttcttttgcatttccacgcttttattcatgcgtctgtatgctgcatcgtaaaaaaattgatctgaaatactttgacagtggcctgtgacgaaactcagcaatcaaaaacaccatctttcggggctgattggcgcgagccatgctgtcacactgcaaagaattctgag

SEQ ID NO: 196667 - DNA, 542 bp, Zea Mays
gttataccttctcctgaggtagagacaacggatcatatgcaggactcgtattggtccggattgagcttgtataatcacccagttcatgacctaaaaagagagagtccgactacaaggccaagacggaaacggagatcctcaagacatgcatatatacctttgtcggaacttggggagccggttcctaaaaaacagatacaagtgatggaaagatctatcatccatgtcgatgagaagatggttgatgagttgaagcccactgcacttgttttgacctttggcaggtcagcgtctattccttcagaactggatcttgttaagatgttcagtctctatggtccactgaaagaaagggggacaaaagtacatagggaaacaaatactgttaaggttgtcttcaagaaacgtgtcgatgctgaaagggcttttagtgctgcaggcaagtatagcacttttggaccttcgcttcgaagttaccgtcttgtcagtatgccactttctccagagacacaatcagcaaataatcctgaaaatcatggctt

SEQ ID NO: 196668 - DNA, 275 bp, Zea Mays
atcagcgactgtggcttagccactgatttagggaaacgacagttttgaggagtgtcctgactttccacaattctcgcatgagttggtgttgtctaatatagatttagaacgaatgactgggacatccagctcaggtggaatgaaaggaatgacaatctgtttttcacatgactgaggtgagctaggcagctagggtggagaaaaacgaggataataaacttgttgataaacaaccctccgacactgtttgattttaccagatgattcctctgcaa

SEQ ID NO: 196669 - DNA, 1023 bp, Zea Mays
gcaatagtagtctgcctctgacgtgttctgcctccgacgcgttctgcctccaacgaccgcaccatacagtcccgcgcaacaaaatgaacagcacatacacaggtttatgagacacgtttcgttctatctctctcagtgagcaacatacaatacacagctgcgcttataagccaagttctgtcactctcaatggccgatgtggcgctaataaaatagatggcatacctggcagcggtttgtgcggcccaatgatttttatgtggacctaaggcccatcgtcccagcgtgcagcctaccgtgcggccgaccgcattctcgcattcgacctaatcaccgccggtggctcttcctccactgcgctcaactccagcggcctcccctccctctcctccaccccaccatcggactccacctcctcccccaccgcaccgtcgaactccacctctccaatggcggcctccagcccactgccgtcctccaactcctccagcccactcaaccctcatcttcatgcgtggcacaatcgtccccaatctcggagatgaccgccgttgcctgaaccggtccggccgcctctacgctcatgcctctcacgtttctggagggtgcagagtagccggtcaactggtcgagctccctacgcctcctgcgcacggcctaaaactccctgctcttgcctgcacgcctcgctctgcttagcatcggagcgcacggacgtcgcagccatggttgccagtagaaccttgacggctgctactggtctccctgcccctagctcgagcgtgcatagccgatgggacctccaccgtttcccctcctcagcgtgctccatgctgagctcccgcaggccacaacgtccgggtgccgatctccatggccgctgaccaccggacagaggcacaatcccgtggacctccaaccctgtcgagccctctcagcctctcaggtccgcaatgaaccatgctacaaccggaggaatcctttctctctcctccaccaccgcatggcgccaccgagcgactg

SEQ ID NO: 196670 - DNA, 414 bp, Zea Mays
gaggaatcgaaccgcgtggaagaggaaggggaatcggccgcgctgaagtctggccgcccgtggaagaggaccactctgttcatgcatcatcggtggaagaggaagcgtagggttagacgcgttgcagtgggggaagaggaagcgtgggatgccagcagccagccgttcgccgcgttgcagtggtggaagaggaagcgtgggatgccagccgctcgccgcgttgggaatggactgggagtggagtagtggagaactggagactgccggccgccgccgtgtaggaagaggaatggactgggtcactgggacttggacgcgtacaggctacgctgttatttaaatagacttatagacctcctcacaataccgcagtacagtgccacaacagcccaactcaaagtctgaataccgcag

SEQ ID NO: 196671 - DNA, 621 bp, Zea Mays
gttttatgaagcttcaacatgaaacctctgatgccgaggtgctggtctcggcagcatcaaggaacctgtcgtcctcttcatcagcatttgtttcagcaaaccagtcccctttcttcacgccacggtcactgtctgcccgtgtcccagagcacactgaccctgagaacaattgctcctccaatggtattgtgctgaaaatcagtgatatactctctggtgattccttcacaccacaggaggagttaccatcagctagcgttggggtcttgccgtcagatgtgtctcctcctattagcctgtgcacttcaagcaactttggcactccagcaattgtctacaacaatcccagctttgtttctactttcaatggcccatgccaaggcagttcatcagcaaccagcaatggtggtcgttcggctccaaaggaaaagcacaagaggctagggggaatatatcggaaatcatcatcgtgccaaccgacaacgtcgtctgcctctgtcagcaggcttcgcagttacgatgtgtacgttggatttcacggccgcaaggcttcactgctgaggttcacaaactggctccgtgcagaactagagatccatggaatcagctgctttgtttctg

SEQ ID NO: 196672 - DNA, 485 bp, Zea Mays
ctgaactcatcctgtgtcatgcaacaggtagacccattaaaatgtgcaagttcaggtatgtttgtgaatcttagtgctgtgatgctccgtctatgcgagccttttttggataacatggaatcaaagaaggataagattgatgtcaaatacctcttttgcaacaatagaattgatttcaagtgagttttgaagatgacgtgcctgaaacatctgatgtgcaattctgagtataatcatgttctaaattatttcactagctgatacattgcatttgaatatagggatttgacagctataaatgcgtcttcagaagaagtctcatcttggatagagagcataaataacgagcatgctcaaaataatgccagtggagaggctcgttttgtggaatcacaggaagccacaagctctggcaaaaatagtgcatcttcacaacttcggtgctcaaagaagaacttctcatttgtttgcgaatgtttcttcat

SEQ ID NO: 196673 - DNA, 918 bp, Zea Mays
gtcggccggaccgcgctgcagctggtgagcccactttttggctcctgcgtcggcgaatccgttccgtttctcgtttcgtgttgactgttgcttgcggggtggtctgacgttttggagcttccttcgctgcagttggatttcgatggcggggcgccgccggagcaggcgtggcggaggcggctcaacagccacgcgaacatcctcaaggagttcagtgtcactttcatggaggcaatgaggatggtatggacgcctcggggatccggtcctctgtgttgggtgttttaggacatgtgctttttctattcctcttctagttcaaagctgttgccttgttggtgctgcctgctaagttctgctcccgcaattgcagatgagccttggcctgagactatggtcgtatgttcgggaggaggcgtcacatggacgggtgacatcagctatcctcctatgcatgattttcttcagaacacaaatggatccaaaaactgtgctgacagggtgtgatctgttgttgtgcttgcagaaagcaccgatcgatccgttcacaaaagagcgctgtaaaccgtcagcttcccagggtgtgccacttggtgggatggggtgtgtgctaatgccattgcttatctgaacttcatatatcgatgcattctggagaactttgccttcatatcagcagtatcggtttttacaggagcggaagcatttcgagaggtttcaggggagagttcaagaattggcacatcatacctggtctttgtgaaagttcgccggtcatggagaaccagttctctgtaatgtttctatcttatcatgctgtttctattagactttggtttgctgtatgatgtatgtgtgcaatgctttatgtactcttgaagcttgatgtgtatgatgatatgtccttttgagcactat

SEQ ID NO: 196674 - DNA, 536 bp, Zea Mays
gaaaataatagtgatgcggttatagtagcggcagagaaagctgcatctgcagttgtagaggctgcagtgtcgactagtgtctcacggtaatggggagaaatgcttacacaaatgcacattatgtttcacattgttttctgtcactgacccttttatttatctgagagttcactttgatgttacagaagcacaaatcaagttggtgaagaacgtgcagcggaagaagctgtacaaaccagcgaagaccaggatttggaaaattttgttatcagtgacaaatcacagctcttacaacttagagaaaaatatagcatccagtgtctacagattttgggagagtatgttgaagctttgggtcctgttctccatgaaaaaggtgttgatgtttgcctcacattattgcaaatgagcatgaaagaccaggagggatgtgaccactttgctcaactccctgatgttcttaaattaatttgtgcattggctgcccatcgaaaatttgctgcactctttgttgatcgtggtggtatacagaagat

SEQ ID NO: 196675 - DNA, 616 bp, Zea Mays
ccaggtactgctgaatcacatgctctagtaattcctgcttcagactgtggagatgtcacattcacagatagtccatcaacagcaatggatatccctgaacaaagactttctcctgttggtttcacaactttggatgcatttgaccatcaaattatggccccagctcaagatgttgttgctaaagttcaagaacctcataatgatactgcaacacctgcacagtcccactcgcaagttttatcatctggaagatttgattatcttaccaaagctgaagcaaagctcacatttgctccagaatatgcagctgttgaaattttgattgctgaggccccaacaccattgtttacaaatccatactttcctagatcaaagaaaccaggcagttctagttttagtgcaagagtttattcatatgatgttgcacaaagctctcaaattgaatccacaggagacaagccagataagacttctaaactaatatctggtaatcatttacatgatattagttcatcaaacttgtacacacttgtccaaggtgggaataaagggagtgataagatcttaaagagtactgatacacagccctctaagggagaattgtcaccacctattt

SEQ ID NO: 196676 - DNA, 519 bp, Zea Mays
agcagggaacataagtcgctccaatctgaggatgcattggtgagccaatactttcaagaatcctcctctcctaagatggcaaaatcaccatcactacaaaggacacatggtatgcttcaattttggcgatcagatgccaacagaaactctcatgattcaccaaaggatctaagtccaccttctgaacaaactatggacaatggaatacctatggttgcaattgaaactgaaaggacaccgtccattaagagacagaatagttttgaaatgaaattacctgatcttcctaaagttgatgtacatcctatacagcggcagtcatctaagaattcagaacctgactcacccatatctcctcttttgacttctgatcctaagaacgagcggtcacattcacaaacttttagcagaccgcagagtgaacaagatgatacgagttctgaacgtagtgaactggatgaggttcagcaccagaaacctccatctttttggcgtcttgcaacacttagtatcgctgaa

SEQ ID NO: 196677 - DNA, 697 bp, Zea Mays
cccactggtgagggcttgggccttgcgcactatggctggcattagactacacgttgttgctccgcttgtgttggttgctatcaagaaatgtgccagggatccgtctgcgtatgtaaggaaatgtgctgcctacgcactttgtaagctgtgcgacttgattccagacgaaaatgcggctttggaggaggttttgtctagtataacccacaccttcttctctatgcagcaactctgcattccatatacgtatctcaagcctgccctgttgatgttgttgcagatcgtggacaccttgttcagcgacaattcccctggagtagtaggagctgccgctgttgcatttaagtcggtctgtccaagttgtttaccgttagtatcaaaacatttccggaggctatgtgagaccctccctgatatcgaggaatggactcagatcgtcctcatcgagatcctcttgcgttatgtaatagccagacatgggttggtcaaggattctttactctttgcttcagatttaccgacagagattcatggcgttacagattcagatgctgttgctagcgtgcccacccaatctgattctatcgtcaatggggtttctgatactatatcaagcatcatgctgttccggcactacatcgaacaatgctcaggttcctctgatagagaaggcaataatttagaattatcgtctgtc

SEQ ID NO: 196678 - DNA, 323 bp, Zea Mays
aaccaagaatcgaagaacaagtgtatcccttgccaggattaagaaattcgggagcaaatcagtatgctattctggcagtgacaaagacaatgctgtgctagcccatgaagtgaatgctaggaggttgaggttccattatatgtatcttatggatttgttttccaagaaaggatatgttcttgggagcacaccctatatttatctagtttctttcattactaaccgatctgacaaattctgcttattatcttgtacagatacagtggaagactcagctcaaattctccatgctgtgtttgtgggatctcagacctggagccttg

SEQ ID NO: 196679 - DNA, 539 bp, Zea Mays
cgattacttccccttaaatgtatcatcatcctttcctgcgagtgtggggggtgtacaacccacaccagcgcctcctggcggtcgtaacccatcgccttcaccgcctgcacaagcacgagcatcacctgcaccagcagcaccgttgaacatctccgggcctgcaactgcgactccgagagctgcacaacccaccccagcgccccctggcggtcgtactcgtaccccacagcatgcagctgccgcaacgaatggtaacaaaaatgggattgtcattgtagtctttcactcttttgttcatgaacactgtttcagactttcagtacagaactgccgagtgccgactgtctgttcatgctttccttttggttggtttgttagatcaaacggcctccggatcatcagagaacaaaaggaaggaaacttcgaatagaaccaaatggctgatcgcttctattgcaactgggttggtggctgccttcaccagcctcgcactcaccatgtccatatggtaccggcggcgaaaacagcaactgtatcag

SEQ ID NO: 196680 - DNA, 529 bp, Zea Mays
catgcttcgtgtgctgatgctacacgaaattggtggagaggtaggctatactgacgttgttgcagtagacgaggatggcacacgcgaggggctgtgaaagtcatggagaagctaacagagccaggatgcctcggtaacgctattggccacagtgcgatactcggccttagcgctggagcgtgagacgacatgctgctgcttcgaggacaagcagacgaggttggcacccaggaacatggcgtagccagaggtggatcgcgtgtgttggggcagccaacccaatcaacatcggtgtagacgaccagctcagaagttgcagaggaacaaagaaggccttagtcgaggtgccgcggaggaagcgaagaattttcttggcagcgacgaggtggggctcacgcggggtgtgcatgtgaaggcgcacctgctggaccgcgtaggtgatgtcgagccggtgaaggtgaggtactggagagccctagcgaggctttgataggccatcaatgtcgttgaccggggcaccgttgtcgtc

SEQ ID NO: 196681 - DNA, 424 bp, Zea Mays
cagaattagattctcattgtaacgaaccataacgctataacgaccgtcagatcaaggtcagactatccggatcacaggcgcggagggactcgaccagagttgcacatcaaccaatctacgaccctgatcgggtcggatcaacgcggcaatccggttctaatccacaccgtctatcaccggatcaatgacttgacactaatcccccaacatccgcctagatacctaatcttaaccgtctctccacgaatcaacgatcgtgaatccgcgacccccatcctgcacgactctggcagcgctgtcaagtctgcagcggcggagccttcactggcgacatcgggttctaagtgccagggctctataccccaaattaatccgcccaacgcaacaccccctaaccctagatctggtacgccccgcatatggt

SEQ ID NO: 196682 - DNA, 493 bp, Zea Mays
gtaatatttgatagcgctgagaaagcacttaacttgtggttggacatggaggcttttgaccattcttcttctgatatggtcttgcaacagccatcaaaaactattgtaccacttatttgtttcctggttgatttgttgtctatgaaggtagggccatgatatatcttcagtttattaagttggatgagatgcaattgctttcctttagcaacataatcatgagtatttgttctgccatctcagggctgttttgagcttcagtttaagttgtgcaaggttatgataatgatatggaagcaagaaaaattacccattgagaagttgttgtccttgctgttcaccagtgggcgccttagtcatgcatgctgttatctcccactggatgagcgatttctttctattgccaaagagcatcttggtgtatgttgccatgatattgaattttggataaactgtttcaaaggagaccatccttctctctgtatgtttcttc

SEQ ID NO: 196683 - DNA, 380 bp, Zea Mays
cttcaattgggacaattcttaggaggaacaagcttcaggatgctactctcgatgaaaatattcttcgtatgatctttgtactgaattcaactgactccagtgtcaaacaaatacagtattgtgccatcatcctacaggtaacttaaatggcgtgcttgctccttgctaacatctacaacagtatgttcttaggcttgctggtttggacattgttaactagtgcaatatcacaagaataataaattatctaatgacgatatgaacagcctgttgatcttaagattgatgaggaaacgttaatgaagctagtaccattttggagagcatctcttgcaccttcaggcacgacaagcacacaattttatttcagacgttttgaa

SEQ ID NO: 196684 - DNA, 327 bp, Zea Mays
tgcgatcagagcctgtcgggatgtatgagaagtcatcactttatgacatcaggggattgacagactttcatacatgcatcatcacctcgcatcgaagatcaactaacaagaacaaatatccgacaagagaacggctacgaaaaccaactcacaaaagagactatgccaacgataaaaccgggtcagttggaagaacacgaggaatgaatctaagagaagaaaagaaataacaagtggctcagaacttcttagagggtttgtgcaaccaacaccggcgtccgagggatgcctccggcacacggatttctttcctcatcgccatcaaac

SEQ ID NO: 196685 - DNA, 293 bp, Zea Mays
acactgatgatcctaaaaaaggggacagcctgtgtatgtattctgaaggcagggacgaaccacatggtgaggtgaggtggtgttggtagggagtaggattgtgagcatcatcatttaatggaatgttatcagtgggaatcaatagttctttttttatggaatattacaggagatgttagagcagatcactgatagtagcctttaccaacacatgggatccacatgtcagaatggaggatgtgtgagagagaaaaaaggtgacagttgctgtggtcccctttatttgaggagag

SEQ ID NO: 196686 - DNA, 630 bp, Zea Mays
ctccaatgaccagcttgactaggatgattctatctcctaccctcttaacatctactaccccatctttgaggctcttgtcgatcaagacgcctactccattcttgtttgttgcagtccccgtgtaccacaacttgaaacctgtaccttccacttccttcgccttctgtcccttccacttggtctcttgaacgcataaaatatttacccgtctcctcaccgcaacgtcaactatttctcgtaacttacctgttaaggaacctacgttccaactgcctacacggaccctagttggctcgactagcttccttacccttcgcacccgccgaggaagatgcaaagacccttgctcatttttcactacacccgggcgccgatgtagcgcgccactaaggatgcgacgacccgatccttgctcacttatcaccggctccagatcaagagacagcgcgtcacttgaggggtgacgacccggcccttgctcatttaacaccatacccgggttccgatatggcgcgtcgctaagagggttacgccccaacggttttctttgtggtttcatctccataagatttaagaggaaaaaaatgaattccagtattccaccttccctctgctctcctctcgtctccc

SEQ ID NO: 196687 - DNA, 680 bp, Zea Mays
ggcaggtgttgtctcgtggcggtttttggttgccggcgggccgccctgtgcgccttcgtgggcaccgccatcagcacgtcctcgtgtcccgctccgcgcgcctctgtgcggcttgccacgtttacggccacctatcgaggaagaggacatccttttcttcttgtcaccctggcaggcctcccaatgctcccgagtgacatgtagcttcctgccgatggtgataggcccagagagagcctgtggttcgtcgtcgtcgacgaccttaagatgacccatcatctcttcgatcgtcattgtggagaggtctagcagagactcgatcgagcgagcgatttgcttgtacttatcaaggatgcaacagaaaagcttctcgatggctctctcatcgtaggtgtcgtcgccaaattgcaccatcttctgcaacatagtgtggaagcggagagcaaagtcatcaacatcctcacctggcttgaaggccaggttcccccctccttgcgaagtgcatgcagtgtggtcttgcgggcacggtcgccgctgatgcgggtcacagcgatggtgtcctaggcctccttagcagtccgtttctgggaaagcgaaaactgcatctcgggagggactgcagcaatgagggcatccaacgcccatcgatcctcatagtaatcggcgtcgccgtactgaat

SEQ ID NO: 196688 - DNA, 641 bp, Zea Mays
gtgatttgaaggacaaaattgacgaaaaagttgtgatttccgaggatatgaaaggctctgatcctttggctgagcagtgttgctcccccagagatacattatttgtgcaaaaaatggaagcagaaggagagagcggcattcaggggcaggacttaattttgtcagccattgatgaggtcagcgatggtgttgaggagaagagattggagtgtgacccagtgtcagtagagatgaagaaatttgagccagtgcaattattggagaccaggaattgtcaggcaatgcaaacaatggagatcaagaaattggagccatcggaactaatggaagaagccaagaaaccggagatcaagaaatttgagccactgcatgcaattgagatcaagaaatccgtgcagatcaagaaatttgagcctgtggtactgccggaaatcaaggaatgtgagacagtgcaggcagtacagaccaagcaattgccgtccacgctggagatcaaaaagtctgagccagttgaatcagtggagatcaagaaaaatgagccggtgaaaccacgttctttgattgctcagcgcatcaagctatgggaagcacaagtatctggcaatgtcaagccaattgttggggataaggaggaaaactca

SEQ ID NO: 196689 - DNA, 1480 bp, Zea Mays
ttgtattttcaagatgtgaacagattagctgagatttctctacaatatgaggaaaattcaatatgaaataacgaatagctagagatatgtttttttctggacctgtcacttgaattgccacaacaaactggaatagtttaaacaaccagcaaaaccaaatttgttaagagacttgacctgcaactaaacatataggctagaatctaaaacaatgcatgtagtattaagaaggaagaacctaattgttaggtgcacatcaaactaatgtggactcatcatcttacactaatatcaaccaaaaaacacaaagagaaggtcagctattccgagcaaaaccatgggatgacaattataacaaaatcttaaagctatgaatggttctcagatatagaatacaaacctaaattgtcctttcacacaagccacaaaccaaatattttccccatgtatacgtacacaacgttgcaggctcactacccattggtatatttttatactgatataagtacttgctattctctcttgcttttccttttttttcattcactgatggaagtctgaaccaaaatctacatgcattggtggaatggaaatgtgacctccactttcgtaagtccgagcgggcttacaatagaccgctaatcagctcatgtcatgacaatttgttagaggttacttaaccgcactttggtccagcctaatatatatacaagcaaaacacaagaagtgggcttttgcaagataagagtagggggtggatgaatgcaagcagctagttgtcaggcaccaactttctatactcttgatagaaatctctatctaaacgagagcaagggacaatcaaacacatgtaaatatagaaactaaaattgatgaaaccacatgaaaacattgctttggccgcaatttcaaactgaacctattttgtaaaggaaatcaaacgcctaatctccaacaaactatcaacaccaagaaagaaacccagtagataatagctacagataaataatagctataggtaaacctaagaacaccaagagaggttcactaagactaaccatggtatgagcagttgcagtacccgccgaagaacttgcgatatacctaggatgaagacagaacaattattttttaatcctaccaaacagatagcaccccacctgacatgaggttacatgacatgttctcaccaatcactgttttcattacccaataaatctgccaatggatctatcagcgcccagatttcctaccaaatcggatgcctaccatcggtgagagacatgcgagcccaacaaagccatgtccagaagggaaagcaactgttggcttgtcttactgttgagttgatggttcagaattattcctcgaaatagtggattagtggttgtgattagtgtgccttggaggcagaatggtgccatcatttactaccaaaatgagcagggaaagtaagaggactgcaacagatgaatctggt

SEQ ID NO: 196690 - DNA, 658 bp, Zea Mays
ggaaggaggtgaatggtggccattgtctgctgacttggcccaaagtcactagacctaaggacctgggggtcttggcgtaagtgaccttcggatcatgagttgggcgctgcgggctaggtggccttggctgcaaaaatctgatcgaactaagccatggttggattttcagattcaaacttgtgacattgtgcaaagcttggtggctgcggctgttatcactcacttgggagatgggtctgatactctcttttggaaggatcgttggttaaatggcaaatgtattaagtatgtggcacctgctgtcttggatatggtgcccaagtgcattgtttctaggcgcctggtcaaagacgccttgcctgatctcaattggttggctgacctgaggggggctatttctgttacagcccttgctaatctcatggacctttgtgacttgctagaggggatggttctccagccggatgttcccgatgtgcatgcctggaggttcagtgaatcgggtgaatactcggctagctcaacttacatgactttgcttcttggctctgttaactttgagcctgctggacgcatttggaaatcctgggctccaggaaagtgtaagttctttctttggcttgtggagcacgatagatgttggacggctgacagactt

SEQ ID NO: 196691 - DNA, 394 bp, Zea Mays
gcacgctcaagcttcttctccttctcttccctgcattcagcaacgcgcctcattttctcttcgtcttcacgttgttgctcggcagcaagctcctctcgtcttttttccatcctctctttgtcctctgcatcccactttttaagattctccaaccacttcttgtctttctctgatatttctgtgtcaatccactgctcaaaatcacatagcggtggaggagtctacaaaatatgcaattattagtacgcaaaaaaacatttacaaaaacattcacaaattgtaaacatattacaagactattctcaccattaaattcatccgacgttgaacaatagttggctcaaatgcaaagttagcacacatccaatacctctgtcgataggtgtcatgatcc

SEQ ID NO: 196692 - DNA, 296 bp, Zea Mays
ggtcatatttgggtcatattttcttattttatcttccaggaaagtattgctgagcacatcagtctgctgtcttttctcaaccctgaagaaaatggtacattgagtgtttcaaatggtgtttcttttgatacagctggcactctagttgttctgaaagaaaaacttgcacgttatgttgcctttgagcggaagacagattcatcaaagcttttagagtattgggttcctgcccgcctttcaccagtgcaactagagatgtactgttacatattactatcaaactccccagcccttag

SEQ ID NO: 196693 - DNA, 388 bp, Zea Mays
ttgattaatgggagcaaaggttcaagtacatataggcaaggatgtctacagaaaaggaaacaatcctacacaatcacttgaataggaaacaatcatgcacaatcctatcagggagatccttgcctattgagaccaattaaccaaataaggggcaggcgcacaaggcaacaagcttgtgcagccgtgcggccatgccacttaaactgcctaaaataggacacactaacaatccttaattcacttttgtgccgcccttaggtgttgagtgaatcttgttcctatccatgagcttttctttaaatatgggatcctctagcatcgatctatgaacatgtatcctctatgtgagagcctccttatgtgggcgggtccctctaatcgttactct

SEQ ID NO: 196694 - DNA, 460 bp, Zea Mays
gtccttttgatcataactattcagggattagaacagcttcgatctgggtttctccagcacaaatcttatatgtacccggcccagccattacaacaccagctccagtttctcactcctcagcagcagcatgctctaattcatgttcaagcacaacaaaatgccacttcacctggagacatggataacagacgacttcggatgctttttagcagccgaaacttggttcctgggagagatggtcaatcaactggtttcactgaaattgttcccagtgttggccagtcattgcaaaacatgtgcttacctatgcagcgcactgagacagatatgctgatgaaggtaagtaaatatgtatgaatagtcactcatactcttgtggacacatcatgtattaatatgttgcaattattagcatctttcggaacacgttttttaaattgattgctgaattaacattttc

SEQ ID NO: 196695 - DNA, 517 bp, Zea Mays
ttcgattacatccctaatccaactcgtcgggccacaaccgcggtggcggaggcagtgctctggtcatctagcggacgatgcgggatgtcggaggcggagcaccataccctatggtcactcgcaccatctacgacaaccgggttgtgatgatgaaggtcatgatggaggcgcgtggactgtgggaggcagttgacaccaggaacgtcgagcgcaacgaggattggtgggctatggaggcgatcctacgagcggttcctccagagatgcatcagtccttgggggcgaaaacgacggcaaaggaggcctgggacaacctgaagacgatgcgaaccggctcagggctagtaaagcgggtcaagatacaacaactgcggcaggagtacgagctcctggagttcaaggaaggggaaggagtggatgacttcttgctccgcccgacgaccttggtgacacatttgaaggagcttggtcagcagatggaggtggacatcgtcgccaagttcttgtgcgtcgttcc

SEQ ID NO: 196696 - DNA, 304 bp, Zea Mays
atttggtatctgacttgcagtcatttttttgtgattgtgtgtcttgaaacatggcagaaatcaaaggttaacggttcttgcgacactggttgctcacttatgagcttcgagttactatatgcccgtgtacatgtttgtcattgtgctaatgcatcttgactgaaaagtgatgtgtgtgttttcctagttataggtcgttctgttttgcaaaatcagtttgattaacttgatcgcccattatgccaatattatcacttggcataattacgaaagagctcatcttgcttgaagctgtaatgcagat

SEQ ID NO: 196697 - DNA, 468 bp, Zea Mays
aaaggccagtcttctcttcaagttggatatcactaaggctttcgattcagactcctggccttttcttattgatgtcatgaaacacctcggttttggtcaaatttggagggatattatttgtgggtggctctcctcttcttccactcaagtgcttcttaacggtttccgcggaaagtgcattatccatcggaggggtcttaggcaaggagacccactgtctcccatgctttttattcttgccatggacattctgggtttgttatttgctagagcagaagatgcaggacttttacaacctttgtcaccatctcagagattgcaccgggtctctatgtatgttgacgatgtggcattattcctgcacccggtggcagatgatatccttgcagctttagagattttacatttgtttggtgcctcctcgagccttcagaataatgaaagcaagtccaatgtctatcctatcca

SEQ ID NO: 196698 - DNA, 1544 bp, Zea Mays
caaagaagtcatcacgtgaaacatatggtaggaagctatggccaatggattaatattctttaccattaagtttcatgtgtgctcattattcatagctgatcatatttttactacttgttttggttacctgatttttcaggcagtgcaaatggttcggggatgcaggtatccttcgagaaacctttgttagggaatgggaaaactattccccatctgccttttatgctgtgtctgaaacattatttttatgtgtcactaggccttaatacgagctattgacgatgaactagaagtcactgtaagagcacacgaattacgctcatattacgagcgacaaatgcaagagtaagtctttgttgtgctttgataatttgtagatgctgaccttctagtgcttttgttattttgtggtgcgctatatatgcatgtatgtgcattattttgggcatttttatgatgagacatagatttgtagttattcaatgaaaatatgaactcaaaataatttgctattgtgctcccttgtggttagaccactagagctttgggccaatccataggacagtgcctttaaatgttgaataggttctgttccttctgccaagttgtttatattacaactccattgatttcccaacacaattctgtgaagagaaataatgggattgtagtaagattttgcattgaccataatctataacactatataatccaccagtttaaattttgcaaaatccacccaactaaatcaccccacacatctataacccccgctaaatccaccatacaaattgcactcaaacttaacacaccattgaaaccaacggttcagatcgctggataaccctctcccttacttaaatctaattgacatcatccctccctttccccctcccccgtgtcccgccgccccctccgcctcacgtatccgtcgcccttaactcctcctcttgcaccgccgctgtcgtcgacctcttccctctactatccgggattgttgcgttagcacgggctatatgctagtatgttaaaaatatttacgaaactgtggcatcattaactgtctccaaaattcctgatttgatatacctatatcgattattcactccttttctttctaacctcagcagcataatatatgaactgtagttgaaatatgctggattctgtatccgtgttccacggcattagcttttgcacaactgccctgtttgaaatttcttttttcctccttgaaataggagagcagcaatatccaaggaaatagcaaaactaaaggaggaatcaaagcacaagatcaggtttggtgatttacatccctttttatttttataaggattaattgatctgttatagtgtctctgaattgttccttactagttgttatttctgtagtgattgtcctcaagctatgtcacctagtgctagaagttctaggatatcagcattagagaatatgttgtcctcctcatctagtgctatggtatctatggcttctcaactgtcagaagcagaggagcgggagcgtgtattcaatggtaaag

SEQ ID NO: 196699 - DNA, 332 bp, Zea Mays
ctccatcgatgagtacatcaaaataggaaacagttccttattagagtgtctcgagctattgtgtagaggtgttattgcatgttgtagggcggagtacatgcgtcatcccactgctgatgaccatatgcatcaattagctaaggggtagggaagggattttctagtactatagggagtatagcttgcatgcattagaagtggatgaactatcctattggatggagaggacaattcataagaggggacattagatctccgacaatcatgctcgagacggttgcctcacatgacttgtggatctggcatgcttttttagggtgacgacattgaat

SEQ ID NO: 196700 - DNA, 683 bp, Zea Mays
gtgaggtccaaccattcttttattgtctcaacattgtaacactaaagaaacaaaacaaacgagtttaaccaatactaaactattagtgctctatttggtgcccttgccgctcccacaggtgctcaactagatcttccttaagttcatggtgcatgagagaatcttcaattctgtcctgatgaacaaaggatgaaaaatttgatgtccctgctcgtgacacaactcgttgcgtgtcagcagcagtcttgtcatatggcacatcaaaaccaacaacatcacgttcatcttcaattaccatgttgtgtattattatgcatgccatcataatatctcgaagtgttgcttcatcccagaatcgagctggatttctaatgatagcaaagcgagcctgcaacacaccaaaagcacgctctacatctttcctctgagactcttgagcagcagcaaaatttttgtccttcagatttgccggggccttgattgttttcacaaatgttgaccaaggaggataaatcccatcagcaaggtagtaacccatatcataattatgcccgttaactgtataagtaacgtatggagcttcacctttcacaagtctatcaaatagaggagatctacgcaaaacattaatatcattatgtgaaccgggaagaccaaagaaggcgtgccagatccatagatcc

SEQ ID NO: 196701 - DNA, 1314 bp, Zea Mays
gcatttattaaggtttcctgtaagggtaaaactggttggtccgttttaaatctcatctgtttcagttttttctgttactgcaatatatgatattggtaacattttggttgtgtttgactgctaggaatacgacattgctgatagtggcaagaatccagcagagcgtctagctcgccaaaagaaaaatctccggcgtcgtttaggttagtttttctttatattagcgagggaaaggtcaatttcaatattttgagcatgtttcatatttaagttttttcagaatctcagactttacttacatgttgttttaaaaattggctagtttttttgtcaattaatagtggtctgtattaatagtctcttctcttctctactctagccaacagaacacacatatctttatgttttatattctatacttaagcataattggaaaccattcttaccccagtaccgctgttaaagagaaggctggcgtagctataagcctataacaccttcagaaggggtataaagtggcaaaacgtatttaactgtacctaggttttattggttctattgaaaagaaaaatctagaggagctcctattctatgatgtgcagggagtacattgcattcatgtctgaatgtacatattaggtgttgctaaaagtccagcagctgaagttcaattcagcaccttcaccacggctcagatatatttgattttctctgagactggaggtatgcctggggtttaaaaagattgaaatactgtttaagaagtggtagtagatgcctactttcctagtttccctttaaatcttgtagtagcaatactatagtcgaatgaagtacccccatggctccaccctcattggattgttgatgtgatgtttccatctcgtcttgatgatgtgaatacaaggactgacatctttgcacatatacattattagtgttctggaatgtttacactttttttttgttctagtgcaggactggatttatgtgagcagtttatggatgttaatgacgttatcaaagacgaggatcttcttgcccaaaaaaattattggggttcacatgtacagaataatggattccattcatttaattcaggtcataatattcagcagttggtttctaccatggtccccaggtatcccaagcattctaattttcgctctagacgattaagtgccagggagttaaatatgctgaagcgtaaagcaaagagtaatgcaaaagatcatacaaaggctgtatctgaggatgatgaggttacactgaaaggatctgtgccctccaatggagcttcttctgaacaagctg

SEQ ID NO: 196702 - DNA, 317 bp, Zea Mays
ccgggtgcagtcgagcatacaatacatgcacttcttcatataaagtattacggtacacttgcaggcttttgaggaatgtgctaagctctgccacacgagctagagctttcgcttcacagtcccacgcgaaagagcgcgagttgacgacccaatcaatggccatatcccgttccaagatttcgtactagaaacggttgacttcggctgacaattccactatactgtgactgtcctgctcccatgccctattcctatggtgtagttccgaccggagttgctccaccctggcttccagatctccaattgggtcattactg

SEQ ID NO: 196703 - DNA, 417 bp, Zea Mays
tgcgtgacactactacctgcgcacgcacgtgtaaggaatgcaatgtttcatcacactactgactactgtacgtgtgtaaaagagtatgttgtatgcgttgtttttttgtgcctatctaccgtacctaatggccacctgttgtacgtgttgttgtggagtcgagtcacctgtactcactgtattgtaccgatgaataaaaagagaacgtgcatgccattgcgcgtgttcactaatgacaatccagagacgacgaacgagtcggacactcatgatacacaaaccaaatggtccgcttaggcctggatcattaattccgcacgttaaccctgatgcaaattaaagtaaccaaacatgcagaagcaatagatcgggattaactggatctaaatctctatcttgttacctataaaaatgtga

SEQ ID NO: 196704 - DNA, 497 bp, Zea Mays
gttgatgaaggatggtatgatggcggaagtatctttttagccgtttttcttgtgatacttgttactggtaatgggtttggattacacgtaaacttgttttcagcagcaatgttctattgttaatatttatcatcgtcatatctccagcaacaagtgattataggcaatctctacagtttcgacatctgaatgaggagaaacagaacatacaagtggaggtgagtgcggctatgccacgtgaactcccattcattggttatatttctgatttgctatctctattggttaggttgttagaggtggtaaaagatttggagcttcaatctttgaccttgttgttggtgatgtagttcctctcaaaattggtgatcaagtaagatggtatattaatttttcgactgctatttcatttttatgtgtagaaccatctgtttatcccattttcgcctccaggttcctgctgatggtgtcctgatatctggccattctcttgcaat

SEQ ID NO: 196705 - DNA, 1053 bp, Zea Mays
acttctgttcgaacaagattatgcaggaaacataaaagagaaggttccacctaggtcctctcttcatataccttggagctggttgcctgctgctctgtgtattttgcaggaggtaatgcatcacacagacatttctcatcaaaatgtctgttggaaccagtaacacgctgctatgaagttaatgctggttttgtttggttgagacttttcactttatttggctatgatcagtgagttagttgttattacagcgactatctttaattttctcattgcaccaaattaagatatattttgtggagtactatctgtatgtggtttaaatcgtacatgtgtcatgttcttcttggtaatatacaattcacgtgtcaggtattatatttaatacgccaaattatttaatataacttaacaggaataagagcagaactctgttaacttaaatgtccctaagctttgaaatatttatgaaagggcgtagccaggtacctttaggatcatgtttttcagtgtgtaaataataactactgttctttcttcagatcaggacatcaggcaagacagtgtaaagtgccaaaattgtcactattgaaaattttccatgctgaaatgcactgttagctttgaaaatcccagcacgaaggatgtcttagcatcctaattttcgaagttaaacatgcattttttgcttgccattatgtattgcaatactggtttattcgctcttcatccatgtatgatgtttcagtcttgtttcaggttggagaagagaagctagttttggaaattggtcaggcggctctacgacgccctgattctaaaccttatgttcacgatgtgcttcttgcaatggcattagcagaagtaagaataacataaggatcttttccatattttctttaacagctgtttgatgaattgttaggaacttctctcacatttagatggttccatgcatttcgttgtagtgctctatagcaaaagccagctttgagaagagtaaagtgtcccttggctttgaggctctggcacgcgctcaatatcttttgagga

SEQ ID NO: 196706 - DNA, 389 bp, Zea Mays
tgcctgtctttgtcgatggcaaccacgggcaacgatgctatggcttaaggaggctcacaacaaccattgcttggagaagatgcctgtagtacttgatgatggatgtcacgggggagccgggtggatcgcacacaccggttggtcaaaccgagtatgcgtgaggtgggtccacgatggaagaagtcagtggaggcgtctcgataagtggtggccgagacgtgcagacaagatgatcgagaagcgacgcaggaaggtgtctccttagtagcgcatgctcgaccaggtcgcatagtcgaaggtagatggtggtatagtcgataccaatggagtagacatgcgtgaggttggcagacggtgggtgactcaaccccgatcagtgatagggcaaa

SEQ ID NO: 196707 - DNA, 484 bp, Zea Mays
atatgttgtaggtataaaaataaaggatctaaaatgaagtgaggaaaattgagtgcggaatattctcaaagggaaactgaggaagagaaggttaccggaggagcgatgcaaggagccggattcgctgaacctggtgacctggacgaaggcgaagctgtcccctcaggattgaagtatccagagctgcctgtgaacctttttttgttttctcccacctagaggcactgcgtgagggggtcttagatggttattactgtcaagtgtaactgacagcaagaatcattgagatgtgcacattgcttcaaacaaatgcctatgcaacataattgtagaggtgtgttattttcaggactgcgcttaaagaaaagatatgacccccaactacgaatgataataactaattgagcaataatttaacaccataacacaatctaataaaagggtgaaaacgtacaaagaaaaactaactgaagccatggaatca

SEQ ID NO: 196708 - DNA, 661 bp, Zea Mays
agcctgtcgactttgtcgagcccaggtatagtgtgtaagcttaatcgatctttttatggcctcaagcaggcgacacaggcttgatacagtcgcttttcgcctcctacatggtctccctcgactttgtcgaggtcaagtcgaacacttctctattcatccttcggtgtggcaacgacattgtctacatcctctacatcgacgacatcgtgctcacagcgtccagtgccaccctcctccagcgcacgatcgtcgcctgcttaggatctggggttctaagtaacaaggatctgggttcaaagttcaactagatatctaagatggtaagtcctcatctataggcaaaacaggtacgtccatgtcaatgaaactgcaaaagtaacaaggaaaggaactagagatggtcactaatggttgtgcaataaaatcatcatatttcttactagaaaaagaatcaaagtggatatttagattttgctaggtcgcaatgtgcaaacatagctaccaagggccacagccatggatcatgcacatttagacggtttagcaaatgagtggcatacagcctattatccaaccacagtttagattttttaaaacaaagcactgaatcagaaatgaggaagagtaattatgagccgctagagaaaaaacagtatatgtg

SEQ ID NO: 196709 - DNA, 352 bp, Zea Mays
agtttgaataccatatgtcagtgaatatgttccttaaagtgtgttgggcgtgaccctacacaaaaagtggtgtaaatactgcccaaagtgggactgtcagtcacacaaactggatttcactcagtccaatgaaaactgaatttcagtgcaatttgctgaactttagagctcttttgtggctaatccataaagtgttggaccatggtgtctatagtgaattggtaaaccatagaaaggtgaacaactctcttgagaaggtttgggtctggtactgtatagaaacctaagttaaatgccctcgaacattgactgccaatcggtgctgtgaattgaatgtgattcaaaagctaaa

SEQ ID NO: 196710 - DNA, 1390 bp, Zea Mays
ttgaactcaacgtagtactttctccgtaatacgccgccaagagatcattctttattttttgcaggttgtcaattacgtgccttaatatgagtcattggaagcagccgtcgaaactcgccatgcttgtagtactgctgctgctgctatgtcatgcagtggacaaagtccattgctcgacgcaccataacaacagccaagattttcattccctgcttgagtttcacaagggcatcaccagtgatccgaacgaagccttgagcaattggaaccccagcatccacttctgccattggcatggtgtgaactgcagtttcactcgaccatatcgagtcacggagctcaatctcaccggccaaaacttggctggccaaatcagctcctctcttggaaacctgaccttccttcatacccttgatcttagctacaatagcttcagtggccccctacctcttcttaacaagctccgaaacctggacgtactctttctgggaagcaaccatttgggggatgttattcccgattggcttacaaactcttccaacttagttgatctagatctctctgaaaacaatctcaccggccatattccttcaaacataggcttcctaacgaagctagaaggtatagccctttacaataataatctcaccggtgtcatcccaccaaccttgggaaacatctccacactagaggtagttgatttttcagcgaatcaactaagcggaagcattcctaataaagtttggcaaatctcaaacataacaatgttaaatctaggacaaaataacctatcaggtggaatcccagatactctctctaacttctcttctcttacagcattaggcttgaacaacaataagctaggcagcgcattgccatcaaacattggcgatgtgttccgtcatctaaatgaactatacttagataacaacatttttgtgggtacaattccaacttccctaggtaatccttcgagtctagaagccctagacctatcaaacaatcatttcagtggcaaaatcccaagttcttttggaagactttcaaagttacagattttaaaccttgagctaaacatgcttgaagcaagggatagtgaaggctggcaattctttgatgccctggcaaactgtagttccctgaatatactttcagtgtctcaaaatcttctacatggacctataccaaattcgatttcaaatctgtccaccactcttcaatacctaatgatggcttcgaacaacctatcaggaaccgttcccccaactattggaaaatttagtggcttgattaaattatcacttgcaaacaacaaccttacaggtaccattgaggaatgggtcggaaacatgacaaaactacaaatcttaggactacaatcgaacaactt

SEQ ID NO: 196711 - DNA, 533 bp, Zea Mays
tacttttgcccatccaagcatgattcaatttggaaggaggtaggtgatgatgggtgccacaatcccgcttggcctgagttcgtcccatcagctgggaaggagaagacaagaaaaatggatttccttcgatttggttcccatgtcttaattgggatcagggggccgagggaggatgcagttgacataaggagacaactgatggagttttgtgagagaacatttggtttaaggccagagaattcgatggtggaaattgagcatatcacaagggggattgaattcttggatcatgtgatcacgcgcagggtcatctacccaaccttacgatatactgccagtggagggaacattgtcagcgagaagggtgtcggaacactgttgtctgtaacagcgagcctgcagaggtgcataaggcatttcaggaagcttgagcttgtaaagggggacagggatcctgagccattgccgtgctcaccgatgctgtactctgggcaggcgcacactaattcccagatgaacaagtttcttgagac

SEQ ID NO: 196712 - DNA, 421 bp, Zea Mays
cgacgaacagaggattatatcgcgaaacgtaggccgatcagcctcccccgcaggagttggagcgacaccgcgagacccagaaaagtcgcctaaccacctctgtaacttggacctcccttgggtggcgcacggagcagacccgccagagacaggggaaatgaggggagacgccttggatggggaggccgcattgacgacggcgtggggaaggtgaggggtggccgccggacccgggtggatgccagcgtgggctggtggggagtcaaagcgtcaggaaggcaatgcaaggcgtcggcgagagacaaggagacgtccatcccgccaacccctgaagtcaatgcaactcaaacgtcatgttataggaaatagaatggaacatttaagttagacttggaactacaggacttcatttttatatttc

SEQ ID NO: 196713 - DNA, 474 bp, Zea Mays
atgaagctgacaacttagttgattccttgaataagatatacaagtcaaagcttacatcttcttaggttactctcacctttcattaacctttccatcacagtctggcaaatagtattttgccttgtgccataggtcattatacttagttgcaattgtattgctttgtgtttcattcaatgaacataaacatctacattccatgttgtccattagttatgatttttgctggaacataaatggcatatagctctgtattttgtgtgcctgatgctcattcagtactattgtcaaagcacaaaagggagatttaggaatttatttggcttataaaggggcataaacaaagagggtcttttagtggtggagttagcttagcttgcctatggggttgtatggcacattataagagattctatatatggtttcatctggtttaggtttagaattttcattttgaaagcaacattcagtcca

SEQ ID NO: 196714 - DNA, 336 bp, Zea Mays
gctgatcctgtttgcctacctctcttttcacctggatctagtactctctttccttgtgaatcatgttgtggctttatcatcgaaatctctggatcccttaatgattctgccccgttatctggttatctgctataacccgttttcaagtatcgaatgttgatctcgcctaaatctctcatttctgatcattctcatacccccttctctgaggatcatgacgcttgttttatcaacttatctctaaacgacatatccatgtggattaattgatgttgctgttatctttggatctctcatgtctctaaaagcttatattctcgatctcatggttggttc

SEQ ID NO: 196715 - DNA, 351 bp, Zea Mays
gtccaccagcgccggcgtgcagctcatccttgaaggtcgtccctgccccctgttcatctacaaggcacaagatgagctcgtcatccctgctcccctccttcccccttctctgcactctgcagttttgcattctgcgcagcagtacttatttgtttggatgctgctgctgctttttgcttggatgctgatctgctctaggtagcagactagcaggtactctattgtttcacttatgctgcattcactggtttcacttatatatagctcattcactggtttcacttatgctgcattgctgctagcctgctactgttatatttcagtatttcagttccaaactttcaatttaat

SEQ ID NO: 196716 - DNA, 493 bp, Zea Mays
aagctgacgcaaccagctcgcctcagccatgccattagcaatagtccggtattcggcctcaacatgacaggttgacgcttagagaaccaagagatgaggttggccccaagcccccaacaaataccgcatagcaaaggtagaccagcgggtatctaggcactcagcccagtcagtgtctgtgtagacgatcaactcatgtgtggagcgctgaaggtggagacagtatttaacaataccctgaaggtaccgaaggatccgcttcatcacgctccagtgtgaatcacagggatcatgaatgtagagacagatctattggacaacatgcatgatgttgggcctggtgaaggtgagatactgaagagtgtcgataaagttgcggtagacagtggggtcactcataggagcacagtcaccagagagcttggcatgcgtgtccaccggggtcaaacagggcttgcaatctagcatgccagcacgctcgaggatatctagg

SEQ ID NO: 196717 - DNA, 483 bp, Zea Mays
ctttcctttgttggcagagaaggccaagctcttcctccagaagtcgagcagcattggctctcttatattcccagtgcttcataaagtattgcatctgagaaacacctttctcagaatttgccatttccataagccgctgaaagtccacatgaacaggcttttcatcaaacttcacatccttgaaagcatcttggtccttcctaaacttttccattctgaactgcctctggtgtttgtctcctatattctcgggccacattgattgtgcaacctcatcctcaggttcagctaggtagtcgtcccccatctttctcgataatcagcacggttttccgatcacattgaaatttactcaaacatcagttgactgttgaacccaacagatgatgttgctgattatagctgataacattaatccatggccgaaatttcaatgctccttgttctctgagaatgatataatccgtagcataacagtttcac

SEQ ID NO: 196718 - DNA, 1521 bp, Zea Mays
gcgtgatccatgtctgggaagtgtccgagtttgagaggaaacgcgaggagaacggactgtgcaatcctcttgttgccatggcgtgcaacggttcaccggagacaacattagccttggccagcagtctggatgggagcaatcgtgagaagaagcgtcgggcaaggttcttggagggtcgtaggtctgtgagctcagaccggctaatggtgccagagcatgtgtttgcactgtcagaaaagccgattcggaccttcgtggggcattcagaagatgtgcttgatctctgctggtccaaatcccaggtatttctagcgttgctgtttgttctaaacttgcccctagtttatttttgaccagtaatttgataaatgctgaaatctagaagcatgccataaacagtataacgattgtagacaacaattgcttagttcttgttattcgttttactatagaaatgttaacggcatatttttatgaagcattattccagcagccatctttgtggtgattgggttcaaccatgttaggacagaaataacatagcacctagagctgcctattttaatgcatttctggcgtaattagctgcaaaggatgaattggtaacttgtaatgcatatcatcaattatttgctacctaaacgttcttcctccaagttattgtacctttttgtgtatgcacatattggtgaatttatcagcatgtaaccattatcaggccatggcaaacgtccaaacattaatgcccagattgccatgaacatcatattttttcagtgccttgataatttacttttgcggctctaaatgttggctacttgttaactcctatcatttttttgtttatcatcaaatagatattatgtgtttcacaatatatcatggataggtgtgtgggcttctaaaatctaggattatcttgcctcatcatgtgctttccattttttaaacttttatattgaccaaatgcaagtacaaaagggttgtttgttcagtgttcccaacttaagtaacaccatgaaacaggtcatataaatgtgacactaagtcttgtcacatcaagttgtggagtctcaatttatggtctcttggacacacattttctaacctgttagtcatattacagatggtctggcgctaagtcacacagcatcaaaccatcagtagggtactactatttatcaggttctgcaagtttgagttacccctccctaatcacacttattaatgaaaggggttgcatttagacccgaccagttgcctccaagagcacaagtgcatgattagacacataaaatttgttggattccttttaggtattaagttgccagctgaaaacatctttctcctctctgtgctggctacatatcgattttgtgctcagtgacagtgctccataggaagtatgattggtaaagttccattaactccttacaaaatttctcagtcatacctttctgaaatgctttacagtacttactttcatcttcaatggataaaacggtgaagttgtggcacatt

SEQ ID NO: 196719 - DNA, 833 bp, Zea Mays
gcctgaatgatgtgtcggaggagaacagtagaagatgttgtgagtataatgtcgtcgacatagagtaacaaataagctgtgtcagttcctctatggtagacaaacagagatgtgtcactcttggcctcgatgaatcccagggatagcagatgagtggcaaaccgactatgccaggcacgtggtgcttgtttcagtccgtagagggacttattgagtctgcaaacatgttgtgggctggctgaatcctcaaaacctgagggttggctgcaataaacagtctcagaaagagtcccgtgaaggaaagcattcttgacatcaagttgatgaatcggccagttgctggagacagccaaagataagacagtccacacagtagcaggcttcacgacggggttgaaagactcatcaaaatcaatgccaggtcgttacgtaaatccacggagaacccaacgagccttgtacctttcaagagagccatcaacattaaatttgtgcttgaaaatccacttgccggtcacaatgtttgcaccatggggtcgaggtaccagatcccatgtgtgattctgcaatagtgtcgcatactcatcttccatggcagctcgccaattaggatcagcaagatcgccacgaaaggtcttcggaattggagataggggggcggcgtggaacagtgctggcacccggaagccagccttagcacgcgtgaccatgcgatggtggttaagtactggggagacagccaccgctccgggtgggggacgacgatgcgatgcgtccgtaggaggtggagatgaagcagcgacactgccagtcgagatggcagagccgttcag

SEQ ID NO: 196720 - DNA, 297 bp, Zea Mays
cacatggcaatcatacaatgaggatataaactccttgggtgacgaatcatttgcaacagttggattactggaacagataaatgtgacaagggataacacagactacttatggtatacaacatagtgagtactccaagtccctaactcctcaaaaaatctaataataacttttacattttgaagatgctaaaggttttactttcagcgttgatattgctcaggatgagcagtttctcagcaatgggaagaatcctatgctaactgttatgtcagctggtcatgctttgcatattttcg

SEQ ID NO: 196721 - DNA, 516 bp, Zea Mays
agctgagttgttaacaaataacaagttatctgagctggcatgcttggcattgtatctcatgtatgagaaaaaacaaggaaaggattcattttggtacccctacattaaggaacttgaccgacatcgaggaagggggcagctagctgttgaatcaccacttttatggactgaaagtgaactggattaccttactggaagccccttgaaggttagtggttttactatgttgcatctcaattctcaatataacattattgctttttgatattgaaggattacacgatattctgtaagaacattaatatcctaacatagctgatatatttgcaggatgaagttgttgctagagatgaggcaataaggagagagtataatgagcttgacacattgtggtttatggcaggttcactatttcaggtattccttgatctttcaagcatattttctttctaggattggctatatcatcaactgatcctctttctcacagcgatttttgttttcagcaatatcctt

SEQ ID NO: 196722 - DNA, 375 bp, Zea Mays
ggtgaatgctaccactgctctgaaaaatattcaatcgatcacaagtgtgctgctcgcggagtttttctgttggaactggatggagaagataccgggacaactgatacactggcagaggagatgggcatatcacttcatgctctcactgggatttacatcgtcgacacactaaaactgaaagtctctatcaatggtgtggctctcattgctcttgtggattcaggatccaccgatatattcatccgcgatgctattgtgccaagactgggactgcatgtgactccaacagcaggacttcttgtcaaggttgcaaatggtgagaagatgttgagtgggggcatctgttctcagaccccactcactgtcggcgaaaag

SEQ ID NO: 196723 - DNA, 734 bp, Zea Mays
ctaaaataaacaattcccatttgaatgctaatatacatgcaaagtatgcaatcgatggggtacccctaagcccttgtatattgttaactagaaccgtatctgtgggagatattgaagtacacgcatgcctgaagaaggacaaccattcaacagactgttgtattgttcagctaaacttgtttactgatctggagattgaagaacacactggccatcgtgtatgaagagaacttacataatcgccgtattcatctatttcgtccaagtccttggaattctttcttgagtggccccttcgtcctgcaaccattctggggtgcataagtacaaactcaagattatttgttgagcaatagtacttgagagaaacacttaccagaaaaggcactgaaactgtgccttctactccctggctgcttcctgtccaacaggagcttattggcgtcatggcgggaatagaacatgcggatgaggcctgccatgcagcctatgctgccgtcctggtggcgtcgaataaggcgcttctggcttctcttccccattttcttgcgatttctgaaggaagaagaagaggaaaggacggagggtgccccctcaagaagaagggagaaagaatgggccgggaggtcggaggaggaggatcggagcacatgccatgcacaagcaaaacgcacgctacgctaccttagcttttttccccacctgcactgcacactgcagagcgaaaaggcgag

SEQ ID NO: 196724 - DNA, 691 bp, Zea Mays
tgagatttgttagtggaataatattaaagtcgaaggcacttgcttttgagcggatgctttttcgagctacaagaggaaacatgttattcaatcaggcatctgcaggggaacctgtaactgatcccatatctggtgaagaggtctgatcatcatggtttgcccttgcttattctgtgtacattgagttaaatattttgctaaatttgctccacaatatttactgatcacattatttggactctgttttcagttgtcatatacataagctaaaatcaatggaatactctaattcagaaaccaacttagttcatttggtaccttaaaagattctgaataatatgtcaacattttgacaggtagagaaagctgtttttgtagttttcttttctggggaacaagcaaaagcaaagatactaaagatttgtgattcatttggagcaagttgctaccctgttcctgaggagatggtcaagcagagacaaattttcaatgaggtattattttccctgtttggtacactattttgttatttttgtttactttgaaatgtaacatgtgatttgattctacatattgctatattactagagtgttctcgaggctttgatgatagtaacttacaatttatgacttctgccaggtatcggctcgtctctctgacctggaagttactttggatgctggaatccag

SEQ ID NO: 196725 - DNA, 479 bp, Zea Mays
ccttcatcgtggctacgtcagactacaacgtcatcatctgggcttgtatggctcccagactgtttgagaagtggagaagggacgccgccagctgctcttttatcattgtgggaaggttcatggagataccggcggtggaattggcgagcacggtggaggtgggcagcgcggcggtagatgcaagcggcagcgtgcgtgactgggaggtgggcggcagggtgacagattgtgctagtggagaggagctcatggtggtcggaggatcgtaggcctacgatactaaattggtagttttctagtcctaccagggatctgctgaagggagtatgggtgaggggaggacagactacaacctggaggtagtggctacctcttgggcgccgtagtcgcaaaaaacggcacacagggatgtggattccagctcccgtgaggaagctggcagaagatatctgctattgcttgccttctcttgattacaa

SEQ ID NO: 196726 - DNA, 808 bp, Zea Mays
ggaagtgagaatctgaatgcacatcttcccaatccaacattttaccagcatttcaaattttttattgtcaaaaggcacttaacagcacttccatttgaacttttctttggatcgaacttaatttaattagttaattctttcagggcattgggctcaaataattttaacggcacacttcctgatgagctggggaaactgacaaaacttcgacaaatgtgagttatctatttggttgctttacatgtcttctacatgaccatctatgctttcttcactctttaaactgataactatatgcatgacataactgaaaaatgctatccaactttgagttgcagatacattgatagtaacgacttcagtggttctctaccatcgacattgtcccagctgaagaacctgtcaatcttgtaatttagtaaaataagctagcacctcgtgaatttgctcttcctttggaggtagaagctaataatcttaccaactcttgtcatgtatctaggtgggcatcagacaataatttcagtgggcagattcctgattatcttgggagtttgactaacttgacccaactgtaagatttatatctgaaaatcactaaggtttcaatattttaaaattgttttcttgacgtcaatagtaggaaggtcattcatttttctagagaagtgcaagatgttgcatatttttctacatcatctgttattttatagcacaattaatttgtcatgaggaactagcataggtattacttctctaatcaaatatctatgtgcttccaggaggctccaagggaactcttttcaag

SEQ ID NO: 196727 - DNA, 413 bp, Zea Mays
gcatgccaagattagggggtgaatgttagaaataatcttgtcattagtatttgcatgtttaatcatgtttttgaattttagccacggtggacagcaacgatgaaccaaccatgttgtgcagcagttagtttcctgattagtgtgcatggtcattagtggtggcgtctgcttaggatcatggcatgagtttaggatcatggcttgagtgttggccgagtcttttggctgggtcggctgggcatttgcatgtactttgggtctataaatcaatgaaaaaaaggcaaggcagtgagtctgttcggccagaaaactctctcctgttagcttgtctcgtgcgtgtgtgtgttcaccagaaagcaaactagtttttcaagtgcttgtgattagcacttgccgagtggagtgattccaac

SEQ ID NO: 196728 - DNA, 1595 bp, Zea Mays
catatcacgaaggatatcgagatatcttagcactgtgcaaaaccatcctaaaaaagtttctgattctagccaccttccaaaaagcttgtccacagaaagtgcaatatgtggatcaggagcaagaagtttggagaacagcacagcaaacagaactatgtatggagctggaccactttcatcttctgtagtaacaatgacaaacgacacagagccagagaaagtctggcactacaaggatccttctgggaatgttcagggtccatttactcttttgcaactttcaaattggacaagttacttcccacgtgatctgagagtatggcttacatttgagagtgaagagagatcattgctgttgactgaagtgctttcaaaacagcagaaagattttactcaggctgcatcacatacaagtagcaaggcaacactggttggcactggacatacaaggaacaaccctagtgtggatcagaccaatgctttctcccctgttggtcatagcgtggttagttcttctggaatacctgttcagtataataagtattctgttccagaaagggaaagtgtgtactctccagatgatagcttgtcgctgtcaactagttcggttccaccaaaggatgcttatactgtgaatagccaagcacactgccagaataagcattctgttttcattcaatctcctgggagttcatatgggcacacagacttgaaccatgatggaatacagggaggatgctctggtgaatcaaaccaccatcacagcagtagagccctatggagtcctacagtggcacatgtgagttgtggacgtggtaacgtggaatctcatcagaatcagcatgtttcctggtcagaaagtcaacatgaatctaaaaatggttcacaaggaggatttgttaaagatctgaattcaaggcaggatctatcgaaaaacctacctgctcaacgtattgggaaagatgtttccagtcctttgtttgcttggagtccggccgagtcgaggacagcttcaagtcaacaggaagggtcttgcttaagttcaacaactaacccaagctttctcgatgaacttcattcttctattgcttctgcaaagcctaagagctgcgctccagcaacccccattgaagacagaggttctagttcaccatcagatatgctaagtcatgaagaaagagttccaatctgcagtccacaatcagcccctttagcatctgcttctgatatgtgcaagatggaggagatcatgaatcagcaaagaacacttgtggtggatacatcgaatgcttcagttaaccagtctcctgaatcaagggcttttcctgtatcctctcctgataaccaagatattgaccgcgagtttcctagtccagttccaagatctgagaataaggacattgctgtggacagctcagaattagcaccagcgtcacctgaaaatattactacgaatttgcctgtttcagatacatgcaagatggaggaggtagtgagtcaacaacaagtaattggggctgttgtatcgaattcttcagataaccattctcctcaatctaaagtttcccctgtatcttctaataatgaagatacga

SEQ ID NO: 196729 - DNA, 1486 bp, Zea Mays
gaagggcaacttagccttctttctggtgctattctaacttttggtctcactcgttatccatactcggagtttgaactgatggctgaggagcttcttatgagtgactcaacaatcaaggtattttccctgttggtttcttgtgatattcaattattcatctacattgtatctgctttacaagtacatttaacttgattttttctaggtgttcggtgctttgagaatgtctgtaaagatgctccttatgtggaactccagaatggaaattgatggcggtggagattcgatagttgcaacatctttgttggatgctagcaacctgatagttctgaaggtttctagttggtccaatgttaattaccgctcttcctattttgctgcttgtgctcagtatgtataactattgctcatatgttttcaggaatcatctgtgatacactctaatgctaatcttggagttcggggccaaggtctcctaaatttgtctggggacggagacacaattgaggcgcaacaccttattctttcgctgttctacagcatacaagtatgatatatatgcttttcagcatcagtgtcttttttagccatcacctttctgatgtatttgtttattgctgcaatcttagcgtatcgcatagcaattcacattttgaactctacagtgctgcactgctctagtcaaaccaaagatgcagtactggtcattttttttgattgccagtacaggtaatttttatagcaatgctaatcgtaatggtttcagtcatatgtccccacttattttaagtgtatctaagcaatagttatactgctgtaatgactgtcatacttttgtgtgttgtcttgtttgctgtctggtgtctgctgtgtcatactatactgctgatgggtttttcctgtacacacaattcaaatttacaactacccgggttgaatgttcaatatgtggtcacatgagatattatgttctttttcgcttctgtgaccagttaaagaaagaatagtgataaatattcattttgtaggttggacctggttctgttttacggggcccacttgtaaacagaagtagcgatgatgtgtaaatacttttaccttcagctatcacatagagacattctttttccctattttttatgttggaaatctttttgctcattaataagctcttgcgcatctattagggccccaaagctgaattgtgaagctgatagctgccctgtggaaataattcatccaccagaagattgcaatctaaattcttcattgtcatttacccttcaggtacactcaatttttgaacactcgcatgcagctcccagatagattctctcataagatgcagcttatggtatctttctcctatttaggtctgtcgtgttgaagatattgatgtctggggtctcgtacaaggaactgtaattcatttcaatagggcaagaagtgtcactgtgcatacatctggaaccatcagcgcatcagg

SEQ ID NO: 196730 - DNA, 419 bp, Zea Mays
ttggcggatttaaaaattatgtatgtgtagtggatatccgttacctgcgagtaatggatgtggatactgtttttttatccatagcgggtaacgggttcggatatcggaaataagtcacggatatagatgtccataggcacttttctctgatagtccagaggcacttttctctgatagtccagaggcacttttctctgatagtttatttgttgccatctctagtcttacggatgatttggatggggttatcaggcagatagatgaccaatgtatagaattttggagtgctaggatctaagtgggaggttagaacttcgttatcccttttacccatcttttcatttgactgaatggtaaatctgattgttttatgtgtaaagagcaattgaggttgtgttttcaagattgcaatggtttag

SEQ ID NO: 196731 - DNA, 1153 bp, Zea Mays
ctcgaggccttcccttgtccaggtaaggggtccgctcgcttcagctacaacacacgccatatgttcgacgaaatgttggacctcctgtgcacgtcttatgcctgtttaacatgagcagttcagttggtagatgtacattttatattcttttgctcggcgcaggtattgaactgagcgagctctttgagctctgtctattgttggggagtggggactggtcccgtttgcctctcaggatgaaccgatgtctattctaattcccaatgctgttacaatttgtttaatgaagattgtaactccttgcatcttaaatctaaaattgcaagcactttactatttagataagtaattgagcactagatgattcaggttacatgcttctctcccttttcacctctgtgggtttagtcaaatcagttctgctgttaatgaccatatatattttcctgttgcagacaataagaatgtaaatccttacaactgcgaaccttttgtgggtcccaagcaagttagggtatataggctaattgtgcaccgaatatactagtgctgtcatctcttcaagacacttccctttgttgttgtttgattcataaatatgattgattttttatatataccttttgaataatttttctggtctatcgatagtttcactgggatttgtcctaccagtggtgaatctagagcaaaattgaggatggtgcatttggccttgtgggtgcataagatttttttcctaggggtgcatacatggtgaaattttaactgaatctatagaatccatattatttcgggggtgcatttgcactccctaaacataacctagctttgcccatgtgtcctactatatttccagatatgtatatcctaattgtcttgttcagtgcctactgttgcatgcaactatgaaaaatactaacataaagtttcaaattttatgcaggcaacctgtataccacatgttctcatggcaaatgatgtaattgtcgcagcagagactggtagtggcaaaacccatggttaccttgtacctttgattgaaaagctgtgctcaaaatcttctaccaccaaagatgacaattgtcaggacaccaccccaggagcacatgacatggtgttggtcctttgtcccaatgtcatgctctgcgag

SEQ ID NO: 196732 - DNA, 546 bp, Zea Mays
cagatctctcctcactcaagcttcaggcatggtgtctggatccgaagaagctttgcagggatatggacctccacatcattgagcgagagccatttattcaggaggcgagatgtctgacctacaagattagcattgctgctagtccggctccccttcagttaccctcggacagcagtctgcctccttcagatgagaatgagtttcatggtgaggaggatggagatgtccggggtccgtccaatccccggttccgacaaccacgccctttgcagcgtcagcctgtccaccatcgcctcagatcacatcagggcgtgggcagagaacggtctgtggctgtgcatggaaataggatggtggcgccggtcctagcactggaagatggtgctgctgtctgtgctggtgatgggctgctgacctcacctggaccttcctcgcctcagcacagatgtttggctgagccgctggagaaggctaggttgagctcgccccttcctgccactcatgtgccatgcatgacaaccttgaagaatatcttagctgggccgt

SEQ ID NO: 196733 - DNA, 419 bp, Zea Mays
tacactgtcgatactacattctcaaacaatcaattacgttgtcaaccatgggatctaaaattgaggtacattattgcattcactccgtctggactctggagtcacatgactctgaagatgccccttacaggtagcatcaagcacccaaacagcaccctgtattgcaagtttcaactaggaacctcatccagcaccagcacgcccttgctctgaaatcgatttttgcacaactagaatctcacaatgtagctcagaagaagaccgcgctggatgcagaggtactcctgtttctgtagaagaaaatacaagcagaaacaacaggaggtacttgcaccgggtctcgtcgacaaacagcctatttgccagctgacagagacgccggcggcgagcggtaccagagagagaggcggagatgatgg

SEQ ID NO: 196734 - DNA, 593 bp, Zea Mays
tctttccttccacttttttgagggtctacgtctatcgagagttcggattctcgttgctcaacagaggacatcgacaattaattatccggcttctgcactcgtgttgtgttgagcgggtggacggtggagagatttgtggccgctcgcggctgactagatcactgctgatgaaatttggtgagtgttagtccgtgtgaacgggacgccctgatgtgatctctatgccctgttgtgtagatgcaagggatgaggtagatcctgctgccgtgcatgtggtttggttgcaagatctccagatcttgcgagcatgtattgcgggccccatgtatttctggggatactcaacatgtgatctggtgcaggagtactttagcagtagaatttgtgtgagtccctcatcatgggggtttttattatggtctggtaggtgtactggagtggagtttgaaaccacagtaacttccattgttatgttggtctacatatgtgtttggtgatggaactatttgttggagtctgatgttgtagtgctgtaggttctggtgttttcccttggttggagttccaaggtgcgaaaggtgttctggtttagt

SEQ ID NO: 196735 - DNA, 733 bp, Zea Mays
tgacagggcaattatgaaacaatttcatcagatgaagcacgattgcccagacacagtgctatccagagatcagaagccctaacttatcctcacctagctcatggaaccattaaaatatttggcggatgtcaggttcggagcgataagagaccaggaaggaggacagtacgtacctgaacctctttgttgggcgctagcggctcccaatggctgtcgcagtcgctttcgttgatggccacgatgtagaactgcgaacgagcgagaaaagggtagatccttctctcccaactcgtcgattcccctcccctcacctcgacttcgtaaaacagaacaacgataacacccgggtgtggcgtccgagaggccacgacaagagcaggcgacccgtcgcgtcaaggctggtgcagcggtaggtgccacgagatccagacgtgcgatagcagcgtcgccacggggatggtctcctttggtgttgggtatggcggccagctggttgggtcgttcgtggtctgttggagctcgccctagagatgtggtgttgtttccttgttgcgccggcgacataggagatggggcggcggcggtctgtggggagggggaaccgggaaggagctcgagctcctggaagcttcacggaatggagagggtggggggtttgcgtcggtggcataggagatggtgggggagggaggtggaacgacacgatggggtccgaggagagggaggaatggtg

SEQ ID NO: 196736 - DNA, 394 bp, Zea Mays
ggatgtggttcatattgattacaacatatgctttgataaagggaagaggttgaagattccagaaattgttccattccgtctcactcaaacaattgaatcagctttaggattgactggcgtggaaggtgtttttagagttacttgtgaggaagttatgggtgtcctcttgaagaacaaagatattatcttgatgttgttggaagtatttatttgggatccattgattgagtggacacgtggaaatatccaagatgaagcaggaattgccggtgaagagaagaaaggaatggaattagcagttagtttgagcttgttctcttctagaattcaagaaattcgtgttcctttgcaggtaactgttatctatttgagccggaaagtttctctgaatcta

SEQ ID NO: 196737 - DNA, 600 bp, Zea Mays
gttttgttaatttgaaacaaactaacatgtggcggttcccatggaggaaggtctttctcaaacttccctgccaaagcatcagtcaatagaatggaatcgtcctgcttctcactagctttccatattttcaaactaggagggaagtagccattgctgttccatttccgcagctgtatgattgagaaaggaccttggattttattagaaggatccatgtacagccagatcttctcagactcgttaatggctgattgaggtgcagtttttgcccctgaacatatgttattagctaaaattccagaagaggcaccaggtgacccttgtggagcactgcgtgtggtgccttccagtttaactgtttgtgcaccagtgtttgggctctctgatttacttgtataaccagcactttcaccttgagaagaaaatgtggacctccgtggaaggggtgattccatatgagaactcgattcggcccatgtatttcgattagattcccaattagtttttgaatctcgctgtgcagcatttctaccatctcctttacctggaggcacaggattaccatctttcctcaagaaagaacctctggacttgttgaag

SEQ ID NO: 196738 - DNA, 708 bp, Zea Mays
aagaagctcacgcccaagaagaaaatccaaaagaagaccaagagccaaggatgtcagactgagcggaagaagaaagcctctccagcaccacctcctgtcaggatagagaacttgtccgacgtcaaggatgtgtccctagctagccttgatgaccttctcaaggaatttggggacactttaaaaaaggagttcggaagtacctctgagagcgctcgcgtgtagtgcgacttgtagtagttgtatgcttgtaatgaactgatgtaatgaataaaatgacttggttgaaaaaaattggcatatgcataatagtaactctctccccctggcagatggcttcggataaaaccacgcctaccgcctccgggattggagcagggtttcccctaagagctgaaagagaagccggtggagaagggagtgagacccacctccctgcacctccagagctacccttagatttagcccaagttctagccaaccaaacccgactcattgaggtcctcactagaagtctggagaatcaacgcccgaatggtggaagaccacaagacaggatgggagattttctgaggctcaagcctcccacattcgctggatctagcaatcccctcgatgctgataattggctgtgcatgattaaaaggaagttagaagccatcggatgcccggagaatcaacgtgttcaattggctgctcatcaactttccg

SEQ ID NO: 196739 - DNA, 942 bp, Zea Mays
tcgcggacgttttccctgagccagactgcagtgcggcagatgaaaatgggaagcagcaggtggtatagcttaattagcttccatcgacgacttaattaattgcatggttcggtagcagtattttattaatgtcaaaactaacatacatagggtttcccgctttatgtcctcgtttaaaaaaaataagggtggaaaggaactcatgatgagacatcgccgaagagttatatttagcgtcattgtcacagcaattggtaagagccagcccctaaactatttctgtggctttatgtagctagagtgcgtaggttctaacaaaaaaacacaagtctaattggctttaataatgcatgactgccttaaacaacagttgctggtgtgagtttacaaaacttccctgtgggcactgctgcatttcttggaacaacaaaggtattattcagtgttcctcttaatctttgttttcatactcttaaggttgtaactttttgttattatattagtgaatatcaaatattgtttatctgaatagccttatatatctacttatcagggcttccgtgttggtttgaacttggctcttgctatagcactacactacattccagaggtaatttactctgcattggcttttgtgaaggtacaaaaattatcacttcataaatttccatgcatgcatgtatgccggcaacctttattgttttctcattttaaggtgcagctagatatggaagtaaaacttccctgcattttacgactacaaaccatttttagtaataacttgttagttacaatgtgataatttaaacaaatagttagcatatttcttctcatcacatataatttagttcacaacatagatcaaatgtgctaatacctgcctgctgcttttattcatccccagggtatttcagtagctctcccagcatactttgccactag

SEQ ID NO: 196740 - DNA, 400 bp, Zea Mays
cgctgcttcggtcagcaatgctgctaggcgaactctgtggtccctcatgagctgaagaagattgcctcaacaccctagctggtgtggtggcaggtcttaacaccgacctggatagtgctagcctggacctctctagggtacacttggaactggaggatacacacataaggatcgcagcctggaagctcaactagaaggaaggaatccccctgaagttcaagtccctgccatggcattatcccctccccgcaagaggatctgctatggagaaccaggatccatcaccaggccgctataaattttatattactacacttataataataacaaccatgtgatggtgttgtttgcaatgtttgagttggagttttgcttgagtgcaatggtcttatggaatgat

SEQ ID NO: 196741 - DNA, 513 bp, Zea Mays
ctgtactacagtacatagtgaacagaggaagtattacctcaaaagcatttcttgacacccagataacagcaacacacgctggttgtgttaaaaatgtgcaaggcataaatattgtactccctccgtcttaaaatatataagggatctagagttcaaaaattgtaccaaaatacaagtattctggagcctccctcctttgtctttttagcagcaaatattgagattcctttttaacttggcatcactcaaacagacactcagtacttaaggaaaataacaactgaagtactccctccatcctaattagtgaaggacaaggtggtcttttgccaggattcttatttcgtctggaaatcgcttggataccttgtatttaaggatggagggagtatatgtttgccactttgtatttgcttatatattatgggcatcgtaaatccatagtggtacttcactgttttcagtgcgacaatacagaatcttttgaatcatgatactgcagatagacacgac

SEQ ID NO: 196742 - DNA, 368 bp, Zea Mays
agacgccaacgcggacgtgaagacgaaggatctcgacgaggagaagctggccaagtgccgggaggtggtgcggctggaggaggaccacgaggcgtacggcgccctgctgcgcgacgcggaggggaagctggagcacgtgtaccagatggcgatgcacgggagggacatcaagaaggtgggcggcggtgatggcaaaggggaagagggttccggggcggtggacgaggaggtggtgcgggtgctcaaggacgcgggggaagggaaggtggtggagcgggtgaacctcgccgatcggcagatgcgcctactgccggagcccattggccggatccgcggcctcctcgcgctcgacgtctcccgcaaccagc

SEQ ID NO: 196743 - DNA, 585 bp, Zea Mays
tccgtctccatgggttgccttactccattgtcagtgatagagatacagtatttactagcacattctggtcagaattgttctagctagcaggagtcaagctgcacatgagttcagctttccacccccaatctgatggacaatcggaagtggtaaatcgaattatcaccatgtatcttcggtgcctggcaggggatagaccaagagagtggctttaatggcttccatgggccgaattctgctacaacacttccttccaaactgctctccgatgctctccatttaaggtggtatatggccgagaacctcctgctcttctgccctatcatccaggaacatcacaggtggctgctgttggcaaacaactacaggcacgtgacgaattcttggtggatattcgtgatcgattgattcagtcacaggtgacaatgaaaagctactaggacaagcaccgactggaagtggagttccatgagggcgattgggtatggctgcgcttacaacaacgcatagcagttggtgtcacttctgctacaccccacaagcttgggccaaagttctttggaccatatcaagtgctatcgaggg

SEQ ID NO: 196744 - DNA, 475 bp, Zea Mays
ccggggttcaggctggccaaggaatatcggaagaaggtgaaggagtggcagctgctgccttacaccggaccgtatcaggtcgtcagtccgagcgctggaggtagcaagagggtgtcgaagttggcgaggaggaagatggagaagagggcagtagggattgcgcacgagttcctgagcctgaccgtggagaagatggtggaggtggagaagttcagtcagttcaggaagtggtttgggatcgaggtcaatgtccgggacgtgttcttggatcatcccgggatattctacctctcggcgaaagggaagcggcacacggtgtttctgagggagatgtatgatcgtggaaagcttctcgagtcgaatgatgtctctgaggcaagagccaaactcgttgagctcatgctccttcgtcggcgtggtctcgggaatgccaattcaagtgccaacatggcttcaggtgccactgctgatgcca

SEQ ID NO: 196745 - DNA, 319 bp, Zea Mays
tgatattgaaaaacaagtagaaaaacaattttcttcctggtttaaaaattatgtgagaacttgttttatatttcattataatcctttattacttgaagttatcctcattgtatacaaattttatatatacagattggaacactttggcatgagcgaggagaagatctctgttctgatctattagctttgtcatgtgaacctgatctgcgaataagagtttattcagcatgtattgttgatggtgttcgataccacactgtcgaccgtgagaaatataggaggacacaaaatagtggtgtaatggcacaaggcacacata

SEQ ID NO: 196746 - DNA, 393 bp, Zea Mays
atgcaaatcaccgagtagttgagcacaagcagcaagtcgatcgtgagcaagcagctcttccctgctcatcgtcgccagctggtccaagggaggaggaagaagagatagatggacgacgtcggcggtgctgctggtggtggtggcgattcaaagcaggttcgtacatacgttgcccctttctcttgcagtttttctccaactacacagtgcattgttccgtatatatatggagatgaagaactcttatatatatctattttctagctcttggttgaagcagatgggaacacacgcacgcttaggccgaaccagctgaatgtactctcctctgcaatggtacgtacacgttgtgacactatagtaaagacgtatatttccggcggccaaagccgg

SEQ ID NO: 196747 - DNA, 828 bp, Zea Mays
cgaaagaagctccagaaggcgatcaggttggttcagctcctcatgtccttgtacaacaagcaccgctcccaatcccaggagaagaagccagacacggcttccgatccaggtggtgaggaagacagcgaggccaggctagagtcggcgccggaagacaagaagccggcgtcagcagagcaggaagagcagaagccagcggcgaagaagaaaccgagccggaagtacagcgatggcgctgcacggaagttgaaggacgacggcgaaatgggcaagggccgccgtgatgaaatccaagtggggaaggctataccacagctggaaggggagcgccctatgcggaagaagctccagaaggcgatcaagctggttcagctcctcatgtccttgtacaacaagcaccgctcccaatcccaggataggaagccaggaacggcttctggtccgggtggggaggaagacagcgaggccaagcgagcgtcggcgccggaggaaaagaagccgcagcatcggaattggccacgagaggaagtgcgcctggagcacatcctcgaggaaactttcacaaggcttcttttgacagagtacaacaagcagctgagcggcgtgagtcagaagtgcctcctcaccttctccatcttcgagctcgcctccgaggtcaagaagcagatcatgatctattggtgggtcgcggagttcaacctccggcaccggagtgatccagcgcgggctctttctggcggtggcgaaacaagtgattcgccggcgctgcagggtaaaggcgcagacgctgctgacagcagagatgacgccgaaagcatcttcatcatg

SEQ ID NO: 196748 - DNA, 408 bp, Zea Mays
ccagaaagctgtccgctcactggagactggttttgcgggatggggttgtggccctatcaaggaacttgattgggactgggaaaagataaaatatagcttgcgggtacctaatccagatcgtatccatgctatctatgcagctttcaagaaaggcatgagggtcgaagatatccatgaaattagcttcattgacaaatggtttcttacagagctcaaggggctagtggatgtagagcagttccttttatcaaagagcctagatcagttgtcaaaggatgacttttaccaagtgaagaagagggggtttagcgacaagcagattgcatttgcaacttcttcatcagaaagtgatgtgagatcaaggcgtttgacattaggcgtcactccgacatataaacgtgttgatac

SEQ ID NO: 196749 - DNA, 404 bp, Zea Mays
gtttcgtggcattggatcgtgaccgtccgattggaaactggcggatggatccggccccgcgttgcatgttgtaacttaattgttttcagaaataaagtttgttcattgcatgttgtgtttcaggttataggtagggaacaagatccctgattgagccttcacatctagcatttcccatcgcttcagaatggcccaaacaacattagatcaggaagtcaattctctctaaactgtcacagaacaagaaatctctcgtacaaattaatgcctaaggaacaaaggaaataaattgagattgaggtggtgctgttcatcggcacttagtccacgaaaagtgggggagtgcgatcttcgtagctgcacgttctcggagcatagctgagcgagaagggtggtcggtgtgc

SEQ ID NO: 196750 - DNA, 419 bp, Zea Mays
atgaagtgcaacacgagccgacgacagtgacacagcgagatcttgcgattgttggctgcagtactacctagtagtagtactactaactacaatacacggccaccacccgatagaggcacacgctaggtgatgctgccaagtgtgacgaggcagacgggcgggcggggtccggggcagtaccgctactggtggccatcagtggtgctcgaccccccaatcatctactactaataatacccgtacggggggcggctacttagtcctcgtctcagatctgcagcgcaccgtccctttcagctgctcatcagccgcagcggcacgcaaatcgttccgttctgttgcactctcgatctcgttgtccaatagtgcagctaactctccgcactccgttgcgagcttgcgctctgcagctgcggcgg

SEQ ID NO: 196751 - DNA, 309 bp, Zea Mays
aacagactggcacccttgctgccctctattgtttccacaaaccaaagtgcctttgttaggggcagaaacatccatgagaacttcatctttgtctagcagatggtaaaggctctacacaagaagaaagaagcacatgtactgctgaaattggatatctccaaggcattcgattcggtttcctggctctttcttcttgaaaccatggaacatgtggggtttggaaggcgatggtgcgacattataagcctgttgctgtcaacttcctctacacgtgtccttgtcaatggggaacccgggatgcctattatt

SEQ ID NO: 196752 - DNA, 313 bp, Zea Mays
ttttgataggaaaagggcctatggcatgaggttgaacatacttgctggaacagctgttcggtttgaggtgctcacattccatccatgcttatagcaattttcagttcaaagatgctaagactatattcttgtacttaccctcctacttgttttaataaatgtactgcacacaccactttaaaacctttcagaatctgatatctatattttttctcagccaggggatgcaaaaagtgttatacttgtaagcatcggaggtcataaggtaatcaaaggtggaaatggcattgctgatggtcctattgacagttca

SEQ ID NO: 196753 - DNA, 598 bp, Zea Mays
gtgttctccaaaattgatttgaactctggttatcatcaattgaggattcgtgaggaggatattgagaagaccgctttttgcactaggtatgggcattatgagttcatagtcatgtcttttggcttaactaatgcccctgctgcttttatggaagcaatgaataggatgttgcatgagttcttggatgactttgtggtcgtgttcctggatgacattctgatttattcaaagaccgaggctgagcatgagtagcatctccgtctcgttctgggtgccctaagggagaatcagttctatggcaagttgaagaagtgtgccttttggctgtccgaagtgaatttcctgggcatgtgattaatcagcggggcattgcggttgatcccaagaatgttgcggctatggtggagtggaagagaccctctagtgtctctgaaatccgaagtttcttggagctcgctggatattatcggcgcttcgtaccaaatttttctagcattgctaagcctttgactagactcttggagaagggtgttctcttcgtctggtccggcgattgcgaggtcagttatcagacattgaagagcaagttggtggacgc

SEQ ID NO: 196754 - DNA, 500 bp, Zea Mays
cgcagcagcgaggcacgcacgcaggccgcacggtggccatgccttgccttggatcggtggcagatctagggactagtagggttggattgaaggagcatccagaaatggcactgctagtggagtatatccgagcgagcggcgagggttgcggtgcggagggggaaaaacgaacctttggcgcttcttccccgagggcaagaaggcatgatcctgctcaggaagtttttgcgcctgggtgctggacttggtcctgtagcccgttgcctccttccctcgactcgatccacaccgatcaatcggtcggcctgccggcggcctggtcgaggctgctggttttggctggctggagtttgactggatgcgagagggaggaggggaggaggattgagggaggaacggagaaggagagccctagccccgccgccactgagatggtaggggaaggggaggaggaggggggacgagagaaatgggacggcgtgcaggggcgccgggggcgg

SEQ ID NO: 196755 - DNA, 403 bp, Zea Mays
gaaaggaccatcaaaacagagcccaccttatccatccatctctcctcccagccacacgcaccagttcgcagaactccatcaccgcacgactcttcgtcccttctccactgccacgctactgtctcttccttctccgtcgcggccagcctcatcccttccgtctgactgtcgctgcctctgccgctgccagcctcctctcaaccatgcctatcatatccgctgcattgcagctgcatttcccatctccatcaccgcccatagactgcctttgctgctcgacgtccacatctccctggcacccaccatacatgcctcctcccccgccgccacccactgttccaaccttctcccatgccgctcagcatccggatctgcacataagggcaccagggatagcatgtcc

SEQ ID NO: 196756 - DNA, 743 bp, Zea Mays
ttcagtttctctctccccactttccccatttttaccgcacatctctccttcctcggcgtctcgcacaccccagcaccttcgtctcccctcccctcccccaacaatcggaaccggataggaagttcggcttcctcccggacgactcggcgcaaggtcgcagcttttctctcgatttttcgcgcttccccgttttgacgcttgcttcgcatggggattctggagatctttggggcggttcgctgctgagatggttcgcctcatcacgcgctgctgtgactcccaacaggtaggctccgctagacctctttctagccttctcttggtgcacggaacagctggggagtggggagtacgagtcactagccttctcttggcggctgagagcgtgagctcggtggagttctgatctagcggaagatgggatttttgcggggctgacttgtgttgggtttcttttgttgcgcgatttggtggtgtgggcttcattccttccatatatgtagcatctgttttgtatgttgcttccgatttggtgggattccatatctcgcactagtgaattagtgatgacttgcttgactagtttcttgactggtttcctgttctatttctcattgttgcttcagttcttccgatccgaggagcccctgttatgaacggcatgccgatctctgcgtcctctgcggcaagcgtcgacagtggcgcggtggcggccggcacgcccatgaagaatgcaacggcgg

SEQ ID NO: 196757 - DNA, 303 bp, Zea Mays
cgtggctgcccgagaggagaggctggtaggtgaacaaggggcagggagcaataatatctttattacttcttgcctatctggcagattacaaaagtcctacttatataggcctatagccaactgaaatctcctaacaaataggctgatctaaacagcttgaaccaactgaaatctcctaacaaataggctgatctaaacagcttgaatctctatcttaacaaactcccctatagcaaacttatcccttcaggcggcctagaactcaccatccttatcccttctcttgtatgtctgcccgaccat

SEQ ID NO: 196758 - DNA, 1011 bp, Zea Mays
ctgctccctggaactgagattaaggtattttcacaatttgtatactattttacttttattggaagttttgtgcaataaacataatttaacatgtgaataagacaagtctacaattcaggcatatctcaacatatattggattaatcattcatgaaaaacacgatcttctactcgccaaaaaaaactgtaaatattgttggtgtcaacttgcatagtataattctgggtgaattcctttatatgctgtaccataacatctgtgttttttttacatattgtccaaagattgcctgcgactgatatttaatatttgttttatacttgtcaattgtcattgctgaagttgtagtatgccatgaattgaggttagtttttttaggggaaaacagtagggtagttctgtactgtgcatttaattaaaaaaagaatgaggataaaaggagttacagtgcagcttcatgcaacaagcagccaagaccaagagaaaaagggcacttaagctagtgattcaggtttagtcgtgaataaattgaagttagcttttcagtgaatacatttgataattaaaggcatctttcttttaccatttattacaaagtgtatgttttgtaatgtgaagcgatgtgatttgtcgtgctaataatgtagggctatgtgaagaacgtgaattccaaaggatgttttattatgctttctcgaatggttgatgctaggattactctatcaaatttatcagatgaatatgttgaaaatccacagaaggatttccccgttggaatgcttgtacacggaaggtgagatcttttaattttcaaatggtcatgtaaattacagatatgttctctcgcgaaactaacaaaactctgcaggatcctgtctacagacccatcatcagggagagttgaggcatcacttaggaagaccactggttcaaaattggaaaagctggatgatattagttatagtgacttgcatgttggggatatcgttgatggccaagttaagcgggtg

SEQ ID NO: 196759 - DNA, 529 bp, Zea Mays
gtcgcagtggcgctgacagtggagagcgacaggtctgttggctgttacttttattgaaagcgattgttttctttgtgattttgttttgtttggaatggatagacgttattgcggggggcaccgaaatgatgtctattagttatgtcctgtttaagaccgatcgcgaagtttgaagcgcttcgaaagcctacgtgttctgcaatcagaggcaatgctttgtgggttgcttcctcacctgttagtgctgtaggaacaattattttaactatttttctctccattttgcgcgcatgaagtacaagtgaatctatcgctgaaaattgcttaagcattttgaattgaaggttgcttctgcagttcgtgacagttgcatttctctcaggatgcgccggagaagatccccagaagtagtgcaggaacgattcatcaacgaacaccagagaagaacatctccaaaggcagtgctgcagtcattcatcaacaaacaccggagaagaacatctccaaaggcagtgctggagtcattcat

SEQ ID NO: 196760 - DNA, 614 bp, Zea Mays
ggcatcgtgctacacctactttcatcaatcacaatgagatagcaaagaatgttcaacagtttctgcaccaacctgcaaacaatcctagctggactccaccatcaactgattacatgcattctcgcttgagttgtcaaatatgcaaagttgttatcattggtacagacagtttacttgtttgtgatgcttgtgagaggggagtacatttgaaatgccttcagcagtatggcaataagggtgtccctaaagctgagtggcattgttctgcatgcctgactcagagtaagggcaaacccttaccaccaaaatatggcaaggttacaagaactgtagttgcatcaaaggctgctccacctggtggtggggcacagctttctttgcagggatcagcagaaaacatggcttcaaaggaaaatcaccaaaagttggctgcaaatgggaatcttatgaaaccaatctctattcaaggtggtagcacagcacccaacagtaatgtattggcactgagtgccatcacggctggttcacaatcacaattagtttctaccttgagaccatcaagagttgttaaagctgaaatgttctctattggaaaagaaggaactgggcaaccg

SEQ ID NO: 196761 - DNA, 615 bp, Zea Mays
gagagaatgagagaagtcaggggacgaatcgaccggagagaatgagagaagtcaggggaggaatcgtctccgtcgtgccgccatcttctccactaagttgacgccggtcgctagtcgccgctctcgacgtcccccctcctccgtcgtccactgcccttggcactacaccagtgtcgtccgccgcatcatcgttcctgcttcgccgcatactcgccgcgccgtcgccgacaaggaccatccgggctgaggcctgctaaaatctccaccacttctctgactacttcgtcatctcctccacgttcgacatagatacaaatgtcttttcccccatcggagctgagtacatccgagtgtcctcactgatagggtttgcaaatacatatgccttttctcaattggaactccgtacacctgctcgcacttgattatttctcattgcagctatcagtcgtccgttcatttcacgtaggaccttcctgtgcttccagattgttaatggcgtccggtcaaaaataagttagctataccatcctcaccctcggagctccgtacatgcgagtgtcctcgctgttagggtccacatgtacggatgtctttttccttatcagagctcca

SEQ ID NO: 196762 - DNA, 500 bp, Zea Mays
ctccaagtagagattataagaacggtgaggataaaatcacccagtttcatacatctgattgtgttttaatcccttttgtacttaatattggatgaatatttaggaaacgcagtgccgccagcaaatacttaccctcctacaaatctcaagaagcatcatgttccacatgcatcccctccaaagggatccactggtcaaactgtcccaggtcacaaatcaccagttacaggtaatctcagctattaaacttaggctgtgtccatttgaacattacaatgtagaattgtagattgacaaccaaaactacttgtttcaggatctgcgcctgcaacaagtcctttgccccagaacacaaacatgccttcaatcccgaagaatgcttcatcagtgccacatgcccatccctcaccaccaagtatagctccagaattggcacccactggtagatctcatgctcagggatggaaatccagtaatcccaataacaaaacaaatagatt

SEQ ID NO: 196763 - DNA, 409 bp, Zea Mays
gtgggacccacgtctgggcgttctcctagctcaggttgtttctacgatttctcgggcgcagactcgtggggctggccagattcctctcatcaaccattacaagcctgggaccgagccttccccttgactcatggctctcaattgtggctggggtcctcttccacgggtcttcttccacaattcatggtaacagactccaatagaagatgccaatcacgcgcatgcctgcgatctggtggattgggttgtgagattcctgatcccgcctctgcccatataacgtagacgcaaaaccccccaaccctcatcttaggcgccgccaaaccaccgtcaattgagcaagcatcgacgagaatagggaagaagtacatgaatcaccgcgggtccatgcggtggcatggttgggagc

SEQ ID NO: 196764 - DNA, 553 bp, Zea Mays
gaaaaaactatgtcgttgttgtgagcctgatattcaccctaggaccctggtctaaattggaacatgcctcaaggagatggagaacacaacaaggaagcccttggacaccctcacccgtggccacttccttaggaggccaacaaggacatccaagtcaaattggaggcccaatatgtaacaagttcaagttcatctcagaattcaggactagtctgcagtaaaatgaacgcctcagacacatacgaactatgttttcaatgattcatctatggatgaaaagatgatattataagctaatttatagctatgatttgacatcaaagttccactggagtcaatgggaatcgtcagaacaagtcaacgtccagaatctgtcaaggtgttgagtcaccgtcttttgggtcgttgggccatgtaacatgttgatcaactagggggcgcaaattgaggttcttggatgccccttagactatataatcagtagtcgctgcccacattagagttcgggacttcgggttttattttagaacaatttgtcttaaaacggttgtcg

SEQ ID NO: 196765 - DNA, 314 bp, Zea Mays
tgtatccaaaaagcagatgccaccaagaaagacatggaaggtacataactggttgtaggttcagtagtgatatgagcaactgatggtctcgagattctgggacttttgcattgggtagatgtattataatttaacttgtgatataagtttatctaatcgcttactgcacttattttgccttaagacaaatgaaagcttgttcccatgtgaactttcaaaagaaacattatcgtctgtcaaggatacagttgaaatggctgtcaaagaatggggagataaatcattaactgaactggaagcagaagagcggctgt

SEQ ID NO: 196766 - DNA, 779 bp, Zea Mays
ctctgatcattcagtaccaaatgacaacatagctttcagggtaagtcaggaatattactaggtacttgattcatgaatttcacagtagacactgttatatattcagttcaaagggattgataagaatttctagtcttagctagaactattaattatttgtgccttctgtatttccaggaatcacaagttacaaggtctagtgacttgaaccaggaactcaacaatggatcactatctctagataaagaaatgtctgataaggttagtactaaacaacattgcattacttgaaatttagtatgatgttcattacagatgtgtcttctgtatttacaaagctcaatatcatgtgtcacaggaaactcaaagcaagcaacaacaacaaagcaaattgcaacaggtatctccatattgattatacttccatgcttcattctatttctttgaatatggatagatctacttgcagattttccagtatgtacataagcatttgtttggctactcttttattcttgtagaataaacagaagactgtcttgttgtactcaacaaggaaaagaaaactaggccaagtttttgctgttggtaatcttatatctagagatactactcatgaaattggaggaactgtacttggggatggatattatgctgttgcggttcattatcttaacaatgttgaagatgaaagattacctcgaccacacggagatcttaaaactttggaggatgctgtgggcatgtgtgttgcttggcctcgcacacatgtgagtgcg

SEQ ID NO: 196767 - DNA, 308 bp, Zea Mays
ttgtggtcattggaggcaaggctgtgaggaagcgattgatgagagacccatcagccaaagtacagcctcgtactatgagaccactgcatttactctagggccccaacatccgagcaccccgcagagaacctgcgggcatttcgaagctaaaaggagagcttcccccaaatggcatggaacccttagacataaacaacagaagcatcaaatcaaatacagaacaacataataccgcagcttcaaatcctgattagatagcccttgaaggtttgcatcaccaacatacaagacacaaccactagcttgca

SEQ ID NO: 196768 - DNA, 920 bp, Zea Mays
caaagctgtaagtgtttccatgagctactcctttgttctagctcatctttactttattcttctgatcagggtggagacacaagatggtggagatgcaaaagtagaagtctcccctcgtgacatagtttacatggaaaatgctgagcctataaatggtgaacacccagagattctgcataaacttgaccttcgctatgcgtatgtccctcaaattatccattagctactttagatggatcattgagcttttcttcattgcagatgttacaatatttctactttctagcatgaaacctaaacaaataagaataccaataaagtttcaattctaaaaataataaggacaggcctggtgcagtggtgaaaaagctgtctcaccgagtcaccaggtctgggttcgaagcagcctctctacatggggcaaggcttgcctccgtttatccgttccctagaccccataacgtgggaccatatggcactgggcctgcccccctatctatctaaaaacaacaaggagtccagtacttcaagttgcttgtgtctctggtgcctggatgtaaacaagattgcatgttctttacactgtccatttgctacactttgttaaaagctaactcttctgatcttcttgtcttctggattttcattctgtcggaacagtggcacctcttggtgtgatgaatctcttgctttagtgtatgaatcttggtttaaaactcggaaaatcagaacatgggtgctctctcctgataaaaaagatgtcagcccacgcgttttattcgaccggtcttcagaagatgtatactctgaccctggctcaccaatgatgcgaagaactgtgatgggaacatatgtcatcgcaaagatcaagaaagaagacggaaatatttatgtcttgttgaatgggatgggtgccacac

SEQ ID NO: 196769 - DNA, 316 bp, Zea Mays
gccaaaaaggacaaggcagtaatctatttactttgcagtaagcacatttgacaatctctaatgtaatgtgaagtcgatctcaatagattttgaggcaacctacaatttgttctggagcatctgtttgcctacacattacccaaggaacaccagtatcaagtgcaagtgccatctgagctgcccatagcatgtatctcttccctgcttgaccataatggccttgaatgttaccgtattcattttcaatctgtcaaacatttttcagacaaaacaattatacgcattttaatgtaatacataattcaactgacacatt

SEQ ID NO: 196770 - DNA, 808 bp, Zea Mays
gtgttaagacccagtctgtagtgaggtcccaaaccttgaggaagtcagacaaaacatttacaatgatagctcctctaatatcatggacccagctccttgaaataagggcatcgtggacattcctcattttagccctagaagagaccatctggaccaaatgaggggctagctgacgtagactttgggcatcgatccaattatctgtccaaaacaaagtgtttttaccgttgcccaccaccgaagagattgctgccgagaagaaggccttaactgaaggatgagcatttattttaaaggatgcccaaggtctgccagtatcggtttttttcagccagagccagcgtaatctaagagcccaattcatcaaacgcaggtttaagatacccaatcctccaaattcttttggcctagtaaccttgttccaagctaccaagcagtgtcctcccaaagcttctttcctccctctccacaggaaattccttctgatcttgtcaattgctttgaaaacccaagaaggaaggtccatggccatcattaagtagatattcattgaagacaggacagtctggacaataatcagtcttccagctctagtcaacagatcagctttccagcagggaagacgatgtgcaattttatcaatgaatggttgtaagtgttgtctgccgagcttctttaaggatagaggcacccccaaatatttgcaggggaagttggcaacaacgcatggcagcagattatgaatggtatccagattttcagcagtacagtggatggggaaaacgctgctctttgccatattcacttt

SEQ ID NO: 196771 - DNA, 479 bp, Zea Mays
ctcggggcagggggtgggcatcacgtggtggggtcgagggcaaggaagacgagggaggggctgtcgaagacaggggcagtgagcgaaaatggaatgggggagaggcatgcacggcgagatgagctgggttggtggcgaggcagacggggccacaagagcgagggcaacgtgaggtgggggaaggcgggggcacatttggtgtggacgctgacactactctcttaatagagtagtatagatatggcctcgggctggggttggggaaccaagggccaccgtgaaagaagaaccaggggagggaggtagcacaacagagcaagagagagagccgctgcctgggctagccggtggtttggcgctcgcgtgcgcggtactgggcgttcttgtcaaagcatcgccggtagccatcatcccgactgtcgtcctgatccccggtgcatttcttttctatgtttttgtacatgcatgctcagcggcta

SEQ ID NO: 196772 - DNA, 340 bp, Zea Mays
tctgaaggtatccttcattctcatctcccagctgctgcttcttcgatcatggtaggcaatggtgcaagtattcctgtcacgacccgcggctcatcgatccttgacatcaactccactaaatttgtgttgaacaacatccttgtcgctccttccatagtccgtaatttattacttgttcgtcaatttacccgagataatggcggttctatcgaatttgacgcttttggtttctctgtcaaggaacccaagacggggcgagtgattcttcgctgcaatagctcaggcgatctctacacactttcaccagccgcccagtccactgccagcgccctcctcgcag

SEQ ID NO: 196773 - DNA, 489 bp, Zea Mays
gaccagtttctagttgtggagagtgcggctgggaaggggaagaaggcttctctccatttcacttatgaattcaaaccccggtgctggtactttgttggtctggagcactctagcaaacaagctttgcttggtaagtctgagagtgaattgcggttgtatgtggatggggaccttcatgagagctgtccatttgagcccccacgcatcgtgaaaccactggttttttgttgcattgggaccaatccatcaccaactattgccggtcttcagcggcggcggcggcaatgtccattgtttgctgagatgggacctatctatatctttacagagcctatcgggccagagaaaatgagtcgacttgcttccaggggaggagatgcacttcccagcttcggcaacggtgctggttttccttggaaagctacaagtaaccacatcagggaaactgcagaggatggttatacactcgatattgagattggtggaagc

SEQ ID NO: 196774 - DNA, 579 bp, Zea Mays
tgaacaacttggttagccaaacgatagcaatatccccaaggcatttccacacctctattgggataccatccgggcctatcgccttgcccctttcatcctctttaaagcttctttgacctctgattcttggatcctgcgtacaaagcatctatttaaatcatcaaaggagtcatccaattgggtgtccatagtctcattctcaccattgaaaagattgtcaaaatacctctgccacctctgtttaatgtcttgtcctttcaccaagagttgatccatctcatccttaatgcatttaacttggttgaggttcctcgtcttcctttcccgaatcctagctatcttatagacatccttctccccttcctttgtacttagtcttcggtaaagatcatcatagacttgagcctttgcctcactcacagctcgttttgcagtcttttttgccaccttatacctctctatgttgatcgtgctcctgtcatggaacaagctcctataacattctttcttctcctttattgccttttgaacatcttcggtccaccaccaagtatccttaggttcactgctactcccttt

SEQ ID NO: 196775 - DNA, 586 bp, Zea Mays
ggtagagaacatctatcatgggaagaagcagaggagctagcttcacaggaggaaatctgtagggctcaattggaacaattacatgaaacatggagacagaaagatatgcgtattttgtcacttatgaaagtagaagacaatatcatgaattcgctgctttcttctaaacagtatgtttcatctttggtggaccatgatcaggaaagtgagtttcattatggacaaattaaggccctcctttcaatcttcgcaaagccctttgctgacctggaatcgctggaccatatgctatcatcatctggcatgtttcctcacatagacaatcccatttccaatattaaagatgctttgtctttgggctcttcattgtctgacgtggtgtggcctttagctggcatattgaaggatcatgctttttttgtttgggaactcaatcttcttgattcggttcttgttttatgcatgcgtgagatttcatcttctcttgagcatggcattaatgccaatcaactttacatgactcttaaaaagaagcttgcgatctatgtggaaaaacaagttttccggtatgttacagaaaggattg

SEQ ID NO: 196776 - DNA, 808 bp, Zea Mays
gatcggtgcctacgccatcaggggcctgtacgaggaggtcgtcgcgctcgcggtggccatggtcagggaaggggtcatcccggacaggttcctgatcacccggattctacaggcctgtgcgtacacagaggacctggagctcgggacggcgatgcattccctggcgatccggagaggtttcatggcggagggagcgagggacgtgcccgtggggaactcggtgctggccatgtacgtcaagtgcggagagttgggccgtgcgcgcgccgcgttcgacatgatggggcagcgggacctgtgcacgtggaactcgatgatcttcgggtgctgccgctccaacgaatgggaagaggcacggaggctgctcgacgatatgaggcgccaaggtacagagcctgggcttgtcacatggaacacgctggtttcgagctacgcgaggtctggggaacttgatgtggccatggagatgctggagcagatggaggagtccggtgttgctccggacgtcgtcacctggactagccttgtgtctggttttgtccacggtgataggggtggcgaagcactttggtgtttcgcgcgcatgcgccttgctggagtcgaaccaaacggcatgacaattgcgagtgccatctcagcttgtgctagtttgcggttgctgagtcagggcatggagctccattgccacgcaattaaggttgggagtgtgaacaatgtgctctcggggaactccttggttgacatgtatgcaaaatgtggagaaatcattgcagctaagagagtatttgatgaaatacccgagaaggat

SEQ ID NO: 196777 - DNA, 704 bp, Zea Mays
gttgtttcgtggtggctgttcctgcagaagactctcgagtttaggattgtcaggatccctttcaggcgacatccagtccctgtccgaattgcagaccttgtatgaaacattccgacttttacagtctgatttgatttgatttgatttgagtctccatacaagcacatgaattggaatttttagcatttgtttcaagcatgtgaggtgattgcttcctgtttttgttttttggcagggatttctcctacaacaaggacttgggcggtcctcttcctgcgtccatcggaagcctgagtaacctcgaaaacctgtgcgcaaccaaactttttaaggagttccaatcgtccactgatttcaatattttcactgcctggattgttccttgacttatttgctctccgactcctccgcaggattcttgtcggttgcagcttttctggagaaataccgaaagaactcggacagctcaccaagcttagatttttgtaaggagaccaaaccaacctgaaacctttgtgtctatgcctttgatctattagcaaccataaacaaacaaggatataatcattttttgggattgtatcttctgttgaacaaaaagcttttacctatctatatctatccaactgtcacttgggaaatcaactttagtttgtcctctttggtcagaacagaaaggaagtaaaattgaggtcttacgttct

SEQ ID NO: 196778 - DNA, 415 bp, Zea Mays
caacggctgacatgacgtagcagcaccagtaccctacgggtctacggctccgccgcagcggccgtgctggccggccggccggcccaccgtagcgaaaggcgcgctggaatcgaaggcgtttcgactgattttttcccccctccatgtcttttccatcgcaccagctggtgaattgaatgaggtttccgtttgggcccgggtgtcgtcttgtcagatgtacgtatcctactagtagtactgtagtaggcaaggaaaaggagacgcagatcagtagagagagtagaggtccagctgcgcttcttttcgttttttttgtattcttctggtatttctaagcagcctagaaacggtagtagaattccaatttccaagccgtttttgtaatggagctttggagttgaggtttccatggcgg

SEQ ID NO: 196779 - DNA, 443 bp, Zea Mays
tggaacttgaagctagacgccacgctcaccacactcggcttcgagaagtgtccatccgagcatgcattatacacccaacgcacgaaggatggatgtgctcgtggtcggggtgtatgttgatgacctgatcatcatcggcttcgagcagcagcaaatcaacaaattcaagagcgagatggcagcaaagttcaagatgagcgatctgggccttctcctgtactatcttgggatagagatgaggcaaggcaaacatgccattgaactcagccaaggcgcatacgcacgcaagttgctggagagggctaggatgggaaattgaataatcccaccaaggtgccaatacaagagaagattaagttaagcaaggccagcaatgctgagaaggtaaatgcaacacgatatggaagcctagttggaggcctcaggtacttgactcacacacg

SEQ ID NO: 196780 - DNA, 403 bp, Zea Mays
tgcccctagaagtgttatgcaattttgttaaggcttgttacttctttcttcctaaccatcccatgcctaacacatcacctttggcaattagccaactactaacaccaccataaaacaacatgatggttaggccatctcccagcatttatcttcttcattttcacatagtaggaacaaacaaacacattggaatcaagacatggggccaagttccagaccaaactatcagacatatttccctgccatctttttgctcccattacctacaccctattttcccagcctaggccaacacaacttgatgtgcctgctagagtgctggagccacaagcatcgtatcccataatgtggagtggagcattgatgttatgacttctaaagcattttgagaaggtacaatttc

SEQ ID NO: 196781 - DNA, 644 bp, Zea Mays
caactttaatctgcaaaacggcggcgcacaagaatgggctgacgagagcaggaggttatcattaagcaaagccggcaatagtaatggttccactcatctagggtctggtattttccatcatgaacccttggaagatttcaagagctccaaccaatctctattgcacagtgtaagacaaagaatggcaccaaattctcttgcgaataggcacgtcaacacggaattggcaaagcatcatgcgattaagcatgctgcagttgctgtgtcagcactgaccagtgttgttaatgatgaccttaaatcagtgaagaggcctaaggaatctgaagtggaggttcattggtctaatggccccaagtttcattctcatattccgaaaatctctgaagttgaaacaagcctgcgatttgatgaaaatgctacagatggctatgctaaagatgtgaatgaatgctcacctgaggagacagtacaaccctctcgaactagagcgccctcatcccaggagtctctagatgcacggaaggcactcagtaccatatatgacaaagttctggtggttgacaatgtcatgtcagctaggagtgttgttcaactgcttactacgaagtacagaaattatattcatgcatgtgacacagagg

SEQ ID NO: 196782 - DNA, 380 bp, Zea Mays
ctagttttccgaattaaagagttggaatttggaacccaacttggtctatttaaactggacaactttttaactttccgtgaggcagtcattgagtttttgaagatggatgatgtcgacacactgcttcaaaatgatctaaatagaggaacagctgacatttcagcacatcatagtactaccgcagtcttaaccggtcccattggtggattctcagggaaactcaatttaagcatcccatggaataagggttgcttgagctttgagaaaattgatgcagatgtatcagttgattcattagaattacgtttacaattcagcagcatccggtggatcatgaatgtatgggattctctccaaagaaagccagtagacgaacagag

SEQ ID NO: 196783 - DNA, 321 bp, Zea Mays
aaacggcgcagcagcagttgatgtgcaacccgagtgtactgccgctcgaggaggccagtaagtgccaacaacatgaatagccaaagcagggaaatagggctggcgggggcacatgggtaacttggtcctggagcattggagaaggagcataccacaaggaaaccaacacggtcagtcaaaaccaaatctagataatcatcatgctacttctatgttttatgtctgtttttgtctgctatcaagtgttcatgcaagtgttatcaagtgttcatccatgttaagaggggttgaatacgactcaaatattattttcgcgttttc

SEQ ID NO: 196784 - DNA, 496 bp, Zea Mays
ccagacttccctttgtgggcctcttgaagccaactgtccaacacgggaaggccccttgattgcacaaatctgccgaggcaatcaggactctctgtagccgcaataacatcagcaagtataacccgaccactaaggtctatcttctgctcagttcgatcaagttgcataagatgtacaagcttttcaactgcttctgcatttggaagcccacctttttctgttatctttgatatttcagacttaatatcatccaagttaaagtttccaggctcactctcgtcaaccttaagtagatgatcccgatcccgcttagctggatcaactccctgttcacttctatctctcttctttcctttagacaaaccaccattttgcgtaccaactgaagcagtcttcagttgttgggaagctgatggaccatttaaacgctttggagagcgtccacctgattgcaatgcggcacgcatttctagccttgttctgtgtagaagtcgat

SEQ ID NO: 196785 - DNA, 2587 bp, Zea Mays
gcttgtatgaagcagttcaaagatgcagtctgtggtgtgatgaatgaggtttgttttattgtagtttgtgctttatgcatacaatgtgtgcaattgctgctattctgttgtgagaagttgacacatcatggaattacttaaaacttttcaagtgtgaggtcttaattgttttattccccttcgttttatgcaacatctcaagtccctagatgatactattgtactttactgcagtgctacctgagagcataatcaattttacaaaaaaaaatgacatatgtgaacacgtgcaatggttggtgctgtgatttctttgtctatattctttgttaactgttactggtactggctgatactattgtttgtgacatgtaacagccaggccctattgcaactaaactacttgctctaaagtttgtggaaacatggattttgtgttgcacacctcaagccaacagtgaccaagtacagccaactgagggtaccattttccagtttaaagttaacaagtgaatgggcaatatttttttgaaagagaatgactttcacattgacaagtacaccttacatacaggaaaaaactggagatttgatacttcacgatcatctcaatttcatcctagccttgatcctgctattttggaagctgatgcacatcgagctctcctcctcctcctggatattctgcgaacagcttatgcccatcgagggtccttcctagttggcaccatcaactcgtaagaatttctaccaactttatcgtatatgttgagcagaagtgatttgttacactcactatcctgccatttcatcctctctttgaactagctttctctgtgtatgaagatgaacctgaatttatttaatgaatggcatcagttcctagctatctacatgtttatcttgacttataaatatgctaacattatggagcaattgaattactttaggtgatcaactggtatcctaccctttttgttacacaacctaggttctttgtgatccactgacattattttgacctttgtgggcttgtgtgtttggctccttgcttgcttgctgcgagcccaggcccagctatgcatgcaggtgtagctatctttgaagcttgagacagtgtatcattttgtgctgtttatcttgcaaagccgcatagctgtctgagatgtatttatttgtgttctgaaatataatatatggcacttgtcagtcttgcagcagttgtaaagatccgaccgatttactatgaccgcgtgttgccagttttgcttgattttgaccctggcttggagactgcaaagggggcacattcagcaagcctgcggtatgctgtaagagcagcttttttggggtttctacggagtccccaccaggcaatgattgaggttagctcatctacaggttacacatgtagattatggttcagttgtcattaataaattatctgatttaatttacatacttcatgcctcgatacagctcaaagattcttaaactgttgctataattgaattttgcttgcgaggaagtataacttggctagcatgttaatgtgttcttacaccaggttatgatcaattaacggatggtagtacaaatatgattgttgatagtaaatatgccttgatgcatgaagctcatatgtaaattgaggactcgattcagccctagtatatatgtattataatttagaaatctatgtggattttgtcaaaactttaaagatgattttttaagcagatctttacaaccaaggatgttgctccttgtcatggggtggcagccaagggcatgaggcccatagggataggctcagggttaggattagtggataaagattagataagattgagttacttacttgggattagattagataagattgagttagttacttggggggcaagtcttcctatctatataaggatgagttgtacctccttaagggggaatcaatcaatgaagaagaattagtcccatatctctctaatagtctagtcccccccccccccccaagccgactccgcctggctatcattcccttatgaactaggaaccataacactcctcaatcttaatatggattcgtgcggtaaaaaagtgatactaacgaagtcggagttatgataagaaagatggaatcatgcactcactataggatttgaatgtatgacattaggtttttgtagactactagactcattctaccaaactcaaaccaagatttttgtggcaacggtatctggtctgagctgtcaagtttcctttcagggagccactcctgtgaagacaatccctactcccctctcttttcttctcgatctggttgcttgtttgtgtttgttgttgtaacttaataaaggactaatttttggagacatcttgttttcttttgagaaattgtacatcaattctgcattgcttttcctaaatgtgtgtaggatttacatattcatatttgttttttgatgtatattgcttgtcaagctaaccagacttccttctcttgacagtctaaagacatattggtaaggcggctgcgtgttctcagccctggtgaggcaatggaacaaaatattaggcaggc

SEQ ID NO: 196786 - DNA, 1568 bp, Zea Mays
gacagatgtttgcatccatctttctctgagtgttgcttctcttatgcttaaactgcaaaaccaaactcttgcagcattgcagtttggtaatattagcccactaatttcttgcacaaactttaagcgaatttggagctcaccaaaaggtatgtgcatgtgacatactacactttttttgttccttattctggttcttgtagtagggcatcatatgctagtctattatactgattcaatactgcaggtgacctacctggttacaacctaacgttctggcggccacaagctccctccaattatgtcatattgggtgattgtgtgtcctcaaggtgatttgcccccttcatatctatcattttgatgaagttatagttggagaatggaaaccctaaccctaatcagggttgggagtgcaattatataatccaagtagttgggccaagcccattacacagaggggtaaacatgtaattacacagggactgacaaaaacctaacgggattctaacagtttttactttcatcaagtgtctgttgagttttggtctagtaattgttctgtctaagccatcgtcatctttggagatgcatgctaaatactatagcaggcatgtgactgaaaacctgaaactttgcgctggtataaataccacgagtattaagcaaaaagttttaaacattgtcttgctgatggcatgccttttttcctttttgtctacattgatcactatggatgcactttgcaaatagccaatgagcacaattttttcatatgggtctctaattgtgatattacaaaataacagttatgtgtaaagctcataagaagtctacgtggtgttgttaactgcctcaaaactacagatttaatgtgtcattgtatcacaaaactatatatttatgtaactgtgacaatgtaccagggaagtacacatttgatgcgtctatggcaaaagtacagattttgtttggtcaaccatatggttgtagttttcagagtttctgcagctttgtgatgcaacacatttaatatgcattttactatagaaattctttttttgaaacaatgtatagaaattattatatctgttattttgtgatcgatctaatgtagtattttggaacctcctcctctgttatgcatgaaaagatgcaaacttcaatggacttgtccacgaaagaagtgatataacttttattctttttacctttattagcaccagattgtttgaatatttggacctttttatattgcttcagcaggagctgatgtcttgcaccttctcaggtctgtgccaccttctcaggttgtggttgctataagtaatacttatggtcgtgtacgaaaacctcttggatttaggctaattcatgtattacctggttctctggatctcattgattcctgtcaatcaactgaagaaaacgaatgttctatctggattcctgtaccaccacctggatatttagctctaggatgtgtggtaaatattggaaggttaccaccttcaaaccatgtagtgtattgccttcgttctgatcttgcgacttctgcgacattttcagat

SEQ ID NO: 196787 - DNA, 593 bp, Zea Mays
ctgctcccattgcttagcttgttccccagacagagtaacagtgagactctcttcagtggtagctatgttggccttggagccaccacggcctctaccacgacctccgcgaccccttccatagctcccacgaccacgagtaccccctcgtcctccacgagatcctcccctgccaccatttcctctagggttgggacaatcgtaactcaggtgtcccctttccccacaattatagcattctctatcctcaattgcaacgtatgctggcttcacatgattaccactactcatcactcgaagtctgctctcttcatctattatggcagacacagcctcatctatggtaggaagactctcctggtgacaaaaggccgctctcctgctctcaaactcagaatccagattctttagaaagtgggtcaccctcctatcctctacccacttatgaaccatttgtgcatcctgtgggcaaaccatttggagaggagcataatgatccaactctccccataagtgttggagctcactagcatattgttccactgatctccccatctgctttactgcatctgccttgctctgtatttccatcatca

SEQ ID NO: 196788 - DNA, 1004 bp, Zea Mays
cgaccaaggtgctgttcatggacgagatatcaactgggctggacagctccacgacgttccagatcgtcaaatgtctccagcagattgtgcacctgggcgaggccaccatcctcatgtccctcctccagccagcccccgagaccttcgacctgttcgatgacatcatcctgctgtcggaaggccagatcgtttaccagggacctcgtgaatacgtcctcgagttcttcgactcctgcgggttctgctgccccgagcgcaagggcactgcggacttccttcaggaggtaccattcggcacttgtctagtaaagtagtaaccatatattctctgaaagcaaagtttatgaattgcaacaagacgaccgattctttgggtgcctttccaggtaacatcaaggaaggaccaggagcagtactgggcggacaagcagatgccttacagatacgtttcggtgccagaatttgcgcagcggtttaaacggttccatgtcgggctccagcttgagaaccacctctcgctgccgtttgacaagagcaggtgccatcaggctgccctcgtattctcgaagcactcggtgtcgacaaccgaactcctcaaggcatcctttgacaaggagtggctcctcatcaagcgcaattcatttgtgtacatcttcaagaccatacaggtaaaacacattgtttttgggagtctctcccatgaaactttccaagactcccagtgctaattgactgaccttattgttgtctgtcctgtgaactctgaagcttatcattgtagccctcatcgcgtcaacggtgtttctgagaactcacatgcatacgacgaatctagatgatggctttgtttacattggagcactgctctttactctgattgtgaatatgttcaatggttttgctgagctttccttgaccataacaaggttgccggttttctacaagcaccgggacctgctcttctatcctgcttgggtcttcacagtaccgaacgtcattctcag

SEQ ID NO: 196789 - DNA, 351 bp, Zea Mays
gcttaatgggttgaatgtcttacgaattgcttcacatgatgtgttgaaactggctgtgcaatttatttacccaataggtatgcttattccttaacagtttaatgcatggccttatgtgtttactgcagtggtttgcattaataactacatttcggtgtgtgctaatttgcctttctaacccctgtcgacctatcggaatgtgctaatttgcctttctaacccctgttgacctatcggattgtgccttcgccttttgcaattctttgaagtccctgcttattgcgtgccagatgtgtgttgctgttgccattttttcgactgctttgtcgtttctgcgtcagtctgtgtgtt

SEQ ID NO: 196790 - DNA, 427 bp, Zea Mays
gggttcccgagcgacggacacggaattggactcatcccaaacctttcccccaacttaatttcactaatgatcaacagggttgtgctggccacggtgaccgtgaaggttgcggatggatggggatgttcctggcgatgggtgggcttctagtgtaattggacggtttggtgagcatcaagggcacatgaggacgctagaacaagaaacagagggacacgagctaaccggaattgagctggccgcagcgagctgttcttcacggcggcgggaactaatttggggcgaattcaaaattcgcggattctagcgaatggatgcggctgattcgtggtggctggatagtttactgccctacggagattgtggcgcactcaatttatagatcccatcgacggtggtgtccaatttcgcaaggtcgtgctggcgg

SEQ ID NO: 196791 - DNA, 535 bp, Zea Mays
tatggaaggttacagagcaacagaagtaatgcccgaggactcgcaattaatgactcaatgcaaggctatagctgacatgaagtttacatatgttgtctcatgccaacaatatggaattcagaagcgttctaatgagccttgcgcacatgatattttgagactaatgacggagtgagtttctttgagaacttctgaataagtcctgttataggagtaacctgaacttttttttatgattgtcattcatccaataaatgtaggtgttagtaatgtaacaggatgatgcaaattgttcaggtcacattactacttactactgtaggttatatgttatgtgatggtattgtaataacataactggcatttttttggcagatatccatcacttcgggtcgcctatattgatgaagttgaagcgcctagccaagatagaaacaagaagattgaaaaggtttactactcagtgttggtgaaggcttctgttacaaaacctgatgagcctggtcagagccttgatcaggtattaaaaaccgac

SEQ ID NO: 196792 - DNA, 449 bp, Zea Mays
acaaaaaaacgctttgttggtggttttccagatgtatgtacctgagttggtcaacttccatgtatgttggtcctgcacaccaggatgcagaactatttcttccgcccagtcccataccaataggtattcttcatggcctgtaccctgaaccattaaagcacctttgatgtctatcacccaacgcctattttgtagtccctgacatcttcagtaataccgtgcatatggacgcgcataacactgttttgcaccgtagatgtactgtttgtagagtggagtttgaaatgaggggtgtgatagggaggctgctggagatagagcatcagttctttgactgatcgctcgcttaggaactagggcagttaagtgggaagccaattcagcaatgtacgaccatgtaatctatgatcagagcagaacagtatctgtcccattactaaccaaggtta

SEQ ID NO: 196793 - DNA, 517 bp, Zea Mays
ttatgcctgacaacgtgacgctatctgcgaccatgaaggccatatctttgtcagcttcgccgagtctaatcagctgccagatgctgcattcctgggtcttcaagctgggcttcgaagcggacatggttgtgtgctcctccttgatcagcgcatacgctcgagccggtcaggtgcacagctcccgctcggtgttcgaaagcctgcggagcccaaacgtcgtctgcttcacttcgatgatatctgcgtgcgcgcgacacggagatggcgcaaaaggagtggagctgctcagggagatggtttgtagggggctcaaacctgatgacgtcaccttcctgtgcgcgatcactggatgtgatcaggcaggactgattgaggaaggcaggctggtgtttgagtttatgagagcgacccgcgagctgggccctgacgagaggcacttggcctgcatggttaaccttctcggccgagacgggtttgtggaggaggcgatgaaggtgatgatggagcagcactcgcc

SEQ ID NO: 196794 - DNA, 836 bp, Zea Mays
gattgctaattttgatctagccaagattttaggactggacgtctgtgctgatactattgttggagatgaaatgatcaaagggatctccggagggcaaaagaagcgcctgacaacaggtgactgcatattactgccatttaagtatgctagcgctgtcagctgaaattagttattgcaaaatagcacgctcttttcagtgttcaagttgtgctaatattgtggtacttgcaggtgaattgctagttggttctgcccgcgtgctgttcatggatgagatatcgacaggccttgacagtgcaactacatatcagattatcaaatacctaaggaattcaacacatgctcttgacggaactacaatcatatccttgcttcagccagctccggaaacatatgagctatttgatgatgtcattcttatagccgaaggtcaaatcgtataccaaggtccacgtgaatatgcagttgacttttttggtgctatgggattcaggtgtccagaaagaaaaaacgtggctgattttttgcaagaagtacacacctcttcacttttgaattctataccgactggaatttctcgtggattcacgtttctttcatcgcaggttttgtccaagaaagatcaacagcagtattggtgccactatgattatccataccaatttgtttctgtatcaaaatttgctgaagccttcaaaacatttattattggtaagagattgcatcaggaattaactgttccatacaaccgacatcacaatcatcctgcagctctttgtacatcaagttacggtgtcaagaggcttgagcttctcaagtccaactaccagtggcag

SEQ ID NO: 196795 - DNA, 546 bp, Zea Mays
ctttggaggagcgcgcggagttcctggcagatatccgtcaccggctggagcaggcccaggctgtccagaaacatcattatgatcgtctacatcgtgacatcgacgtgcaggtcggcgagtgggtgctgcttcgtctacgccagcgcccgacgacctccatgcccgactcgtcggctggcaagctgaagccgcggttctacggcccttaccgcgtcgtcgagcgcatcaacgccgtggctgtccgcctggccctgcctcctcaagctcgcctccacgacgtcttccacgtggggcttctcaagaagttccacggcgcgcctccgcaagagcctccagctctacctttggttcgccacgacgcagttattccagagccagagcaagcagtcaagatgcggctgctcaggggagttcggcaggtcctcattcgctggcggggagcctctccggcatcggctacatgggaggatgtggacacgttccgcgcttcatacccactctttcagctcgaggacgagctgcctctcgaggaggggagagatgtga

SEQ ID NO: 196796 - DNA, 436 bp, Zea Mays
gcttgttgcccgtgacgtaagccagcgggcggagcctgacgtaaggcctctgggccgcgcggtctctgcatttattacggagaggacgcaccacctgtccaccctgctgactggcgatgtgtcgtctcagcatttattgtgacctatccactcagctggcaggcggcgtccaggccatcctgtaggcggcgtgcctgtccagtccattgccaaacagtacgctcgtgctgcaaggtgcattgtgaccatcatcacttatgcgttgccagggaagcttcccctgcacgccaataccacgcagatcgcggatgtcagggtgcaagaagattgcttcagcaactccaagtattacatccattatattcctgagcccacatgtcggggctcagcacccttgtacgcgccccccttgagctataaaaggggaggcatgcaa

SEQ ID NO: 196797 - DNA, 415 bp, Zea Mays
tgtttgaacaaagattctgttcagctagaagacagtgctctcctttatatcctgtctgtagctcaatacagtgctccaaatccatttcggcgtactaggtgtggataaggatccttgcctcgacgagtggagcaaagccatggatgtgcctacgcctcccaaccgtgccggctgcaacagtaacatcggcagccccatgcaatcttttgatgatccctttggtgttgctgccatgacgagctttgatggatactcggagctctgcagcccatcagttgctgatcacatattctccctgctgaatgatccctccgctgcgcaacagatggttgccatgtggtcatccttgggctcatctccgcgtgcttcagctgtgagagaagacatgtcgtttgacacctttcctgggcctgtg

SEQ ID NO: 196798 - DNA, 414 bp, Zea Mays
accgtggcatgcaggaggcagccgtcggggatcagcgccaccaaaatcacggtatgaattctatagttgcttcgccttaattcatgcatagcgtagtgtaggtaggttgggagttttgcacgctttgctgctcgtcagcctgcaccgccatggctctgccgcgaagccacgagagcgtcggcgcctgctggtcgacatacggaggaagaagatgaaggcaggtccgttcgatccatcacgggcagataggattagatcaggggtgttatgttcatggagcagattgggaccatcgatgtgtagatgagcgagcgggactagatgatccataccctttaacgttttaaaacatgtgtcatagatctttaatctggcggccgcagctgtatgtccttttggcttctaatctcgacc

SEQ ID NO: 196799 - DNA, 1913 bp, Zea Mays
tgtgaatgatactgagtgggtcatttctttgggtgatgcatttgcacggcagtatgatctgtattctatatctgacggacacgctgctttgctgcacaggtaaatattaataaccattaaatttgtgctgttcttgggcactttatccatactgcatgataccctgatacacctggaaggtcaatgaacctgtacctgatatggcgggatacgatgagatgtaatgacatgtccttgtttttttgtgagaaatgttgtatcctcgtatcagttacttttattgcatatcagtgaaacataggttactagatcaaagctaatgcttttggttccattgcatccaaaatattttctgaacatgtgctgcatgctattcattttgttgtgacaacagtcttcctttccttcttgtgttacctttggagtggcagctatgttattactctaaataatcctaagaagtttgtgccgttatatttttggagctcagtagcttctagcttgattgtttagaggtcttatgtattctgtcagagtttttttggacaaaggttcaacagtgcttatatcaaaagcaacaaactgttttcgagatgctggggttacttgcttacataagtgcaccaacaccgcaagaggaagctaggataccaacaccaaaaaaactaggaaaggctagccttctgtgagatatttggcagtatttctatatcagagtgagcaaggatactataagttggcatcatcatttcacattagcttctatacatttatttgttaatcattgtgctagatctgtcaaaatctgccataacaagtggatcatgcttgtttatttcaaaagcatgttcattcagtgacatgtctgatcgccggttatagattataccctttgctgtagttatttttgttaaatgttgcggccaagacaataaactattggtttatgctacccttccttggtgatattgagtgacttgttatggaagctacaagaaaatgactccatatatcggctttgttttacctttttaaatgttgtggagccaagacaataaactattggtttatggaagttacatgaaaatgactccatatactggctttgttttacctttttatttgcagatgcttgggaatgcttcttcagaaggttgatgataggatttatgtcagcgagaagattgattggatgtgtagacactcaagtatgtctattcctattaatcgccttggacttgctcaaggcatcgggctggtaaggtgccatcagtgaatccttctattttgagcttattttgaatccttttagcactaaagttcccattgcaggttgcggcttctcatttagatacagtgttggagaaactgaagaacatactagatagtgcagagcaaagtgctttccagaggtacttatataatcttttggcagaagacatctatttgtcatcttaccgccagtcctgtcttgcagcattgcagcaatataacctaaaccaaaacttggttgtgttgcttcacatgtacactcctttgaccaattttgtgccaaaatggaatcctgtacttcattcttaacttcaatgtaccaattagtttcccttcttttcagttattggtttggcatattttgtgaaacttcattccatatcccatcttgtatttggaaaaacagaaatggagactggatcattcaaaagtgaatatcaagcaaccactacttagctggcgtatttcatttatgtaggccgtctatcctgttatttcagtattaataagtttatggcatccaattctgcaggttcctctcatttttctcattcggcccaaaagtggaagatgttgatgacacatatgcagcattggcgttgatgtatggttatgccgcaagatatgctccatcaactgtt

SEQ ID NO: 196800 - DNA, 592 bp, Zea Mays
tgacgatcgagttgacatgcatgacaaaggctctcataagggcccctactacaagatatatctgagctactagagagcttgggcatgacgtcagatccagggtgaccaagacgactatgccaaatggtggtggtggtggtagtagctagagcatggggggatgtgctggtggggaaagcggatggtcggagcgtggctagggcatagggtggggcaacacaagaggagggaggtggggcgggaaagcgaagagagtatagggtgccaaagctgtcacatcgagcgagcacgtcacaagtgacaaggtgttgtatggtgtgccccagggattgaactccattgaacaatggttgtcagtagtaaagcggcgaattgagacaaggtgctgaatcatatgaggggcaacaaggacatcgttaaggtaaatggtccccggaagaacaaaattacctactgaggtgaccgtgagggtggaaccgttccccataatgatagaggaaggatgggagggatggggaggatgtgagtgagacaacaagcgagtatgagtggtgtggaaataggcgctaaagtcgaccacccaatcggcagg

SEQ ID NO: 196801 - DNA, 542 bp, Zea Mays
atcgtttagcaccacaccttcaaaatctggtggctacaaatcaaagtgcctttgtcaagggtcgctccattcatgacaactacatgttggttcagcactctatcaaggcccttcacaggaagaagatcgttagtctatttctaaagctagatattacaaaagcttttgactcagtgtcatgggcctttctcctagaagtgttatctcatcttggcttcggacccaggtggtgcggccttgtgttcaatatgttatccacttcttccacacaagtgttattgaacggaactccggaggattatattcgacaccggagggggctgcgccaaggcgaccccttatctcctatgcttttcataatcgtgatggatgtgcttagtagcttattcaagcatgctgaggagagaggattgctgcatgacctggccatcaaaaacgtgaaatctaggctctccatttacgcagatgatgtggttctttttgtcaagcttgcagttgaagatcttatttgtgtcaaaatgatcctggattgctttggagag

SEQ ID NO: 196802 - DNA, 271 bp, Zea Mays
cgaatttagacgcgtacacagacacgagacaatcggtaggttttgttttggcgctgtgctgtgctgtgctgtcgcgctgtggggggattgggtgggtgggagatgagaaatgcggattgatttggttgctttggtcgattaagccgtttcggcagcgcgagttcgcggcatactggtttcgtacccaagggcttgatcgtcgatggtgccgttgaattcgtgctctcatgcccgtggaagcagccgaagtgatggatatatgatacgcggc

SEQ ID NO: 196803 - DNA, 722 bp, Zea Mays
gtgaatcagccaaaaacatttgaagcggatgcatcaaatgctccacttcatcaacttcctcattctcacagtttcctggtaccttctgacaatcaagatattgagtgtgaatgtccaggtccaactccaagatctgacagtgaggaagctcttatgaacaactcagcgacaactgcatcagcctctgatacaagcaaaatggaggagtttgtgaatcagcaaaaaacccttgaagcagattcatcaaatgctccacttaatcaatctcctcattctcacattttctcagtaccttctgacaagcaagatattgagcgtgaatgtccaggcccaactcaaagatctgacactaaggaacctcttatgaacaactccgtgttaacatcaggaccatctgaaattcagacgacagcctctgcagcctctgatacatgcaaaatggaggagtcagtggatcagccaaaagcgcttgaagcagatgcatcaaatgctccacttaatcatcatcctcattctcacattttccgtgtatcttctgataatcaagacaatcagtgtgaacatcctagcccaaatccaaaatctgacagtaaggaacctcttgtggacaactcagtattaacatcagtggtgcctggaatgctagcgacaacttctgcctctgataaatgcaaaatggaggagtttgcgaatcagcaaaaagcacttgaagtggatgcatc

SEQ ID NO: 196804 - DNA, 387 bp, Zea Mays
atttgatttcctggtcctccaaacggcaaaccaccgtgtcacggtccagtgcggaggccgagtacagggctgttgctcatgtggtcgcagaatgctgttggcttcgacaactccttcaggaacttcatcttcccttgaaggtcgccacagtcgtttactgtgacaacatcagcgccgtctacatgacagccaacccggtccatcaccgtcgtaccaagcacatcgagattgacatccacttcgtccgtgagaaggtggctctcggtgaggtccgagttctccatgtgtcgtccaagtatcaattcgctgatatcatgactaaaggcctgccaattcagctatttgaggatttccgatccagtctttgcatccggaatcctgacgctt

SEQ ID NO: 196805 - DNA, 396 bp, Zea Mays
ctggccaccgactgcgccgcgcggagccggatgcggctgctgcttcactcggacgagatcgaggaggaggtgcgggagcttcaccaggacctggcaaccctgctcgacctcctccccgtcgtcgagctgggccttgccgaggacgtcatggacctgctggacctcgcgtcgcgccagtgcaggcggttcgcgccgtctgcccaggcggagcaggccctcaaggccagagtgctctcgctgatacaggaaattgagcgcgagatcgtgccggatcgggagaggctgcaggagatcctggaggaggcgggcatcaacgacccgcccagctgcagcaaagagatcgagagcctcgagcgggagatcggtgaccgcgcctcggagaggtggacggacgcc

SEQ ID NO: 196806 - DNA, 446 bp, Zea Mays
ctgaacctggcccatctgacttcactgtccgcgcagcccattccctactttctcccactgctcggcccatccaacaactctcgcgtgcagctcagtggacctggcgcggcgctgacggaagggtcccactggccggccactccacacggatgatcagccatggtctactcgtgcgccgtgacactgactgaccgggcccacatactgggtcatcgtcttccccgaacaaacctgggcggacttcacgcgtcaactccgaacctctcgcgtgcaccctggattccgcctggaatctccttgtggttatccccttcaaccggtcctaaatccacggtcgcaaatccagccccattgacttcgtcgcctagctcgcgcgcgccctgaacgacctccgcggatgacgcgccgtcgtaacctctggccgatttctacccagtggtataaac

SEQ ID NO: 196807 - DNA, 293 bp, Zea Mays
gacgttcttgctgttgtgctcggaggacttggaatttcctcttgttgtgccctttttcttcctcttttgctcttgccacttgaatagctttgttggagaggtgagagaagctgtggaagtcttggctggcaaggatggtctgaagctcgggtcttaatcctctcaggaaacgggccatctttctggactcggtgctgacatcctcaggcgcgtagcgggccagctctgtgaacttgtgcacatactcactgactgttctcccgccttgagttagctcccggaactcatcctcc

SEQ ID NO: 196808 - DNA, 1324 bp, Zea Mays
aagccacgaggaggtacttcgacgagaggaggtaccctatcatggtatgactgatctcatcaatgatttttccttgccatttcgcctttagctgatcttacttgttgcttgttggattgctactattgagcccgaaataagtcttcttctctggcaagtgtctgtgaacggttggtaggattggggctatatattgttggattttttgagttttacataaatttgacttctaaaattctgcaacttataagctgtctcgtagttatgcaattgaattcaatataactactgcaatgagcacttttattacaaaaaggctgcacggcttttgttatgctaataatatgccactatgcatgaatttcatcagctgtaagcagcatgcttctccagtattttcttaatcaaatttggttagtccttgatctttaaaaccatcgaggttattacaaatttcagtattgcagtaagccagtaaattaggatctgtgtcaattttatgtatgagaaaacacttctaatgtgactgctttatagtacaactcaagtacaacaaagcatctgaaccatccattacatttacgacatttccatctaatgatccaaccagttgatactattttctcaaacaaaccattggatcctgacttctactcaaaatttgtaatgaaatggctatgcttagattacttttaaaatgcttaatacttagatctccttaatatactgtttttcaattccttccattctttggattttaaaagtcgactgttaaaacggagattactagttcgattgagtgttccactccttagttacatgtgcatagtttggcataatgtgtttcgtcatctggtaccaaccaacaaccatgtgccctattgttagattcattttctgtggagtattataataagtgtagaggtttatctgtaaataattaattattctcatccgtcgtaccgtcgtcatcgcctcatcggtgataatatatgtttgcaccttggcatgagcttcaattggactctgaaagaaggttctaaaccataataacgcatcattttccttttttgtgattgttgtcaattttgcatctagattgggtcgtcatcagggaactcttattttcttctttcgaggccaatgccatctgattcctctccaaaggaagcagcacctagcattgggccacaggcacctgtacaagacaactcaagttcaacaggacaaccaactgaaccaagagatttcttcagggatgctcttagtacctcaggaataggctatgacacggaagatgataaattggcagatatttctcctc

SEQ ID NO: 196809 - DNA, 304 bp, Zea Mays
gcaggaggcgtgcccgtccactccggtggcggacagtacgcccatgctgcggcatacgttgtgctcatcatcactcgtacgttgccagggaagcttccgctgcacgccaatgctacgcagatcgcagatatcagggcacaaggagattgcactggcgaccagcattagttgctccaagtattacatctgttatgtccctgggcccgcatgtcggggctcagcacccttgtacgtgcccccctttagctataaaagtggaggcacgcaacgttacaagactcagacacacttagacccagctcag

SEQ ID NO: 196810 - DNA, 374 bp, Zea Mays
agccggggtcaccggtagaagcgaatttggagacagagggagaagaggccatgataagcaaaggatgggttaatacccgccaacatggtaattagaccaatggggaaaaggaaaaggagatacacttacttggggccttggaccttccaacgaccttggaagcgagacgtccacttctcctgctgctgttgttgttgttgatgttgctgcccctgtggcggttgcgtcacggatgacgatggcggcggtggcggtgggacagatggtggtggaggactgacgcgcctctgcgaggcctgggctggggagccggcttccccaaccccgtcagctatcctctggcgcttctgagggaggcctgaattaagaggcgg

SEQ ID NO: 196811 - DNA, 354 bp, Zea Mays
gcacgatggggtgatacatgtttatggtaatgtaacacaatggtcatgtaatcgtaacggatagttcacgtaaatctcatggaaacggtccatttcttccgtcaataacacttcatggttagatatgccccagctggaagttgggaacaacaatctattgaacaatatcaaaaagaagcatctgatagagaggtcatcatcatttccttttctcaatcggtcctgaagagatgcaacaacaaactcatccttggacaatccaagttcagccctcaagttattgcccgccactgcttcatcgattcctagtggcttaccaccgccagcattcggaaggcctagtataaggtggac

SEQ ID NO: 196812 - DNA, 351 bp, Zea Mays
cctgcgcccatctccctgctgtgcagctctagctccggcgtccctagtcccagccatggaactcccctagaagctgctcggccgaccactcctactccagccatggtcgcgcctcccgtgctccggctcgccggtgagccagttttccccatctccccaagctcgtcgccatggctgaagctccctggcgtccgacctggaagctggagctcctcctagagtttgtcgatgccttccctatctccagccctcactagtgcgcggtcctctgctcctgcgcgcccctgcttttctccctcgcagtgcatctccatggccgcggtgtccctccctgctcgccgtgtccctgtt

SEQ ID NO: 196813 - DNA, 987 bp, Zea Mays
gtagcgggagaggaacattgacgcaatcgacatcgaggagggaatcgaggtcggggggtggggaggagttagcaagggggtaaacctcctcatgaaaggcaacatgacgagaaatgatgatgcagcgggtgaggaggtcaagacatcggtaccccttatgatgagagaagtaactcaggaaaagacaacgagtggagtcgggggagagcttatgaggagcagtggcagaggtgttgggatagcaggcacaaccaaagacccaaatgtgggtataggaggggttgtgccatagagagcgaaatgggggttggggtggggtgactcacctccttggtgggaaggcgattgaggagatgagtggcagtgtttagggtctgcccaatagctggcaggaaaggcgtctgaaagtggaggcagcgggtcatgttagtggtggtgcgaataatctgtttagcccgactgttctaagggtaaatgtaggggcacgagaggcgcatctgaactccgtgggagagtaaggagcgagaggcagagttgtcaaacttgcggccgttgtcgcactggagggcacacagtggacgacagatctgggtggagacccaggtgaagaaatgagtgagggtgtgaaaggtgtcggacttgagccgcagagaagtctagagaatgaaagaaatcatctaggatgaccagatagtacaggtaaccggagaggctgggaacaagggaggtctaaaggtcacagagaatgaggtcgaaggggtgagtagctcgggacatggaggaagagaagggtaagcgagtatgatgcccaagttgacatgcatggcaaagtgaggtggcgtcgctgcgagggtacagaatggctgaagtggacgatagacgagagaggatgtcgtgcccggggtgaccaatacgacgatggaaagtggaggcaggggcagtggaggcgagggcgtagggttggacaacatgggcggaggaatgtgg

SEQ ID NO: 196814 - DNA, 499 bp, Zea Mays
cggcctggaatcttctgccgtcccgccgtccctcccaccccggtggcggcggtgggtgtcccagtcgcctttgattccttccccagtcttcccctcagatctgcgatccttatccctcccggttccccgtcctctcctcggccccagtcgaggagacgccgctgcggctctcgactcctgttgcaataattttgtaggcgagaattgggagagtctggaggctgccagccggtctagtggctcggccaaggcgagcggtggtcccagcgccgttctttccgcctggtgccggagtttcagtcttcaaggctgtgctcggagtttctgtgttctaggggccgggaggtgtgtgctggtgtgaatttggctttcttttgatccaattggtgcttaatttcagcctgtcgaaagaggcttctagcttgcaggttcatcgccgttggcgccgaacttgcctgccgtacagtctttctagtgccaaagttgaattttgaggaac

SEQ ID NO: 196815 - DNA, 323 bp, Zea Mays
tcatcaacaaagcctaccatctttggttggatgtgccaatcgccttgcacagcagtgcgcggagctaggggtgggtgggggactatgtgaaggagaatagaattggtgtatttggatggatctattacattgcgcccttaggtggtttatattgagtacatgacttagaagcaacccacgtatacatatgacaatctatgagacacaatatctaaactactaaatatactgtaacacatatgacaatctatgagacacaatatttaaactaccaattatactcccccccggcacagttgtagcatgagcattgtatacggtta

SEQ ID NO: 196816 - DNA, 1214 bp, Zea Mays
gcggagcctcgcgtcggggtcgccattggcactgatctggttaacggggatcatccggcagctaaaggtgaggatcatattaagagaagagtgctgtgaatttgaatgatgacttggtctcatgtaatgcagaggtagtggaaggtgctggtgacgaggacacaggggacggagggaacagtggcctggcatcgactgctgatgtgtttgctgaggagatggcaccctttgaagatgactacgatgatgagatgttggaggagcagcttgttggagatgtgattcgtgcttacagtaatggcagaaacttcgattcagatggagtggattgggaggcagaggatgagatggagttcaatgacgatgctgacaatagtgattttatggatgatgctgacgatagtgattttatggatgatgcttatgaaggtggcaattccaaaccaattcaaaatcatgctaagttggaaatacaagactgggtgaaccagaaagttgttttgagtggagggaggtgtgaggcgaggggcgagggggatctggaggaagaattggatgtgggaaaggaagcagatgaggaggacgtggaaccaaagagtgaagcggctccaggttctgataaaagggtcttgcagttagaaatcctaggttccgatgaggaaatcaaggtgcttgaaaatatgagtagtgccccatccaggaaggcgtcagttcaatcgaagttaccaactattccatcttgtgttgcatggagaacccgatcatcatggggggtaaatcaagatagactatcgtacgatacatattttgaggaattatctgatgagccaaaagaggatgatgatgatacagaggtggaacttgatgaagttgaggatgacaacaatgacgatgacagtagtgatgcttatgataaagatgacgaagagaaggaggaagaggaagaagaggctgaaagaagaaaacttaataacaggatttgcacatccgatgaagacatgatcaatattactgttcctacatcaagatatgatatgtttaagaaaaaaaattcctcaagatatgatattgagtgggtggaggatgaagatgcaagtgttgatatgttacagccagtttcctttaagaaagatagcagctggaagcctgtggctgttggcaacgacacatttactgagcaacaaaagcgatcacgatttacttgggagcttgag

SEQ ID NO: 196817 - DNA, 625 bp, Zea Mays
agaacaggggtaaatgatgactcatgttacttacgccccttgggccaatatgtccaggctccatgcctgcaagcaccctgcacttcttgatcaagacacggatctgtccctccagtgacgaatgcagttttttgcctgaactgccctcagatttgtttgctgcccgggaaagcataattactgaaccagaactttttgaagctaagctctgttttggtagtccatcaggggtagaaccctgatttgatgaagatgcatcacctatatcatcgggacttgctgcagcacttgaaacatcaaccgcatcatcctcaaagacaaagagcaatacaggaatgcattggcctggcaagacagaaggagttgaactggttccagacataagtgagatagccgaggactgacgcccagcgtgacctcctcggcgtgttggaggggagacggaagaagccctgtgggttgctcttgttggggtgtcagaggcaacagttctggcaggcattgcagctgccaccaatggcttgacaaatggagcgagagcatgctttgaagattgcagcagtcggaacttctttaaggtttgtgtgttaaatctgaagccttgttgcagaaatataattacgtg

SEQ ID NO: 196818 - DNA, 552 bp, Zea Mays
cgaggacaagcggacgcggatccctgtggcgctgcagaaggagatccacgggctgcttcgctgttttgcagggtgcgatgtgaggcatgtgtaccgcgaggggaaccaggtggcgcacaccctttgccgtcaggcctaccactgccccgccgtgtgggtagggactgtaccgtccgtcgtgtttgacaaggccgaggaggaccggcgtggcgtattgcatgagcgctcggtggtccgatgattggctgggcatacaaagttctggatgagaaatttgcaatatcaccaccctggaaaggtggcttcgctgcattgccaccgttgagcacgctgaagtgccaatatcaatcactttcttgctgttcttatgccatcatgcctcattcacgagttcttttcaactgtgcaacccaaaaaaacggccgtgcccttggctgtgtttgcgggctttggcttgacatttggccaaaaaacagaaccagacagcctgcaattgctctctaggcaaccggcttcagttttggcatcatgcttgttctccatactgctgac

SEQ ID NO: 196819 - DNA, 335 bp, Zea Mays
atgattatgggcgaggtggtgtagaagccctcggtgatgcgcttgcattaaagagggcaaagatttcatataaagcagctattcctccaaattcaaatacagacgtgatcaacgatgtactatttaaagcaaatatgatggaatcaagggtcatgattgtgcatgtcaatcctgacacagggatgaggattttttctgtagctaagaacctgcaaatgatggccagtggctatgtctggatagtaactgattggctagctgctgtccttgattcctcagcaaatagaggtcttaaagatatgagtcatattcagggactaattgttctgcgtcag

SEQ ID NO: 196820 - DNA, 489 bp, Zea Mays
ggaaaggaaaggaaaggaatgcaaggaaggagagacacaatcggcggcaacagcgattgatttcgtccgccgcacctctcctctctctccgccgccgtcgccgccgccaacaagggcgaaaccttccgatttcttccacttctgctgttagggttccgcctccacctgctctgctctggtgagttgttatcttccctccgtttctctttcttctctttttcccccctttctggtgatgatgcatgcacacatgatgagattgctctgccgattgtcagtcctctctccctcagccgcaaccgcaaccccgccaagggacaacgcaaatccttcctcttatcagcttcagtcactactacacctacctgtaccacactgttcgtcctcctcggttcttttgctcctaatccttgccactacccgatctatcccttcacttccgccgcgcacctgcatgtgcctttgtgtttatgtctagattcatcgcac

SEQ ID NO: 196821 - DNA, 463 bp, Zea Mays
ggaagtgtgggtttgttgagcactgtattgttgaaagggtatatcgaagtgcatggtagtggtaattgcatcaagttaatcagtagtgtctcgagtgcacgccaccacatggttgtatgcgagacagggcaatataagatgtgctcgccacgatagttcggttagaataggtagaaattgttttggcttaagtagaggggtgatggcatgccaaggtagccgttgcttcctctataattataagtcgagtcaaaatgcggggtactagtggtacgctagacgggtggtgtccaaataaattaactggtcgatatggtagtcgtcgtgcgtgatttatggttagtgagtagttgaattacgagttatgcgagaatcatgttagaaactaatgtgcggcgtgtaactgtgctcgggtggtaaaccctaggtcggtaggtattattggtgtcgttggcaaatgggg

SEQ ID NO: 196822 - DNA, 456 bp, Zea Mays
ccgaaggatcatctttgcaggcttaccacactttcagcccttggcctggtggggtaatgctggcaatgaagctgaacccatagttgctctcatttcccagtctgaatccagcggcaatcctgattttggccagctcagcaatttggtatggaacaagcaggagctcatcaagcagaaccaggtcatttctaaagtctaccagaggcaggtgaatagatagtctaaaatcagcaagaaaaacagtcgtgcaacaaggaaaagagtggtaatgcagctttagccaccgcaattgaggagaagcgaaagaatcaacgctagaaacaagggcctcaaggtctccgtcgacctcggttcttcatctcaatcctctgaggtaccttcccagcatgattgctctcttatgctgggaaatcctcatacctccaatattttccctggacctgtcaaatttccatc

SEQ ID NO: 196823 - DNA, 1621 bp, Zea Mays
ctctcaggcggagatacatcagcttcgcatccaggcggtaagacactaggttttcagtagaatgatcactttgtttggtttggttgggtgcactgatcactcgatgtttgttgttgtagattgctaaggatggtgaggtggagaggttgaaaattgaaatctcggagctgcacaagtccaagtgccagtcgctggagttgattgagcagagagatgcagaaattaaagagaaggacggcatcatccagagctactacaataaaattgtgagcacttctgtttaagtacttctaataatatatatgctctaaccagtcaatttggccgccatattcatattgcatgtaggttatatggttacataaataatttttttgcctgctgcaactgaatagggatattctcataaattcgcgcatgtttgttagggaaaatgtggatactgtaggatggtaagttccacatgataggctgctagatcttatcttagattcttgtcagtattgaactttgtaatgtcaaagctcgctcagttatacgaccagcactatctaaactataaatgcataaactcttttgatcagtgacctatgaatattccattaagccctgccactactgttgtagccttgtggtccatagacacctatttacatgttctattctgcctaagctgtggtggacaatttctcttcctgaatttgcaagtcgcaagaagtatgacttgccacatgttccatatcatgtgtagcagacaaccaaaaaaggctcttagtttttcatttaatttttacacttatttacatgctctcttatcttggggatcgggtatatattctgcaaatttttatgtaagttcactgaaaacatgattgtcatcttttcaggtaaacctggcagaaacttctgctggtaaagaggccaggatacaagaggtcgaagcaaagtttacccattgtcaagcaatttgcaatcgcatgactcaggtatgatatgaacataaaatggatgaattaacacctagatgcagagttgttattttagtctattcactcctttactatctgatacattaatactgttaatacggagcctacccatatgtttgcagggtgtacctgttggttcttatgtggtttgcttttctttatcaggagaaggagctgcttgaaaagcacaatgtctggcttgatgaagaactgaaagcaaaagtgaagaacttggctgaactaagaaaaacaaatatggatgaggaggctcggttgtcagcaagtattgctgaggcgagtctttgtgatctaactcatgatggatagtcattgtgatctatctcatgatggataaatatgatttagaacacatgcgctgacttaatcttcgtgtttcagcttgaaagagagatatctgaatcctctagctccttgaggcgaagcaaagaacgcatctctgaactggagcaaagggtatcctacatggaaaaggtaatttctcatgcagatgattgcagtattactgtttccatctaatcttttctcttcatgttttggtgattgaaggagttgcgctcaacaaaggatactgcagctgctaatgaacaacgtctgggtgctgagctttcaac

SEQ ID NO: 196824 - DNA, 510 bp, Zea Mays
tgaggaatagattgttgtaactggttacaccgatgatagctttcagacagacatagatgattctagatcataatctggttttgttttctgtctcaatggtggggcagtgagttggaagagttccaaacaagatacaacaacatattcggtggcggaagctgagtatattgcggcttcagaagctgcaaaagaggttgtttggataagaaatcttgtttctaagttaggtgttgttcctagtgcgcccagcccagtggatctctattgtgataataatggagccattgcacaggcaaaggagcctagatcacaccaaaagaccaagcatatactacgacactatcatctcattctagagatcatagaacaaggtgatgtgaagatttgcaaggtgcacacggattcaaatgttgtagatccattgacgaaacctctttcacaagcaaaacatgaggcacacacaagatcaatgggtataagatgcttacatcagtgattctagtgtgaatg

SEQ ID NO: 196825 - DNA, 324 bp, Zea Mays
ctctacctcccttctcccctgccggcgacggcgaggagtacaccctacgcctcgagcccttcccttgttcccccatcgagcacaggaccggcgccaaaccccttgcccttgtcgtcgcctccaccccaggacaaggctcttccggctccactgcggcggcagtcacctccatcgccgagcagtttcttcccgatctccttgccgccgcggagagggccaaggcagaaggcgcgcctaaggatgagttggtgaaactgagtctcgttgcaagactgggaacggtgctcttcgagtgccagccgtgagtcctttcacctcttctcg

SEQ ID NO: 196826 - DNA, 308 bp, Zea Mays
tcgtcacttaccactgaacccacgcagaatgcagggactgaatggcccgttgttcgccttcagaatctctgcgcgagcggctagaagcccgtagtgcaagtagctgtgcacgtagagattgtagtgtttccctttgaggtgttccttggtaacgtaagggtcctgtccctccggcaccgcaggagcgttcgcggacgcgtcgtcagagatggcataggccatctgcaccgacccacctccgaggtccaccacgcctaccgtgtctgagtagtccccacctagcttgcccagcaggtagttcagggcga

SEQ ID NO: 196827 - DNA, 511 bp, Zea Mays
gaaagaaccacactatccatcaggcgttgggatgggatagtgaggaaaatggtgtcggtgaggacgtggtcatccaaggcgtagagctagagggcgaggaggacagggtcacgccagcgggtgtaggtggaggaagtcgggtcgaggacgacgggagccagagagcagatgttctggacacccgctgcctgggcgtgaaggttaacgatgatggtggcctcgtactccgagggaggagcgaccactggaggcgtcgggatgggcttgacgacgggggagccgagcaagtgatgttcaacatcaaccaactgtagggcgagggcattcgtcgtgttgcgctcgtgctcttaggcgagggcagcatcacgttcgtgttcccgagcagcggcaacagtcaccgtggcaacagtgagggccacgaacaaggtggagcgagcgttagcgacggcggaggagaggggcgccgcaacaggggcgggggcgctgggaacgcactaggcgccaacgtgga

SEQ ID NO: 196828 - DNA, 678 bp, Zea Mays
gcgagagtgccattagaaagacaccaatctgatgaaaatggttgctgtactccatcttgtgacattattctttgacaacaatcttcttgtacttgtttttcgagtgatgaattagtagcgacaggagccttttccattgtttgtggctgccattgagaaagcagcatttgctctgtctgtgatcctttcagcacataacttacagcatttgaaccgttatcaagctgcggattagagggcaacaattgctgagaaccatgtgaggcagaaggaagaaaattttgagagctagatagatgaccaagcatctgccctcctttaacattgtcaagagcatttctttgctggtattgaccctggaagtttggaaggtcagcaggatcactagcttgtgaagaaactagttcagtgtgtggcagagtcccctgttctggcagttgcattgaatggttggaagccatttgagactgtttaagggaattgttccttaacatagcctgctgatgctgtgaatttggctgctgctgatttatatgatactgattttgaataaactgggaattaggttgcacctgatgctgcgacattgggtgctggtgtagtagttgatcatgagtcagctgtgttgactgaaaattcaccttctctgtttgatccaaaggcccattttttatctgg

SEQ ID NO: 196829 - DNA, 391 bp, Zea Mays
ccgccctcgcgcctcctccgcccgcagctcaagccgagcgtcaccccgtcggctaccttccattctcgccgcacttctcccactgggcacctcgcgccctcgtgacggtataaatagcccctagtcactcctcggcgctcctcaaacccaccaaaccctagcccacttagcggcggcggcgctagaggtggaacgagaccttggcggaggtagcgagggtagcgctgctcgctcgctcgttgggtttccatcccctactgcctagagcgagctctacgcgacgatgagcagccttgtcgagcggctgcgcgtgcggtcggagaggcggccgcggtacgcgctcgacgagtccgacgacgacctcccgctgcgcgttggggccggaaagggg

SEQ ID NO: 196830 - DNA, 284 bp, Zea Mays
ccccctccccctttcctattgctacgatttagcttcatatatgtgattttgctgcaactattatgtacgtaagctatctcggaccgattgaattaagctatctcggaccgattgaattaagctatctcggaccgattgccccctccccctttcctattgctacgatttagcttcatatatgtgattttgctgcaactattatgtacgtaagctatctcggaccgattgaattaagctatctcggaccgattgaattaaggaattctgtccgtgccatatagacg

SEQ ID NO: 196831 - DNA, 309 bp, Zea Mays
aatgcaggatcatgttcactcgaagaaaaaccagcagctgtgatgacagagatgaatctctcaaaccaagcacgaggagcttgtttcagcccatataatgtgcgacgaagacgacaaacgtgccctaacggagtatcaacccccggaggaggatgcatataaacttcttcatgtagatcaccattgagaaaagcattcttgacatccatctgggagatagtctaagaagatgaggatgcaactgcaatcaaggttcgaacggtagtcatatgcgcaacaggtgcaaaagtctcatcataatcaagtcct

SEQ ID NO: 196832 - DNA, 476 bp, Zea Mays
catcgataaaattagaaggggcttcttgtggaaaggcagatgagacattagaggggggcactgcctggttaattggggccgtgtttgtagaccaatcgagtttggtggcttaggtattcataacttggaagctcttggctggtccttgagtatgcgctggctttggtttaaaaagactcagctagatcgcccatggacggagtttgacattcaggtccatcccactgcaactgcgatgttcgctgcctcagtggtatctgttagcgtgatgtatagggaaatagggcccaggtggctcggctgccctaacagggtgcggcggctgcctcccccctctgtatttggttagttggctgtgtttggcaaggatcccctcgattagacctttcctattgttagattagatctttcctttattagggatatccttgcctatatgtactgagccttgggctcctccaattaatcaatcaact

SEQ ID NO: 196833 - DNA, 787 bp, Zea Mays
ggctgccacacctaccagaggactggttcggggtgatgctggtgtggttgacacgcttggtggtagtggcaggcggccacgtaggtattgttctcgatggcgtcattcttcaggctctggtgtccttccctcgccaactcattaggctcttcagacagggtctctggccctgagcccactggtgcagaggatgctagtcggaggcctcggtggtttctagcccaaggaagccatctcgggtctgcttgctcagaggcatggtttagcttttgattctgtgttttttcagcgcgtttcacaagtggaattcctactcctccaggacaaggctagtaggctacggtggctcatgtgtccaacagggggcagcaggtgattgctccatctttccggttgcacttggctaaatggtcccgtttttcaggctgtcgatgtcaagatcaggggcatccctgcctatgcctgggataaagagacgacagacaggatagctcttctcctacgacacgtgcctgatcagtgaggattattagaccagggattgatgctcagcgtgatgtgttccagtttcgtgcttggtgccatggcgtgagctcatccctagtgctatgaatctcatcatcgaagagccacacgtcccaaaagggaaggagctgctacctttgggggctttcatatctaattctgatttcaacatccttgacggttcagccgtcgaatttggaggatccgcctctgcctccggctgccagagggcagagcagcagaaggtggtgacagcggcacg

SEQ ID NO: 196834 - DNA, 603 bp, Zea Mays
ctctgatgcacgggcaggcaagtactttggcttgctcaacgaaaacaacaatggaaacacaagaaaccacatcttcatggtcgagcttgatacctacaaaaatgctgaggtacaagatatcaacgacaaccacgttggaatcaacatcaacggtgtattctccttcaaatccaatacatctggcttctatgaagatagtggtgccttccgggagctgacactgaatggaaacaagggaacacaactgtggatcgactatgacaagagtactatgcagatcaatgtgaccctggctccgatcaacgtgcacaaaccatccaggccactgctgtctacaacctatgatctctcaactgtaatctccacctcaacttcatacattggattcgcatccggagcttctcccgtgaactcccgtcattatgtgatgggctggagctttggcatgaataaaccagccccaccccttgacgtctccaagcttcccaagttgcctttccatggccccaaggcccagtccaagctcttggcaattgtcctgccgatagccactgcaacgttgatcctctccataggcactattgtcactctggttgtccgaag

SEQ ID NO: 196835 - DNA, 539 bp, Zea Mays
cacccttctgttgcaacaaagcaagaaaaagttcatctggtacttctatccattccgatttgtgcaactgttctcatcttagtagttaaatgataactaaagtgtaaataaaacaatttacattgcacttctcctatgcagattgagctccaacgcgcaaagaattgtgaaattatgctgagaaacattaagatgccactgcctgatctaatggtaactttgtatggacattatcttaagatagcaatatttttgtatggttattaggattaatatcttgatagcaagaaagaattcaagcattattgatgcccagccttgctggaaggttaaagaatagattaacttaagatcatgttaagaataagttgtttgacagaaccgatctttcggggtaccttaataaagccattacatctgttgccaaaaataatgcttcttggtgttccttctgggagggcggacatttgtttcgatctcttctagtattataccgtgagggcggtcattccctccccagccgagttttttggtgttcc

SEQ ID NO: 196836 - DNA, 459 bp, Zea Mays
ctttggttaaccttttgaagaaccttgctgctattgctagcacacagtcatatcaagatattctaaagaatgcaaattcaaattcaatattgtcaaatgctggtaataatgctgcaaatggatctactgtgcatgagcaaactatacggtcaattccaatcagaggagaatcattagcaggtaaaacattttattatttacttgatgctgtttagcatgacaaatactaaatatataaaataaaatgatttaaataacttgttttctcagaagagcctccagtgaaaaggcgggtacatgattttgatttgaatgatgcttgctttgaagaagttgaggtaaatttcataaactacaataatcttgaacaaactatagcaaaactgctttgtcatgtggggccggagtaccagcgccaggcctgcacacaggacaccgccaggagcgtgccataagagg

SEQ ID NO: 196837 - DNA, 786 bp, Zea Mays
gatgatttctgttaccaattgaacttcaattgatggctaattcttggacttcatgggaagtttatgtaacttactttaaatattatgtgaaacgtctgcagcttaaagctgtggctgtatcaagagatgaagggttcacggatgccagattacatacctaactgactttttttgtggtcggtcctccaaaggtctcatctgtaattgtgaatccaagtggtcagtttgctatcctattttctatgtacaatcaggggtttatatgctaattatttattaacactccacctgttcttcgcttgacagagttgagctcagctcttttgaatactttggtaatccctgccctcttcatcttcccactccagttctgtttcatcagctcatcatgatttatttatcattcctgtgattcattgcacgatcattatcaatttgtttctttatttgcatggacattaactgttacaaaatgccgccttcgccctcctgtgcccaccatagttgccacgtgttctgggatctatgcttattatttcttggatagttattgaggcaggtaaaagaataaggttaagaatatgttaaattactccttgtgctttggttagatgatattaccaaaaatatatgttgaggtgtaagacaattctgggtttaagtgtttattctcaaacggttgatcaatcatggttttccacttccaagcttgatcctaaccaatccttatgtgatttaattgtcatattttgccactccttcctatcataaaaacatgccgtttag

SEQ ID NO: 196838 - DNA, 446 bp, Zea Mays
aggtgtggtcaaaattgcagaagacctacgtgttgcagttaagagcctgaaccgtgaacacatggattaccctgacaactacaagaaaaggtaatgtgacaatggctgaatacaaagccatgatgaaatctcttgcagatgagatgacatccacaaagaagactgttcatgatgaagaactcttctcgtacattttggcggaccttgatgaagagtacatcccgatggtccttgctttggtggctcatgttgagcatgtcactgtagctgaagccacctcccaacttctcagttttgacaccaggataaatatacttcatggaggtcatcaagcctctgctaatgttgttggtcgagggcatggaaataaccgcgactgtggccatggttgaggcagagggcgtggtggtcttggtggccgtggtggctaccaaggtccattgtca

SEQ ID NO: 196839 - DNA, 1338 bp, Zea Mays
ctttgccagcggcgtcctgacatcagtcctcaaactgcacagccagcagtttcatcacactggaaggtctttgacgatgggaatgtccgtggttcttcgagttcagacatgtctatagatgaaccactagttgatctcagtgaatccaagaacaaatctacagtcagtggaagtggctctcaggtccacagactaagcaacatccaaggtttagaatctgctgcagcacagcaacccaagccaaccatccaacaagcagtagataaacaagaagcagaaacagatgcgtctcctgcaccttctaaaggagagctttcaaggcggctgagtgtgaaggacaggataaacatgtttgagagccagaaaaaggagcagactccaagttctggtaacagcaactctgccggtactggtagagtggttccagggaaaggtgagcaccgcagggttccttctggcgcctccatggagaagttagttagaaggtggagcagtgttagcgacatgagtattgacctcagcaacaatgagagtagtagcttaaatgacaaaaaggataatggaactcctgccgggactccaacatctactgatttggaggccgactctaaagtaagagctaatgaggactctaatggacagaaggattcaatcacgtcacactcttggccttgtcaaaaggataatgtaccaatggatctggccaccacagatttgtgcccaccctcaattttaagtaatacacttgctcctcataaagagagtatatatggtgatggtgcagaaaacgacatggttatgaactctagcattgaaagtgaagcatcctttgggaaagaaccgggggttattcaaggacacacaaggatgtcaaatcatgctacttcaaatgtttccactcaagaccgtctaaaatcttctgcaaagtcagttgaagaagccttgctgaaaaataaagttattgtaactagtgcatcgtcagaggagcatgtctgcatgatagacaaggaaatcacagctgttgctcatgaagtaccagttgcaagtgaacagattccccagaatgatattagaggtctccatacaaaagatattcacactgaagcagaagtgactggaaggaaggatcagccttcacgatcatttggaagggtatctggtggtgttaatcctaaaccaaaagcctcatccaattcccgagctaatgctaaaggctcatctgttagggatgcgattgcctctacagaaactgagttccgtgacgttagtttgcagcggaatcgtctaccacggaagtcagaagatgtagggaaaaaggttacagctggttctgattca

SEQ ID NO: 196840 - DNA, 381 bp, Zea Mays
gcgtcgaccatggcctcctttttttgcgttcggatacggttattgctggaagcgtgaacagtaggaatgggcatgcattttacggatgcggagcgggttacggcgactgctggagttggtcttaggtggatgtaccccagaaatggtggcgtcaagccttgcagcaggttgctaaacaacatctcaaggggctcaaaattggttatttcagtagtatggtggacatggaaacataggaatggttgcacctttaagggcacatcaactaatgtcaatagaaacaagcagtatggtgtatggtgtaagccaaagatccaagtagcatatggtcataaatatgtttcttggttgatagagcttgaagaagctgaattatattcc

SEQ ID NO: 196841 - DNA, 386 bp, Zea Mays
acagaactacctactcacaaagcatccaacaacacattcacaaacatacccaaagggaaaacaatagaaaacagaaatgcctaaaaaccagggggagtgacctcaagaaaaaaaagtttaggcactatcaagcaaatgggcagtcaacaaggtgatgcctttttcttcagctataccccagagcctcatttcctcaacgaccaagatgaggtgatgcacaatgtcagttcgatggggctgtggagagtaattcatagtaattgggttggtggattagggtcaggtagtattttcttatgagttgacttgttcataaccactgcttctgactcatgaggacagacgaccttgcaattgcaattaaggtcgagaaaggcactgaacac

SEQ ID NO: 196842 - DNA, 1136 bp, Zea Mays
tggctactttggggaggaagaagcggcaagccgcaacaaccttcatcgtgctttgcatcttgtcatccttctacatctgcaaagcgcagttcacgcctgcggacagctaccttgttgactgtgggtcctccaagagcacaatggttggccagaggaccttcacagcggatggcgcatctccggtgaaggtgtccacctcccaggatatacttgcgggcacctcagcaaacggggtggcctcttttgataactcggcgctgtaccagactgcccggatcttcaccgggccatcatcctacactttccctatccagaagcagggccggcatttcgtccggttttacttcttccccttcacctaccagagctatgatctttcacttgccaaatttactgtgtccacccaagatgttctcctgcttagtgacttccagcaaccagacaagaccgcacccttgttcaaggaatactcactgaatatcacccgcgacacgctcgtgatttccttcaagccgtcaaatggaattgcatttgtcaacgcaattgaggtggtctctgtcccagatgatctcatcaccgatgatgcacaaatggtcaaccctgtccagcagtacagtggtttgtctacacagccactggagacagtatatcgggttaacatgggtggtccgaaggtcactcctgacaatgataccctctcgaggacctgggtgactgatctaaagtacttgttgaacccatctgtgaccaaacaggttaattatggcaagcgtgtcaactataagaagggtggaggtggagctactcagctgtcagcccctgatattgtctatggcacagctacagagttggcagcgacaaatacatccaatgctcttttcaacatgacatggcagtttgatgtggatgctggcttcagctatttggtaaggtttcacttctgtgatattgtcagcaaggcacttaaccagctctacttcaatgcatatgttggaggcttttatgcacagaataatcttgatctgtcagcaatgtctgatagtcagttagctacacctatatatatagatgtggttctttcatctaatgatgcatccagcaaacttagcatcagcattggcccatcggtcttgaac

SEQ ID NO: 196843 - DNA, 626 bp, Zea Mays
tgttgatcaataatcacaagatccaaatgtttgattggatcatcatcatttttgccatgaaattcccaaactcttgatatccgaacacaaatgatatagtggtagacccctggtcgaacttgtgatagtggtgtaatgtccatctgcaaatacaatttgttaaaaatagtatcaatttatgttgccatggctctcaatagattgtagtacttctttatacacaatattttctgttattgttccacatgaaccgtcgtcattttctatcaatattttgagccctttcttttctgtaactcgtgacacagctaaatatagttgaccgtgtgtaaacacctttttctttaaatataaccctacatttgatagtgtttgtccttgacttttatttatagtcatagagtagcaaaccttgattggaaattggcgttgacataatgtaaaaggccatttattgcccttagttgtcagattaatgcggggtatatgtattttttcgccaacgtgtgtacctgttattattgttccttctataattgtgtctcctagttgagttataataattctggttccattgcatagtcctaaactttgatttaaatttcgtagaagcattacaggagtgc

SEQ ID NO: 196844 - DNA, 274 bp, Zea Mays
cagcggcagcacgctcagtagcaggcatgcatgcagtggagggcagacgtggcagcggcagcacaggctctcattcccatttacacccaccggtcacctgtgcgacgccattaattccgcctctaggcaaagggcagccgcttccatctaactgacatgtatgcccagcaacggttgctcccacatgtcattgtctatatgttgagtagacgaggattttagtggagacaaaactaggagccgttacgcagaaggcagagcagagcgggtgctg

SEQ ID NO: 196845 - DNA, 571 bp, Zea Mays
ttcccgcgagccgtcccccttccctcttcatccgctcgctccgtctcccgcgctcctgccatcccctccggccactccgaccttccgtggagggagattccttgcccggtgggaatctcagggctgatttgcagactgtcggcaaagatccatcaaggaggcggcgattccatcccgaatcacgacatccggcctaagcgaaggagctgaataggcacgcatcaccctcgtcgtgctcaccgtcaccgcctccgtggccaaggcgcccttcgttgtcgcgcacaaggatccgctctactgccccaagctaagcgttcagcgcgtcgccttctccctcgacatctacaaccagatctgctcgagtgagtatcgctgctccccctcagaacccccaaagccgatgttgcttgtgtagtctgctaatctggctcttcttttttttggagatttgaatgtgccttcagttgctagtccccgaaccctatccctccgccgtcctcaaggtgcaggtccacctgatgctacacaactcgcctgccgagctcgacgtcccatcgtcggcttcctctct

SEQ ID NO: 196846 - DNA, 463 bp, Zea Mays
tacataatggaaatggggagaagagcaggccatgaatgatgatttctatatagagttcatggaatcaggaggggttgggacacagcagcagatggatgctccactgtctggtccaacggcaagtccgcagtgcagaggaggcactggaacattccctgcagcatcaccacctgcacaccatcagaattcaggaagtccttcacattcagctccaccgggtggaactcacgggatgtctggttcagggtcaggtaactcagtctcatcaccagcatcgccggaacgattcacatccccatcaccgccacaaattgcagaagaggacctcgacacagaccatggttcagaggtaccacttcggtttcgccgtctaaccaatatacttgggcctaccgaagtaccaggtctggtagaaagggagctccatgaagaactcttattagttgagaatgaagaacctgca

SEQ ID NO: 196847 - DNA, 1031 bp, Zea Mays
ttcgctccgttcacaactctgtcatggaattgaggaacatatgcaaccatccatacttgagccagcttcatgttgaagaggtagaatacatcttccatttcttcctcactgttgttgttgttgttgttatttttgaatccttatgtttgccatcaacaatttgggttctctttatagattgagggctacctacctaaacattacctaccatctattttgaggctctgcggaaaacttgagatgttggacagattgctgcctaaactcaaagctacgggccatagggtgagtgtatctggatataatttgacttgtaatttgattgttcatttttctctctagttgctggttgaactggaatgttcttccctctctggtcccttaccttttttcgtgccttcgttccttttgtggtgattactgattagttctggatcactgatggcaactataatcttccaggttctacttttttctacaatgacaagattgcttgatgtaatggaggattacttggtttggaaaaagtataaatatcttcgattggatgggcacacttctggccatgaaagaggagctcttatcgataaatttaacgatcctaattctcaagcattcatttttcttcttaggtatgttacaattgtatcgcaagtttttataaaatgtgacgcttagcaaactcacgagtatgattgagctactgatttgattaatatttatttaaacttatttatctaatgacaaacaaatacttagctctatcggttttctacctctttttgttagtatacgagctggaggtgttggggtcaatctccaagctgccgatacagttatcatatttgatactgattggaatcctcaggtagctaaatatctagttatcacgttatatatactctattataacgttatatatactctattgctcttctaagagaacactgcatgctgctcactactgattgattattgtccaggttgatctgcaagcacaggctagggcccacaggattggtcaaaagaag

SEQ ID NO: 196848 - DNA, 277 bp, Zea Mays
ccgcctccacaagcggggataggagaggggaaggaagagagtgcagggccttaccgtgagaaggcggcagagagagtcttcgtcgactttgcgctccgccaccacatagttactccacgtcgcctcctccgtcgttagggctgcgccacatctcgctcttgcgtcgtcgccatgatccgatctggaggatagttgatcggggttcgaaccgggccgtcaaggatgggaaaactccaaaccaggcggtggaggaggccacacgtggcgaggcagaggg

SEQ ID NO: 196849 - DNA, 376 bp, Zea Mays
gaaaggatgacacggttggataggaggtcaagacaccggtaccctttgtgatgtgacgagtagccaagaaaaacacacttagcggaacggggatcaagtttgtggctagtggtggcagataggttgggatagcaggtgcaaccgaacacgcgaagatgttcataggagggtatggttttgaagagggcaaagtgaggagtggaaaaatgaagggtcttggtgggtagaatgttgagaagaagtgttgccgtgtggagtgcttcaacccagaaggttggtgggatgctggcctgaaagagaagggagcgaatggtgttattggtagtacggatgatgcgctcagctttaccgttctgagatgaggtgtaggggcagg

SEQ ID NO: 196850 - DNA, 613 bp, Zea Mays
ctgcaccacgggaagctccatgtctcgccatcttccaacctgatcccggtgatcctggagctggctcacacgtcgggtcatgaaggcatccagaagactctgcaccgactccggaacgacttcagcgtcgaccgtgatcgccacctcgtccacgactacgttcgcacatgcactgtttgccagcgcaacaagaccgaggcgcttcatccggcgggtctgcttcagcctctccccgtcccgtcgcgcatttgggcggatatctccatcgacttcatcgaagcactccccaaggtacatggcaagagcgtgatactcaccgtggttgatcgtctgtcgaaatatgcccacttcattccactcgagcacccctacactgcttcgtccgtggcgcgcgccttcttccacgacgtcgtacgcctacacggcttcccggagtccatcgtcagcgaccgcgatccggtgttcaccggccacgtctggagggacctgttcaagctagcgggcgtcaagctgaagatgagcacggcgttccacccccagatagacgggcagtccgaggcgacaaacaagatgatagccatgtacctgcgatgcgctaccggtgatcgacccc

SEQ ID NO: 196851 - DNA, 371 bp, Zea Mays
gacccttcctcggctctggttctgcggagtcttgttctgagcagatccacgagcgggggtgctctggtcatttctctgagtgttgcctttctggggtgtctgctggttgcgccttgggcagttgttggcatagtggcctaattcaccgcacttcaaacagccgttgggttggacaggtgcgttgtttctggcctgagtgttgttggtgccaccctgacggttctgtgaatttccaccagacctctggttggtctgggggttgctcctttgttgattctgattctggttgtttctctggccttgctgtccagagcgttgcacttgataattatttccaccctgatttccagagcggaactgcgacccttgag

SEQ ID NO: 196852 - DNA, 401 bp, Zea Mays
ccagtatgcattgggcaaaaccaactgaatatttctcagtattgtcagtcaggaacatatgttgcacgtggaggttcagcagataacagtacagtttgtccaccatgctctagcgactttccttttgaaagaataccgatgtcaccaataccatgctcatgtgtcgttccagtttatgtgggttaccggcttaagagtcctgggttctcaaatttcattccatacgaatcccagttccagcagtacttaacatctgggctttcactgtcatcgtaccaattagaagtttctacttttatgtgggaagaaggcccaaggctgaagatggacctgaaaatatttccaaataacactccctttttcactgtaagtgaggtgttcaggcttaatggtatgttcac

SEQ ID NO: 196853 - DNA, 618 bp, Zea Mays
cactgtccatacgacactaggaaggcactgttaggaatccatcagtgaggacgtggttttcaagggcatagcgctgcaaggtgaggaggacaaggtcgcgccagcgagcgtagttggaggacgctgggtcaaggtcaaccatgactagcaaccagatgttctggatactagccacctgagcatgaaagttggcgatgacaaaggtttcgtaagtgacgggggcctcgacatcgtcggagtcgaagggcgggtagtcgacagcgacccccaagctaacgctcagtctccgcgagctggcaggcaagagcatccatagaggtggcccgctcatgctcccgcgtggtggcaacggtggacttggtcacgacaagagcagcgataagggtagaatggacaatagacacctcaccatgagaagcgcaacagacaaagacacacagaaggggaggccagtcaggcccacagcgaccatgcaggctaaatctatcaaggcggccatggtggcagctctagagggaggaggcataggacacctgaagaaatcgatgcggaagcgccgaaggtagccaacccaatggagggggtggaggcagcgacacccgtcccagtggccaacgg

SEQ ID NO: 196854 - DNA, 407 bp, Zea Mays
tccacggtgtagcgacctcacaattggtacgcccctgcatcggcatgcatccttatctcataagcgctgttggcaggtactacctgttgctactgattgactattccctgatgctgagtgattagtgcaatgttacatgtcggaatctaagatatctgaatattacctggaataagtgctaactcactccttttctgttaggaataacatccaacctgacagacgaaaggcaataaaacatctagaagccaacttaccagtgatattgttcaagggggacactggctgagcattgaatgcacaaccattttttttcaaaatccattcaccagaaatcgccacaagagcagacccctgatttgaagtggtggaacctgcagcaatctcgcattacaatctccctatcc

SEQ ID NO: 196855 - DNA, 389 bp, Zea Mays
ggtgaaatcatctggtatgcagccctgattcatcatcctaccaaggtactgtgcagcttcctggaccttggagtccttgcaaaggccacgcatcaatgtgttgtaagtgacaacatctggcgcaacgtaggcacccatcctttccactagcgcaacagcctcttccaacctgccgtcttcacagaggccacggatccatatgttgcaagtgaacttgtttgctgacatgccccgcttgaggaccttggccagtagtgcccccgactccatgacatcccctttctggcaaagagcatgcaaaacattgttgaaagtggcaacgtcagggaagacatccctgccgagcatttcatcgaacaggtgacgcgcattgtaaccgtggccgtggg

SEQ ID NO: 196856 - DNA, 324 bp, Zea Mays
ctctacctcccttctcccctgccggcgacggcgaggagtacatcctacgcctcgagcccttcccttgtccccccatcgagcacaggaccggtgccaaaccccttgcccttgtcgtcgcctccaccccaggacaaggctcttccggctccactgcggcggcagtcacctccatcgccgagcagtttcttcccgatctccttgccgccgcggagagggtcaaggcagaaggcgcgcctaaggatgagttggtgaaactgagtctcgttgcaagactgggaacggtgctcttcgagtgccagccgtgagtcctttcacctcttctcg

SEQ ID NO: 196857 - DNA, 606 bp, Zea Mays
agttttgcaattgctgggttgggtcaagaagggtcgtcaggtttaatctcagtgaatgatgcctcctatgttgaagggacacttcctagtggtgtcagtacatctctgctgaagataagtctggaggaaaatgccatcagcaatcaacatgggattactgacacccaggaaggtttgaaaactgctgaaatcaaggaaaatgctgatcatgctcttggcactaagttacctgatgattcgaacaccctgtttgaggtaccatcctttgagcatcttcaagaacccactaggccataccaaagcaacaacatggatataaaagtgggtggccatgctaattatccagaagagttgacattatattatctggatccccaaggaggtgtgcagggtccatttctgggtgctgacataatctcttggtatgaagatggatacttcggtttggagttaccagtacgtctgtctcagtttccagatgatgttcctttccgtccacttgtcgaagtcatgccccaccttgcgcaaaagacgcaatcgcgtatacctctgccttgtgatggaaattctgagtctctggaatcatctcaaagtaaatttgaatcc

SEQ ID NO: 196858 - DNA, 979 bp, Zea Mays
gaaccgtttacagggtgctatataccgtgcatcggtactccttgtttttattttagtcaatttttcatatctatcttctgtttgcatccatagaattattagcctcctttcagggttctgcaatttctagctttcctggagttgctctcccatcagaggcccactcattcaaaggcaactttcttgatgttgctgacacagagaaattatttgttgcgggcattcttgatgaattaaagatatgtttttcatgtggctatgaggtatttctttcttgactattttttttgtaaccttgattcagtgtttttgatgcaactcatgcttctgtagagtaaccacaaactaaaaaaaattctactagctaaggagagcagcctgtttgaatttcgggcagttggtggccaggtatcgatcttttttttgtttgattcttgcttcgtgaatcttattaatatatgtttttttccttttggaataaacaggttgaactctcaatgaaaggtggcaatttactgataggaactattttggggtcactagaaattgaagaccagtattactatccagggagtcctgtgccaaggttcttggcaaggtcttttattaatagcatgcaaactcaagaactcccgtctcttagccgaaagaacagtgcaggacctagaaacaccccattgatgaaaaatgacagtgaggaaaactttttcgaagcatcagatgattttgatgaatttgaaacacctatgcatcaaaagaggactatatcagactattttagcacccagaaatttttgcctactagcgttccttccctacagccgccaacatttaagcgcattcctgatttgataccagatactgaacttcaaactggcaaattcacattggaaggtagtggcactttcaatagttttgtgaaagctcagatagtgatttatgatcaacattctccccagtacaacagcttggataacag

SEQ ID NO: 196859 - DNA, 576 bp, Zea Mays
catctggaagatagtccaagaagatgaggctgcaactgcaatcaaggtttgaacagtggtcatatgcgcaacaggtgcaaaagtctcatcataatcaagtccttgagtctgttgaaaaccacgggccacaagacgagctttatacctctcaatggaaccatctgattttgtcttaactttgaagacccacttacatgtgatagggacaacatgcgagggtaaatgaacaatatcccatgtacaagtgcgttcaagagcagccaattcatcaatcatagctagctgccactcaagaatcccagaagcttcctgatatgtagtgggttcaacgatggccacaccagcccgtggaaaaccatagcgatttggaggttcaatggtaccacggtcacgaagatggtatccctgattaaaaacatcattagactcattattgttagtacaagaatcaggtacaggatcagtatcaggaccagccgtaggaatagagtgggaacgacgaatgtaggtttggatgataggtgtttggaaagagtaagaggtggataccgtggaggtggaaggtggtgtgatgag

SEQ ID NO: 196860 - DNA, 273 bp, Zea Mays
tagatactggatgaatccgaatcaagtctaccaaagtggactcaagaacagcaaggttaacctggctgatgccaaagccatctgcctgatggagtgcccaaatccagctgtagatggattgaactatatttgtgattatccagaagggaacatagacctctctgttgatgattggatcaatagggactatgactattatgagtttctcacaccagacatgaagaatagctcacttcaactccagggtccatgctaccctataatatttccaac

SEQ ID NO: 196861 - DNA, 387 bp, Zea Mays
cctagctataaattcccttgcccttaccaggcatttgatctcactcacgtacagatccagcagcatgcagtgaaacacactaccatcacctagctagctactacaaacctacctacaacgaggactcgaccgatcatcgttctcgagagtgagctactgagctacgatgaggtgcacactggtggtatggctgtctctggtcgtcatggccgcggtcaccgccgccggcgatgataatacgccggagccgaggccggtgatcactccaaagccgaagccaccacggccgtaccagccgaaaccgacgcctcaaccgtaccagccgaaaccgacgccacagccctaccagccgaagccgcagccagagccaggacacccgaagcccac

SEQ ID NO: 196862 - DNA, 698 bp, Zea Mays
tccatgaccgttaagtccttaaaaaagaagttcattgcctgcttgtctgagatgttgccgtcttcctccaacggtggtgttcccatcgctatccgctgctatttgatgggaccaactatcatgcttgggttcctcgcaagcgctggcacatgtgtggcctgtgcctccaagagttcctcactggcgagcttccatgcccaccttgtctcacggctcctgtgcaccctcaaatactagaaaaggcaactgatgaaaggcaaggcgaaacctcttgctgattttgatgaccccattgcatcatacaagtctcagttcagtgcttacaagttatggttgaatgaggatgctcctgttggttctattcttgctgctagtgtggaggatcggtttgatgcagaaattgttcactttgattggtctcatcagatgtggtcttctctttgtgatcgctgagtgtactggtcactctatttaccttgctgctattcgttaggatcaattgaacatcagggagattacacagtggatgagttctacaactagatgtctgcaatttggctttagctcgatgctcttggtccgcagttgtcccctagcacctgtgagttttgccttgatcagttgattgaccttcagtctcatcggatatatgacttcttgactcaactttgcaatgagtttgagcctattcgtgccca

SEQ ID NO: 196863 - DNA, 378 bp, Zea Mays
gatgatatgaagactaatgagaaacaagtaatagtgtatcaaagaaggcggtataaaaaccagggggagcaattcatgcagccagagccccaatcacctgcatctccagtcctagatctctcctcaggtctctctccatcaagctcctcgcctctacctaaaatgggtaatactactccttctcctgaacatgttgatttaccccttgcacaacgtagggatcatagaatcaatgccggcaaacctccatctcgctttggctttgagtacgatatagctaactacatgtcatactgtcatgtgtcgcctgcatatagaaccttcatcgcatccctgcagactgtgtccatcccgaaagattggagatgtgcaaaacag

SEQ ID NO: 196864 - DNA, 425 bp, Zea Mays
attccttcgagctccgctccggtgaagggcgctccattttggagatttcgcaacctctgcctcgttctgccatttttttttcttgcctgcaccaacgtcatctaaccagtcattagttggtgaaatcctccactcccctgcagaccacgtcagccttcaccttgccgtctccgttacgcgccgcgagcccgcgagcgtttggggagttttggagcggaggaggcaagggaggacggacagggaagtttggttgtggaaatggatgtggtggaatcctcgccgtcgtcgtcgccgatatcgtctccggccgggtcttcggagtccatagacctcaacttcctgccgttcctcaagagggagcccaagtcggagcccgcgtcaccagagctcgggcccctgccgctgcctgcgcccccaacccagac

SEQ ID NO: 196865 - DNA, 403 bp, Zea Mays
aaagcagcaattgtttggctaggatcacatgcaggcaatcagatcaatggtggcatgtgtatagcagtaggcaagagattaggtagggtcgtgtgagtagggcgtagattggccagctatcaccatggtggctcggtgttgggttaacctggcccaaggcaccgccatggagacacatgatgaggcgacgactagtgtacttcacgacgagcgcggatagggtgacgaggtggtctggtgccacaagaagtccctatatgttacttgacgatggcgaggatgacaactggatcaataggattcgttgcctaatggggtggcgctggccccagttgagatctatctcttccgagggggcacggtgcataagctcttagtggctagggtttgggcccaagtgcgg

SEQ ID NO: 196866 - DNA, 798 bp, Zea Mays
ggaacttctttggcaagagaaatcttatccctatattttttgatttggatgcagctgattgccttgccagagatatcgtcgagaagcgaggagatttgtgggagaaacatggtggtgagctgtggatgttatatggtgggatggaacacgagtggatggaatcggttgatgctctttcccgggtggtagatgtgcaactagaagcgaatgatggcaactggagagattgcatactccaagcaatcattctcttggccacaaaattaggcagaaggagcgtggttgatagggtgtaccggggaaaagggaggttggagaaggaggaattccctttcgctcgtaacaatgattttgtcggtaggaaaaaagagctttccgaattggaactcattttgtttggtgatgtcatgggagatggagaaagagaatattttgagctcacgacaaagcagaggagaaaaggccttgcagttaggcggtctgctaacaatcatgagcacatgaatactgatgacagcaaaggtaaggagcctgttatttggaaggagactgagaaagatattgagatgcagaggctgggtagtccattgtggcatgggcgtccactgagagtgaagaatggcgtaaggtgtggaaggaaaaaaagatctaggaagatactttatggtaagggtattgcttgcatatcaggggagcctggaattggcaagacagacttggttttggagtatgcatatagattctttcagagatacaagatggttctgtgggtcagaggggaaagccgatatattcgac

SEQ ID NO: 196867 - DNA, 323 bp, Zea Mays
ccggttccttctattgtagacccacagcctaaggtttgccttaactattatctgcagtttctatctgtaggtccattcattattttatttattttgttttccacattgttgtttgagtagcaacaggatcacaattccgattcagattctgaggaagagatggttgaaggcaacttgaccatccctgacagaaaggagagctatgaacttccatcgcaagctgatctcatacgtcaggcttttgctggtgatgatgttgaagctgaatttgagaaagacaaaatggatgttttaaatgaggagaatcctgaacctgaaaagcc

SEQ ID NO: 196868 - DNA, 434 bp, Zea Mays
aaacagagagtgggtgagttgtcgcgaagtgataggcgtcatcgtggtgagatggagggtggtcgtcttcgtgtggacgggactggcaaacgggaattgttgtcctcgccggctggggcaagtgtgggtgagggggagctgcgaagtctgtttgcgggtgaggaattgaggataatgttgttcaactatagggagatgggtatcatcctgaaggttgagccaatgtaatgtgtgatgccctcgctgtatgtatgtaaccatgattttgtgtgatgaagctgcacgctttcgttgatcaggctggtcccgtaggcttctgtacggagtgctttggaaaagacttcgattttttgtacttgttattccggctgcacccgtaggcgacttttgcacggagtcttttggaaaagacttcgatttttcgtgcttattat

SEQ ID NO: 196869 - DNA, 549 bp, Zea Mays
ccaccagcggctgcaccagcttcgccccctgcgactccagcagctcggctcctcaatactgcagcgaaccgaccaatgactcgctcacaaaccggctccctctacattgtctagcgcttctgcttctccgcctccgtcgcctcgccaatccctgcaaactatcgcagtgctcttgccaatccgaattggtgtgctgcaatggcggacaagtacaaggcattgatcgacaacaacacttggtgcctcgtacctcggtcacctggtgcgaacattgtcactggcaagtggctgttcaaacacaagctccactctgacggctccctcactcggcacaaggcgcgctgggacgtcagctacgacatgtgctccacaactccatcccacgtgcgaccgttgtctactgtgacaatgtgagcgtcgtttacatggcggctaacccagtccatcaccgccgcacgaagcacatcaaaatcgacatccacttcgttcacgagaaggtagctctagggcagtttcgtgttcatgtcccatctacgcaccagttcgccg

SEQ ID NO: 196870 - DNA, 402 bp, Zea Mays
caatggtagtgggaagctaggctgtcatgcttgtttaaatgaggtatctaatttattttaacttgcatttttcttgattggcccttaggtctactgaaagttctacttgaggctgctaaacaaccatcacctgcacggatagacggggtggtctctttgctgtggcatgtcatgaaaggaacttccacaaagctacactcaaaagctgggcaggtcttgaagttcttgttgagcaagtcaattgtttccactctccgtgataaatttcctgatggtcagaactttctgcggatgacacattttttttttgcattgcccttatttatgttccatatgttcaacttattgcttgttttcattgggccacctcatttcgcattatggttttgctagattgatcag

SEQ ID NO: 196871 - DNA, 806 bp, Zea Mays
agaggaacttatcgatatacaacccatatgacgatactctctatgttgaggaagtgtctgtttggatgtcttcattggagagcacaaggtattcttctcaccttgtctgccagctgggcccctttgatggagcattggagctatcctcttcacgtagcaactggtatacagcaagcagtgaagaatttagatggccagtggtcaatatcaggcctagtgaacaatgggaggtgcttccttcaaagaggaacactgtgattgagttaaagctgcaagctgtttctgaaggcaaggtgtttggtgctatctgcttgaaactgcgcaattgcactcttagtacgactcatgcttttgtgatacctattgagctagaggtgcatacacgaacttactatgattccagtggcttaattgctgtcacatttgagcatgtatggacttgtgatgaaactgggccgatcttttcgctttccttacggaatgatggaccaaagttactgaggattatagatattactgagcatgccataaagggcccaatgatttttcaggttaaatacctgaatggattaatactctaccctgatactgtaacagatatagctttagtaagatatacttcttcagttacagaggacatttcatctgacagctgcaatatagttgtagaaacaaatagtacccttggtagttcaatcataataccatgcaaagatttagtgcgcgcatctgaatccgttggaccgtttgccagacaagtatatgaggaagatatctctgctaatgcaagaacaagaacattgggc

SEQ ID NO: 196872 - DNA, 460 bp, Zea Mays
cctgcccctacacctcatctcagaatggtaaagctgagcgcatcatccgtactaccaataacaccattcgctctcttctctttcaggccagcatcccaccaaccttctgggttgaagcactccacacggcaacacttcttctcaacattctacccaccaaaacccttcatttttccactcctcacttcgccctcttcaaaactgtaccctcctatgaacatcttcgcatgttcggttgcacctgctatcccaacttatctgccaccactagccacaaacttgatccccattccgctaagtgtgtttttcttagctactcgtcgcatcacaaagggtactggtgtcttgacctcctatccaaccgtgtcatcctttcccgtcacgttgttttcgatgagtccacttttccctttgctgaacagcaacccactggcctcctcccaagattttgacttcctgg

SEQ ID NO: 196873 - DNA, 497 bp, Zea Mays
cgacgcggaacgacgtctcgcgcagcgacaacttgaaggcggtgttgaagatgtacttcgcccaaggcagctagcgcagccagtcgtgggtccggtcacctgtaaaacaccgcaagtacataatgatgactcgattagccgactcggactgcccatctggctgggggtggaaggccgtcgttgtctggagcttggtgccactcaagcgcatcagctcgcgccagaaactggagttgaacaccgtgtcgtggtcagagacgatggattgcggaatgccgtgcagccggacgatgtcagtgaagaacacctgagccacactcttcgccgagtatgggtgtgcgagggggatgaagtggcaatatttgctgaaccggtcgagcacggtcaggatgacagacttgccccagacgcgtgacagcgcctcaacgaagtctagggcgatgtcagtccacactccttgtggcacgggcagtgggagcagcaggccggctgggagg

SEQ ID NO: 196874 - DNA, 968 bp, Zea Mays
gagctgttacagcagcttttgcttctccaaagatgcaccgcaatcagtttcaaccatctcctgaggcccatgatgcatatggaaatcatacaagtgatctcagcaactcagggaaaggttttgttgggagaactgctaaagtatctgctgctgtttctgctcttgtcgtgggggctgttgttcatggagctgttagtcttgagcggatggttgctgctttaaaaataaaagatggtttggatattctgcagctcctgagaggtttgaaatcaagttcgaatggtgtatcccgtcctactggaacttttaggattgaacattccacagatgttttggtacattggtttagggttctattggggaactgcagaactgtctatgatgggcttattgcagatattcttggagattcgtacattcttgcactctcaaggttgcagcagatgcttcctcttagtgtaatctttcctccggcctactcaatttttgccatggttctttggagacgatatatttttaaccgcgaagatccacagctttatcagtctctgtcaaacgcaataagcgatattaccagacatcaaccttttcgggagatttgcttccgcaatacacatcggctgtataatcttctggcttcagatgttggtgattcagagtttgcagcaatgcttgaaactcatagtcctgacaggaattcaaaaatactgccatttatacctctccgtgcccggctttttctggacgctcttattgattgcaacacaccaactattcagggagatggagcttcggagccttgtgaccccaaagataatgaattaaagctttcagagaggcttatgcaacttcttgatactcttcaacctgcaaagttccattggcaatgggttgagatgaggcttcttttagatgaacaagctcttatggaaaaagttgcagcaggcaagacagcacttgaatcactt

SEQ ID NO: 196875 - DNA, 303 bp, Zea Mays
aacattctgaatttccagttgatgggcaacccgagggctcaagaacaccagctgttactaaaaagccaactcaaagaactaagctagcaaacttcactgctgaagaggacacaagggtatgccatgcatggcttgctgttagttgcgatcccattattaacacagggcagaaacgtcaaggattttggagtagaattactgaagcatacaactcaagacgtggaacattgccagaaaggtccacaaaatctttgatgagtagatgggatactataaaaacacagtgttccacttttgctggat

SEQ ID NO: 196876 - DNA, 433 bp, Zea Mays
cgcctggctcgtacgatcggattgacggtggatcgcgaccgtagacgacacggaatggtgtgtcgtgcagggatgtttggtacgccgtattgaagatgaactccgcccacggaagccaacgcagccattgtcgtggcctgtccccagtaaggcagcggagatacataatgatgacccggttagccgcctcggactgtccatccgactgagggtggaatgtcgtagtcatgtggagcttggtcttcgtcaggcgcatgagctcgcgccagaatgttgatgtgaagaccggatcgcgatccaacaccatcgactgtggcacgccatgcagacgaacaatgttgatgaagaaagcttctgcgacagactctgccgagtacgggtgcgccagtggtataaagtggcagtacttgctgaaacggtccaccaccgtcaa

SEQ ID NO: 196877 - DNA, 410 bp, Zea Mays
gtcgtctcgtcaggatcctatagacaacgttgatattttgactcctagtccgcactagcagatgggcaagttgttggtgggaccgtggcgtcacctgtccctcgctgactcattagagtcccatcgcgccgttgcaacacgacaatgggtgtcgcttgccgtcaccgtcatctatcgctaccttgcttcctgcactcgctcctcctagctgtcgtcgtctcaccaacaccatctcacgacaatttcgatgactcgccagaacgacgcgccgatgcggctgctccgccctagtgcctcgtcctcagtcagtccacctatttttttctctctagctctccttttggtagccaaaaaaggttttttggtattcatatcattttggaaacactagatattatcattaatctata

SEQ ID NO: 196878 - DNA, 384 bp, Zea Mays
caaaaggttgcttcagtagagatggggacatggcttctgatttatgtgtgctagagggtaatacgaatcctgctcctgctcacctatggccttatcaggggaagttccatcataattttagcaacctgtgtatggtaattccatcattcctgcatttggtggtacgagatacaaaccacacgatgaaagaaccactctgcgccttgcattgcaggtcatatagttctctaggctgttgcttgcttatttttccatgcttattactttgtttagcatcctcgtactatatttccttagtcttgtgcccctgtttctaagtggtgatatataatgtttgaccctttcataaattgtgtttcatgctttagtttaggttactagatg

SEQ ID NO: 196879 - DNA, 343 bp, Zea Mays
tatcggatgactgcagtaaggttgaaggtaagaagaaggtccacaccacatcccttgagaaggagatgaagaagaaacttcacaatgccagcactaggaagaacatgcaaagggatgatgacgagaagggggaggaatatgagtaactctgctactaaggtgaaaagcaaggtgtccagccaattatgtgaggagaagaatgagaaaaagctgaacaaaacataccgggggaagaagatgcagactgctgacaacaagatgaaatatgacagtggagtaaagaagggggattgtgttcacaacattttgtggtatagaaaagaaaaggaaaaggccagtgaat

SEQ ID NO: 196880 - DNA, 617 bp, Zea Mays
ctagagtatggtgcttaaacttttcttctcaagattgcactggactgaagaggcgtgcatcattttttcttacttactgctcagtgttcatgctctagaaagttgcagaaagaactttatgaaaggcgtggccagggaacgtcgtgacgcggatcacggtaggactgggctctaggatctctggtagggtaagcagcctggtctgtcgacgaggtaaacggtcgaccctagtcgaaaggttctttcgatcgcaccttacttttgctctagccatgcatggtacccgatcggggggtcggctgacccggtagtgactcgaaagttggcgcaatccctctgaaatggcgacactttttgttacaaaaaaatgcgacacacacgcacacaagctctacatacactgtccattgacaacgagaaagtcgtttcctaatcaccagctccctccaattattatcgctccctctgaaatgcaaatcgctagtagaaagcaacgtgcaggccaggcaggtagggtgaggttggagccaacgccagttcgattcctgcgacctaacactcaactcaccagcggttgggtctggcagaagcgaccttgaatgaatgattggcgagat

SEQ ID NO: 196881 - DNA, 292 bp, Zea Mays
attcatcttctcgtcgcatgcgtatttctcgagatgtgagctttaatgaaaaccgacccttcttttacaactcttccactcattcttcttttcattccacagagtctacctccttcatgagccttcctcccatttctgaaacttcatcagtatcaccacctactgtttctaccccagatgttcttattcccatcacaccaccttccacttccacaacatctcagccttactcttccaaaccacctgttactcagacttacattcgtcgtcctcgttctactcccacggccag

SEQ ID NO: 196882 - DNA, 707 bp, Zea Mays
aaaaaatataggctggctagatgggatgtaatttgtcaacctaaggaggttggcgggctaggcattttgaatttagaggttcataataaatgcctcttaagcaaatggttgtataaacttctcaatgaagaagggatgtggcaatcattattgagacgtaaatatctggccaatcgaaccttatcccaggcacaacgtagggccacaaattcacacttcttgagtggccttatgaaagttaaggacacattcattagtaaaggaacctttgtgattcatgatgggtcccaggtgcgtttctaggaggatgattggcttgggtcaggagcgttaaaacttcgttttccgtctctttataacctagcgaggaagaactcaactgttgcatgtgtgttctccacggtgcccttaaatatatcctttcgtaggggtttggctcaacagttgagggtccaatggtttcatttggtctcacttgtagcgcataccgaattgaattcaaagagggactcgttcagatgaaacttgaccgccaacgggatgtttacggttaagtctctgtatctggcatctctcaacaatgggatgggggtgcataataaggacctttggaaacttaggcttcctttgaaaattaagatttttatgtggtacctcaaaagaggggtaacattaacaaaggataacttggctaggaggcattggaa

SEQ ID NO: 196883 - DNA, 358 bp, Zea Mays
ccaccggcccctccgcagcatccacaatgttgtctatgcttggcgccctcctttggtgccagtccagctacccatggtgccgctcctaacgcccacatccatggcacgcaagacggtgaccaccctagcgcttgtaccactgactatgcctcttcttgatgttgtacccgtccctcctatggcaaatcagcatggcatgtttactcgagggaagcacaactctcgttagcccacactattcacaaccacactgctgtctctagtacctaagagtctaggacctatcgggccaccctcggtgatccgaattggcacactattatggaagccaagtactcagcttgttgtccaatctcac

SEQ ID NO: 196884 - DNA, 287 bp, Zea Mays
gcaatatcataacaacttcggctgttacagcttcgtgccccgctctaaggcaaactaccatgtgcctacatttcggaagaaatggccgggctcctggatgaagcaatggttttatgtaaagaatgatctggatcaaagggaggatgtgaggggcatcattcaacgtcctatatggtcgcgcttcggcatcaggaggccatcaatcgtaattgggaatgaagtgcaagcatgcctaatggctttcaataccgtatacatctacatcagtaccagagatttagttcaag

SEQ ID NO: 196885 - DNA, 733 bp, Zea Mays
caatacgctgcttatcagataagcagtttgaatgataattcattattgttgggtcagattagtctcatccacccatctattcttcctgctgcaagcttacgcgaattacagtttcctacggttaatggtcagcctgtcaaaatttgtgtcactggggcattcaattcatacttagctgatcagatgcttttctttgctgcaaactgggtaatggagcaatgtactaaaaacgatcttgaactatatggcaaatggtttaattggtataactctctggtccagccttattgcaacttctttgagagctattggtatattctggagcaagaaagtgagcatcctatttggcataacatccttgaatattacagggaaatagttgcctatcacaatattgatattgttactcagcatattccattactctcgaagaagttgctggatatggctggttgtgatagcctgaaagcatgccaaaaccggctgcatcgttcttttaaggctttgggcttgttgcggcttactctgcagcaatggcaaattgagacaaaatgtcctgatctttctgtcctggaatgtactttgttgccagcattgaagtccctcagatgcttagagggcgaggtacttaaaacgattgcgaaatcttggaagcggctcaaaatatactctctccttcttgattaccacagatcaatatggaaaatgatgattgcatctcagttagaggggc

SEQ ID NO: 196886 - DNA, 652 bp, Zea Mays
catggataatgacatgtacatagcaattgctgaactaggtaacttttttcagcaattatgtgctaggacattgaagttaaatgttttgcatagaatgaaagaggaaatcccaattgttctatgcaagcttgagaaaatatttcctcctgcattttttgatgtcatggtccacttgactgtccatttacctgatgaagctatcctgagaggcccagtgcaatatggttggatgtaccccgtcgaaagacggatgaatgcctagtgtgtgaagaatctagatggaaagatggtgaaggtaaaaataagagtcctcaaaaggtactgcggcattttcctttgattcctaggttgaaaaggatgttttcctcgaaaaaaatatctgaggaggcacaatggcataagttgaagaggaaagttgtggaaaatgagctcagccatccagcggatggtaaggcatggaaggacttcgataagcaacacggttggtttgcagaagatcctaggaatatcaggcttggtcttgcaacagatggtttcaatccatttgggaaaatgagctcctcttatagtatgtggcctgtttttgttatcccttacaactttcctccatgggtatgtgtcgagcaatcaaacttcatgatgtgtctactca

SEQ ID NO: 196887 - DNA, 955 bp, Zea Mays
gcaatatgagatatgttggtgatggtgtcagcgtttggtaacagcggtgcaccacgagatgtatcacgaagtgttttttgtggttggtgagatcgattgtagcttatggtttgcgtcgcatggacgtgataggagaattacacaggtttagacgatcgggaggcgtaaaaccctacatcctatgtattgtggagattggattgtattgcactgagcccgaagttacaatggtgccttgctacttgctagctcgaggttctggtaagggatagctatgagatgggatcctccgttgaatcgtaggagtccccaacctgctttatatagacaaacagatttagcgttacaagtatgttttcttcctaactaccagtcctgcaatatcaggggtttgttgtttctcgcatgagccctcacgccttttgaaacaactaccgctctgccttgatctccaagccttttcgtcgtctttgggcccaagttagtcgatcggcccatgaaatcagtcggtcagcccataaaatcaatcatccgacctatttaggccctttaatggcccatgtacagaatccacgactcaggggatatctatccatatcgcccacatatgtgacttgaataaattgcaatattcagctagtgttgattaaagagctcattgcatacaaggcatagcatgatgctatatgactgtagaaaacataaggaaaatgacttggctacgaagactagttactagtgtgaatgacaagtcaagactcgagtgtgatggcccgtatagcagtgaagctagagtaagtactcgacaccaaaacagggttataatcaatgaaccgataaggccacgtgatgatatggagtggactgtggaccatatcctgtttttggatgatgaaataaactttatgccaaggacaatgatcaaatgtagcgtggtgttagtgctcggaatagg

SEQ ID NO: 196888 - DNA, 430 bp, Zea Mays
cacttatgaagtgacgaatagagtacggaagcataacatgcccttttgcaacagagtctgaaagtaagatataaacaatggcttcatgggacctttctttagttactgaaattcctttttttcgtccaacttctttgccttttagaggtagtcctttctttgatgatttaggtgaaacagcgactaattggagattgccaactgaaatacttgcagctgtatcaggatgaattagcacagcatagctgacaaccacacctatctcgacaccttcatatttgaatgtatgtgcatacttcctatcagctgcttgaacacgcaggagtgcctttattttgacttgttctttcagtgcactttgcttttgtagatcctgagaaggcttctcttttcgttttttaggtgcaacaacaacttcagtgcctggtac

SEQ ID NO: 196889 - DNA, 661 bp, Zea Mays
ctcaaaacagaccaggcaaacatgaaacggtcccaagggagcagctggaatctgataagctacatgtctttcaccaagaacaccctgggagtttgcatgataatccagatcgtctaggaggttcccgtgaatttgaaaggaatgtgcagccagcaccgccacttcttccacatcctgatggaaaacagactgatatgaacatgagggcagatacaagggacacctttagtgagactgaaagaaccgtggtacttacaaaatcggtgcctaaccagagaggttcggttggtatagaccatttgtctgtttatgaaaacacacgatcccatcacagagaaacttgtgatggcactctgcgcaagaagttcaaggaggatagctcagttgtacttgaccagcatcctgtcattaagaagaatgcagctttaatagagaaaattgagagtttgaacaacaaagccagaaatgtctatgcacagaatctcccagaaccagcttcatccaaggaattcaagaagcataaaaaaactactgatgtttcatctaatgatgtcatcagtacgacatgcacatctgatcaggcagtttctgtttcacatatttctgctgtggtgcagagacgaccaaatgtgaccattgagggtacaattcttggaccggc

SEQ ID NO: 196890 - DNA, 356 bp, Zea Mays
cttggtctcaacgctggagcatgagacgacaggctgctgcttcgaggcccaggaacacgacatagccggatgttgaccgacgcgtgtgggggcagccagccaagtcagcgtcgttgtagaccacaagctccgatgtcggtgagagtcgaatgaaaaggccgtagtcgatggagccgcagaggtagagaagaatatgcttgagagcggtgaggtggggctcccggggtgtgtgcatgtgaaggcacacctgctagacgacgtaggcgatgtcgggccatgagaatgttaggtactggagagcgcctgtgaggcttcgataggtgatcctgaggaagtggtggagaggctccagattc

SEQ ID NO: 196891 - DNA, 314 bp, Zea Mays
cccgccgaagattttcttcttcctggaggatcctcctggagtacttgatgatccgcgtggtcctacccgttgcatgaacaaggccttgctcggcacaatgctgggcaggcacctcgactgctgcttcctgaacttcgctattcctctggcttcctgatcttctcctcctctgaccacggcgggtgcgcttcttcaatcttccaacgccatcatctccaccagcctcaactctgccagcagaaatatctccagagccagccatcccagaagactgggagacaggcctccacaccaggccccgtcgtggctggggt

SEQ ID NO: 196892 - DNA, 407 bp, Zea Mays
cgcagtttcggtctcccgtctccgctcgcaaatttcagtctgctccggcaccggccctgccgtgccagtgccacctccataaaattcgctatcttggcaggcgcatccactcttctgagtcctgatctagtccttcagagacaacgagcttcctcttccaagtcccaattcccgataaccaatgtcaaagcgcaagcacactgaaggcacgaccgcacgagctagcaaggtcctcagtgactgaccggcgataaagcagcggccagcagcagtgtcgcacagcacaccagctgcttgctcactcagggaagcttccataccaccagcccaccaccatgccgaccgtgctgagcacaaggcgggccgcatcgccggagacgatctccctcccctcctctcgttcctcc

SEQ ID NO: 196893 - DNA, 319 bp, Zea Mays
tgaagacccaaatgcagagtgccacgaacataacgtagagtgcgcttcaaggcgacaaggtgaggctcgcgaggatcatgcatgtgaagacaaatctgttgcacaacataggctatgtctggtcgggtaaaagtgaggtactgtagtgctccagctaagctgcggaaatccgatggattagaaacaggagtaccagtagctgcagaaacctttgggtttgtgtcaacgggtgtagaacagggcttgcaatctgccataccagaccgatccagaatatccaacacatattgacgttgcgaaagaaagaggcctccatctc

SEQ ID NO: 196894 - DNA, 754 bp, Zea Mays
agaggagaggaaacatggaagaaatcaccatttgtcatcgatttattgccagcaggtgatgaagcttgtcgcggcgccacatgtgttaggcgcccacaaatgggtgtcatgtgccttgcaggtggcatgcgttgccctagctgctgcatgctcgagcatgctgccggcgctggatcacctcgcgagcagggacaggtggatgtctgggtgagcaggaagccaggagggcggtggtggtgtgcatttccgtcgcttgttgcctggctcgctgccttgtggggtgtgtgagttgagggttacagtgggcatactgtactgggcctatccacaaaacacttccatgtgtatctatctacaactgttttcacaattggctttgcccaacctagccgttttcactattggcctcacatagtgttctcactgtcacaattggttttgccatacatggcttttttcggctcccgcaccattactgcatcctggctttgccgctttgcctactgccctgcctttgccgctttgcctactgccctgcctttgccgcttttgcctcctgtcctgcccaacttagctgtttatgcctccggtgagccatatcggcacatccgttgcccgtactagccgtttcctagcttcgtttcccatcctcacgtttcccatcgtttgtatatacatgtaggaccaaccaaccatccattcaacctgaggctatggttcctttccatccttttctgctatccatatgtacaca

SEQ ID NO: 196895 - DNA, 311 bp, Zea Mays
tggcaagggaaagaaagaaaccacggtcaatcccgtcaatgctcacggaaagaaaacaagcaaagagaagccacaacataagccatacggacttcaagaccaaacatgctacaaatgcggagtgtgggggcattggtctaaaatatgtcaatcaccaaagcatgtaatagaagcatacaaggcaaagaacatgcacaaacagaaacctgaggcccacttcaccatggcaaccaacaacgaagccatggaagaagaccctgcacttgaagcatttggcatgcctcttgatcttgcaagtgctgtgaagatga

SEQ ID NO: 196896 - DNA, 487 bp, Zea Mays
atggagcgcagccaatggaaggtctggttggcccatctcgtttagcgactagttcagtttgcccatgacattattgcgtatggcctgtcaactaggttgttgatgttctgtgccttgtggtgtgtagatactcagaccagctgcctagataggctgcattttgctgtctcctatttgctacgactttttatctgattgctgttcatgtgtggtgtttctgctaccctgtacactgattattttttaatcttttctgcaaatggcgtccttgtaagtgatgtggccagagttgtcactgtacaataaacatcatgattgtttatttccttgttctacgatttggtattgctattctgtatggatttacaatgtcttatgtagtctgtccattttgttatgcattcattgatatcttagatattgtgtatgtaggtgttactagattattattgtactattcccgaggtgttaagctgggttaaagctg

SEQ ID NO: 196897 - DNA, 457 bp, Zea Mays
gtcagattgctttgtttgattcaatacctgcaatccctatttccatgagctcatcaattcttgatttcattatggaatacccaggatggttgctcgacagccgacaaaaaatccttgcatccatgaacgaaaatactgactgcgcatgtaatacctagctacacaggggtgccaaggagagaactgcagcagacaagcaattctgcaggatctggaatacaacaaatgtaagcacacaggcccaagttcagttcattgtctattgtcagctaaccatttaaacagcaaagcgattttactccatttgtttcaaattgtaatatgttttgactttctacatttatgacttttgctatgcacaaagttataagttatgtattatgtctaggtacaccgtgaaaattatttattaaaatgttttataatttgaaaccgatggagagtagctggtattgct

SEQ ID NO: 196898 - DNA, 608 bp, Zea Mays
gccaattgggtcctgtcatcatgtgcaaaaaagcagcccgtgcaggattagcacaatctctctttgaacgccttgttatccttggagtgaagccattcaggctacaggtaatacctgcatatgatgtaccttggtgttattatcctttccctgcttcatcctgcaactttggcactccatgtataaaggctatagttttttcttgacttagttatagcagttacttacatttttatgtcatgataattactcctcattagacattttggaaactattgttttttgtacttcacataaatgagttcatgctgatgttatctggtttttcctgctgttatcgatctattaagttatgtcaaaacttgaaacaatggtattgccaggattaatagtcataattagaagtgagctgataactctataccatcagcaataattctaactcaaatcatctctgatttataggtccagtatagaatgcatccatgcctctcagagtttccatccaactgcttttatgaaggcacactgcaaaatggagtgactgttaatgagaggcattcgtctggaattgattttccttggcctgttccaaatcgcccaatgtt

SEQ ID NO: 196899 - DNA, 436 bp, Zea Mays
gttcatgcttgctactaggctgagagcctccacactgctacctaccttattaatcgtcttcctactatggcgactcgtgtccccattccccactttactctctttggcaccactccctcctatgaccatcttcgtatttttgggtgtggatgctaccccaacattcatgtcacatctcctcataagcttgctcctcattttgttcgttgtttcttcctcgggtactctcatgatcaaaaagggtactggtgccttgacctctactcatcgtctccagatctctcgtcacgtcactttcgatgagatagatttccccttctcgcctacctcctacccaccaccatctctctccatgacttggattttctcaatactcctgactctgtggcgcttcctggttagtcattgtttgttcttccccctgcaggctctctcc

SEQ ID NO: 196900 - DNA, 515 bp, Zea Mays
atagatcaccttttaaacctcaaatgacgtttctatgatattgagggcattgtattcacatgagacggtattagagtacaactagtggatgaagacgttattgggctagctaatgaccttttgtgataccaggtttcctataatcccctctattcaaggcatacctagatggtgtttatgtccactcaagtaaaacaccacacatcattttgccacattgtttctcaataaaataaagaccatgggaaatttatccaaattgcgtgtgagatctgtccaaacataggttacggttgtaaggcaccttttttctaccatacagatgctaaaaggttggaatataaagaattcaaaacaatatatcaccttttaaacctcaaatgtcgtttctatgatattgacggaattgtattcacacgagagggtattaaagtacaaccagtggatgaagacattattgggctagctaatgaccttttgtgataccaggtttcctataatcccctctattcaag

SEQ ID NO: 196901 - DNA, 566 bp, Zea Mays
gtagcaactgctgcatatcatcgatcgatcgtcgacgacgatgccgatgccggagtcacatccgcacgctgttgctgctgctgcggcgggtctggctctggcgtcgacgtctagccgtcggagcctcagcttgggctcctccatctcgcagtcattccggcagatggacacggaagaccccttcggccgggcgcagtcggaccacgacgacgaggagaacctgcgctgggccgcgctcgagaagctacccacctacgaccgcatgcgccagggtatcctccgccgggcgctggacaacgatcaacagcaacaacagcggcagagcgtcgaggtcgtcgacatccacaagctggccgccggcggcgacgggggccgtgcgctcttggaccgcctcttccaggaggacagcgagcgattcctgcgccgcctcagggacagaatcgacatggttggcatcgacctccccaccgtcgaagttcgctaccaccagttgacggtggaggctgacgtcattaccgccggtcgcgccctccccacgctctggaacgccgccaccaattttctcc

SEQ ID NO: 196902 - DNA, 567 bp, Zea Mays
cttcctccgactgggtgatcgactctggtgcctcctaccacaccactcccactacaggcacgctctcccgctcccatccccccattcatctcatccttcatcgatcgttgttgggaacggttccactctgcctatcacctcagtaggtgcctcggttctccctggaccgttctacctcaacgacgttctcatagcccccctcatcactcataatctcgtttctgttcgtcgtttcaccactgacaactcttgttccattgagtttgacccctctggtttctctgtgaaggatctggccaccaggactcccctcgcccgctgtgacagctcggggcccctctacacgctccgatcatccacctccagtgcgtctccacctcctgccttggtctccaccaccacctccaccacttgtcatcgtcgtcttgaacatcacggacctgacgtcatgaccaagattaccagtagcctagatccttcatgtagtaggggacaatttgagggcctctgtcatgtttgtcagttaggccgacatactcgtctcccattcaccacttcttcttctcg

SEQ ID NO: 196903 - DNA, 423 bp, Zea Mays
aaatgcgtccacaagtacccatcagctgaacagtgtggtatggcctggtgactccactgatatacctagaggctgggtgttcccgaacgatggccagcctctaagagttggggtcccggttaaaccaagcttcaaggcattggtgtcaggcagcacccctgattctgtgaggggttactgcattgatgttttcaagtcagcaattaaactgctcccttacccagttccttaccagtttattcctattggggatggcacaaagaaccctagttatgtcagcatcgttgggatggttgcttccaatgtacgtcctcattctttgtcatcccagtttgtttcactattagctttaatttgtttacagtcctctgatttgtttgtttcattttcattcagacacttgatgcagctgtaggcgacttt

SEQ ID NO: 196904 - DNA, 528 bp, Zea Mays
gatgggaacccagggtcgagacctaatcctacaaaggtaccagaccaaattagggctccgtaacactcccccagctgggaaggacccttcatggtaatgggagtaccccgacccaagggcaactgtctagctacgaccgaaggaatgcctcccccagtgtcgaaatatctctataagttttatctatagagcaagtctgaggggtcgaagtttttcccttttgtaactaggtagtgcacatgggtatgccaacccggtagggtctgcccccataagcccagcctgttggcctgcacccatgcatgattagctataaaggaaaactaccctctcaagatatgcctctatgatagcaattttctactgctccacggtctcaccctgcagtttctgatagtgttttatctaacccacctgcccagctcccatcccaccaggcataatgacatctggattgaacagccagggttgcagtttaggacctctatgcgaaagcagggggacccgacagcctgggggccgactctg

SEQ ID NO: 196905 - DNA, 416 bp, Zea Mays
ctcttcccaagtaatgcttaatggtaaaccatgtaggagaattattcatagacgtggtctttggcagggggaccctctctccccaatgttgttcatactggttatggatgtgctaggctatttaattaaggaggctgctaatgatggtttgatggtgcctctgatagaaaattcagttcataaccgtatttctatttatgctgatgatgtggtgattttcctccacccggtggctcttgatttagtaatcaccatggacattatcaggatttttggggaggcagctgggctcaaagtgaatatggcaaagagcagcgttttccccatccactgtactgctgaaaatctggataccattcataatctgctgccatgcgttgttgccaacttcccctgcaaatatttgggggtgcctc

SEQ ID NO: 196906 - DNA, 728 bp, Zea Mays
caaagaccatggaaaatttagccaaattgagtgagagaactgtccaaacataggttaaagttgtaaggcaccttttttccaccatacagttgctaaaaagttggaatataaagaattctaatcaatagatcaccttttaaaccacaaatgatgtttccatgatattgagggcattgtattcacatgagagggtattagagtacaactagtggatgaagacattgttgggctagctactgaccttttgtgataccaggtttcctataatcctctctattcaaggcatacctaggtggtgtttatgtccactcaagtaaaacaccgcacatcattatgccacatcgtttctcaaaataaaataaaataaagaccatgggaaatttagaaaaattgcgtgagagatctgtccaaacataggttatagttgtatgtcaccttttttccaccatacagttgtgaaaaggttgtaatacaaagaatacaaaacaatagatcaccttttaaacctcaaatgacgtttctatgatattgaggacattgtattcagacgagtgggtattcgagaacaactagtggatgaagacgttattgggctagctaatgaccttttgtgatactaggtttcctataatcccctgtattaaaggcatacctagatggtgtttgtgtccactcaagtaaaacatcgcacatcattacgccacatcgtttctaaaaataaaataaag

SEQ ID NO: 196907 - DNA, 434 bp, Zea Mays
ccctcattgctttcctggatgccttgctgcgccaatcctgcatggagaactccacgccaattccagccacacgcctactgcgtcgaggcatagtcatagtcaggtccttttgcctcttcagtccagtcccgggtgcagggaggaggtgtgaaggctttctgctaatcatgttgatgagggatgatgatgtgcgaggtatcacaaagctaagagttcattcctagaattgtttcagaggatggacaggtcttcactgcccaggatgagaaggcggacttgttcactgatttctatgtgaacctccttggtactgctatcaacaggggggctgctattgatttggagctgcttggggttcctagttttaatctggaagcccttgatagccctttttcggcagatgaggtgtggaacacaatcattagtctacctct

SEQ ID NO: 196908 - DNA, 604 bp, Zea Mays
gcataatattgttacctgctcccgtgatggcagtgcaattatatgggttccacgatctcggaggtcacatgtaagctgttgtatcctagaacttcatgattttgttttccaaaaaatctgtttccatggacatttttatgatgattgatgacatgcataattgcccaatctagctactgctatagtggtatcatcacctcctgaaatgctgccaatcatattttatgattcagtatgcaactatgcattgactttcttcattgtgtcatgttcattcagtaatgatgtatccagtgcaatatccagtggcaagtcaggtttactggctcatttgcactactgccagtttgtgcaactgtagatcacaaatgcctttgttgtatgctataaatgtgttcaaagtagtttgtaatttgttcaattgttcctgcattgttccagggaaagattggacgttggacgcgtgcttaccatcttaaagttcccccacctccaatggctcctcaaccacctcgaggtggtcctcgtcaaagataccagccaactcctcgtggtgtcaatatgatagtttggagtctggacaaccgctttgtgcttgctgcta

SEQ ID NO: 196909 - DNA, 642 bp, Zea Mays
ctttccttttagtatcctgccagaattcttatccaagtttgcttttggaaacctctgtccttcaagaagagtgcagagctcaattgggacatgattcggtttgtccttgctcttgctcaaatccaagcatggcagcatctgatactcaatcacaatgccatgtttctgagcataatactccacaagacactttgtttgtccggattcagcatccacaaaggtcatctggctggcaggtaagggtgtcaagccttgcactgtgtacttctgattagtcctccgatgaatcacagttacacgtcggcctttaagctcatcaaccagattttccatttgcctcttgttcagagttgttcgataatcaaggtaccccactattttgtgaacaaggtccatcaccggtccagctttgtaaaatggcataactgaataatcaacacacaggttcaacccttgttgagtgtatttaagtgtctgctgggttcctttcatagctacaacaccctgcccaatgtctatactgctgcttggtgagtaaaatcctctaccaaggataaccttgcgccatctggaggcctcacgcacaacaacatcaagaccctgcaagacctctctaggtacaggtaaatctgagagttgact

SEQ ID NO: 196910 - DNA, 310 bp, Zea Mays
atgggagaaagggataaagtagttagtaaaagatatttattattatagtttctatgggtgcaggaatgaataccattcattatttgtagaaaggacaaattgatctcagtataaatcgtaccatataaaaaacgaacggtgtggatgtctttgtaattggaataagggatatgctaaatagaagaaatgatacaagaatgcataaagcggtacaaggaattttaatatgtatttagatttcataaatgggcaatagtaaaccagcttaccttttacagactttgatactacagaggctgcaagaatcacc

SEQ ID NO: 196911 - DNA, 469 bp, Zea Mays
atgttggcggaagtaagcctcgcacttgttgaggaagatcattggatcgatcgtgccgtcgaagcggggaaagtcccacttcttatggctcgggaagaagtcgtgatcgcggggcctgtctgtctggttgccatcggcggtgccagacgctgacgcagtcctgtccttcatggctgccatgtcggacttgagggtctgcatctccgaggtcatggtcttgagcatgtccagcacgtcggcgagagacggctcagacatggtggctgctgggctggttgcagattcagatgaagaggtcggcgagggtggggtgggcggtgtggtctagggctggtggcggctggtgaggcggtggaggatcggctggatcgctgataccagatgtcaagggcgtagtgatcaagggtaggcggccctcgactacggagttcgtagtctcctgtcgtgtcttccaggaccgaaggttatg

SEQ ID NO: 196912 - DNA, 281 bp, Zea Mays
cacggggggtcaccggagtgatctccagctcaccgccggtgaggattcttatccccccagcgttattattccaccccgcacacgaatctaaaagccggcgacgcgaatcacggtggagggtcaccggcgtcgagctgtccgcgctggcgtcctaatctgtgcactgtaccatcgaggaacttgttcagagtgtctgacagacaatgtttaagcttctttttctctgattttcaaatggcaacacacccagtgacctatagcaaagttgtagtgctataatc

SEQ ID NO: 196913 - DNA, 303 bp, Zea Mays
ccatttgcactcctactgcctgttttccccaccctgagcaccagcagcgttggcgccgtcgaaagaccatttctctgtcatcgcttagcctctgccgtcgcccttgccacggccagagaccgccgccgactcgcttcttcgccatccagctagattggagtcccaacgtcgctccaagtctccctgagcaccgcccctggtaaggaactctactctacccctttttgtcttaactctacggcatcatagtgaattcgggctcgtcggaggcgttgcacggcgggccaccgtgcctccacgtcg

SEQ ID NO: 196914 - DNA, 277 bp, Zea Mays
agctgtttctgcaggctgtccacaagttgcagataggtcgaggtcgtcggaggtggactggatctgcaggccgtcgtcgtgggtctgcagggcgtggacccacactcaggctacaccgacgagatggcgaggagacaggcctccggaggagaggaacagggatgcctacgtcgaatcgctacaggcaggttgttgccgccggcgacgaaaccctagaatcgcccgcggcggcgctgggtgcggagaaaagagcaggagcggacgagaccgagcccaa

SEQ ID NO: 196915 - DNA, 510 bp, Zea Mays
cacgaaatgaaccaaagcagttctacccgccaagttaagaagggaggccttccaggaaggtaaacgatcagctatcttctcaacccaacccattagagtacccttcgatagcttcttgttggatatgggcagccctaagtaggtgcatggaaaggttgttgaagggcactgcagtaaggaatcgctttcctgaaccgcctaatcattacaagcaatagggataaaacaactcttttgcatgttggcaaccaacaccgaggcctcctcaaaacagtcaagaataaccttagtacacctcaattcaagatcctgtggcttaataaataaaaccacatcatcagcgtatactgaaatccttgacttgattctatcatagtcaagagtctgctttagctctgttgcagggcaggttttcttcttttccttttgttttcagctcttttgggcttgtactttgatcattttctggacttttctcctcttggtttaatgatgcgcagctctcttgcg

SEQ ID NO: 196916 - DNA, 344 bp, Zea Mays
agctatctcggtcgtccaacatgccgtggagctcctcccccgtccgatgcggtctctccagtcctccaccccctcgcccaccagcccttcccgtcctcgatgcgctctgcaacttccaccctcctcgccgcgacgagctcggccggccgagctccgcgccaacctccaacttgatctcctcgccatgagccttgccaacctctcgcaccgagctacgagtttccccgcagatctcctcaccatgatctcctcgccatgatctttccctcgctctgccatctgcccccaaattcccctccccgctcgctcgcgtcgcgatagcaagcaacgcgcaggtacgaatt

SEQ ID NO: 196917 - DNA, 467 bp, Zea Mays
cgaacaactgtgtttcaggggacgtcaaacctgcacaagctggttgcgaaacttgaatgctagttatgtgagaattgtatggcaagagcaaggacatgaagctaagaagcagctcattgtttgtgtgcctctgggattgatgcagacaggaaagaggcaccctgatccctttcttgtaaatgttggtgagcatgttggcattggcatcttgatctgtttccataggtaaggtgaagaggattgtgtaagataaaagggacaagctgtatgtaaagacaagccaaagctgagtgaatttcaggcaccttattgtgtggagggtcctgtgtttgttgagtaggcaacgctcgggctggtgtgagatgatgactgcatttgtgttgtgttggtggtattttcactgctgacatgactgttgtatcggatgacatcttttctgttttatgacagtggcagtgtgatactag

SEQ ID NO: 196918 - DNA, 576 bp, Zea Mays
tataagaagtactgtgctagtatgagtcatatttcaaaaaagagaaacttgtaaggaatctataaactttattagagtaaaaacattacacctgtttgttatttctcctctgttgtactgttaataaacattttttaatattgaaccagtgaggagatggctagatattaccaagtggtgtatgctctttatgaagtgctacaggatgtaacaaataaaaacattgatgatcaggtgatgtcttgtaattgtcttgttagatatatgctattttcctatttctttggtcaacttcacaattttccactctaggtgttgcggtgtgcagacatggttgaggaaaatggtcgtcatttcaagaactacaagtacaacattattcccctcaattttcctggttcttccgaggaaattatggaacttccggaggtctagcactcatcttttataatactattttacttgtttctgaaaggctgaagtaagtttgatttttgttaccctgtaaatgatgtagataagaggtgccattgatgcaataagtgacatagatggccttccaatgccagacatgtc

SEQ ID NO: 196919 - DNA, 791 bp, Zea Mays
tgaaaagaaacctggggttagcagaaacagaagctctaaagatatccttgctaatagagattttagaaacaagcatcagaacaaggaggatagggtaaaaattaaagatcggagatgtgggcttcttgtccgtgggagtacccatgatactgaagataacatggatggctatattccatatgaatggaagcgtacattatgttcatggatgatagatctgggggttatttctgaagacatgcatgtcaaatacatgaacagcaatagaaccagggaaatgttggcaggtaaaattaccagggagggtattttctgtgggtgctgttccaagattctcacaatagcgaagtttgaacttcatgctggttcaaaagagaagaagccctatgcaaacatctttctggaaggtggtaaggtatctttgttgcaatgcttacttgatgcatgggagaagcacacacaaagtgaaaataagggattttacaagatagataaaggcgacgatgaacatgatgatacttgtgctatttgtggggatggtggcgatttggtgtgctgtgatcactgtgcttccacttttcatttggactgtttgggaattaaggtatgcatacagatatatatatgtgctacaacacttttgtttgtttcaaataggtctgttgggggtgggtcgggggatgcacccctagattgtctattctgtcgttggatgcatttatgtttatttaatttatttataacaattgcctctgcagcttccctctggcgattggtattgtcgcagctgt

SEQ ID NO: 196920 - DNA, 333 bp, Zea Mays
ccgtgatccaagccatcgtggtgcagggagtagattgagcttcagagttaaccatcacaccactagtgtgttgatctgtggatatatcggaactggatcggaatcagggagtaagattgagcttcagagttaaccaacacagacagtgaggatgggggatgatcagagcacgggaccaggaagctgcacaactaaccacttcaagatctggagttacaagtgctgacgacggttgtgatgcgacccatccaaaactacgccgccatacacactttccattctgataggtgagcatgaatcgcatgagcaggacgatcaatgaacaagctcaag

SEQ ID NO: 196921 - DNA, 652 bp, Zea Mays
ctgaattgtccgccttcatagtgatcatggccgagacagtgtgtgaggtggtgtacacttgcgaaagtgagaaaaagtcattcgaagctgcaagcagaatcccacccctagatccatttgcaggcagcacagcagtgttgtttagaaaattctgacccaaggtacgaaggatggttgcgtcgtcgattgtagtgagtttagtctcctgcaaacaaacaatggtactaccagtatcccgaactagttcttgcacagaatcacgcctggccaattcattgagcccacgcacattccagctcaaaattttgcagttatgttgagacattggtagacaactgagacccaagataaaacagaccaagccaaggaagtggcaaattaattccattacactcaaaccagatccagaacagggggtactgggatgaaccttgaagttcccagaacactgcagatagtagacagacaagcacttgtgacgacgaacgacgacggctaagttgagtggtccagcagaatcgcagcaattgaaggcccctggatgttgccgtgattctaggccaccgaacaaattggttgtgcagatacaccatgacacattctggacaaaagaacgaagaagtgctagacattgcaaaagactaaggccccc

SEQ ID NO: 196922 - DNA, 915 bp, Zea Mays
acggcttggaggaccaagagatgaggttggccccaaaaaacactatatagtcagaggtagaccgacgggtgtccgtgtactcggccctagcagagtaggtctagattgttagaagtatatttatgttttctacatttcctcattctataagggcttagtaccggtgtataactgtatatataatggccttagggacttatattgaatacaagtgctattcatagcatggtaccaagccagaaattagggttagtttccagcctggtatttcctacgcacatgtttgctgccaatcttctcatcttgaagattgtcacccgatttgtcgtcgttggctcgttcactcatgcacatcagtagggagagtgtgcattcctccatcggaggcatggtatttcatctcctctgctttggcctccgatggtttcttctcctcggagggtgtcgtctctagcttgtccttctctacgaactcgggtttcttctctatccgcccactaggacgtggttcctctcgcccccgtcagtcgtcttcctgccagctagccagccatcctcccgctcgttcgttgctcgcccgacggcagtactcccgcccgcttgttggccagcacaccagcctgaatcttcttctgcccgcctgcagaccatacgactgcatgccagccatactgctcactcttatatgatctgtaaaaaaactactttcgccgcttattcctctacgctcctgtcgtcaattattgttgctcagctatggcaccatcttcgtcttcaccaaacgggggtgccccattacaagttgtctgctcatctttgatggcaccaattatcgtgtttgggttcctcacatgtggtgacatatgcaaggtcttcgtctatggaattttctttcatgtggtgacatgcaaggtc

SEQ ID NO: 196923 - DNA, 426 bp, Zea Mays
cagaaagacagctggggctccagttctgatagctctacttgttgggaaggctgctatagatggacaaagcatcagttctggtgatcatgttaacaatgctatggtggttctccgaaagctttttaagaatgcttctgtaccagatccagttgcatctgttgtgacaaattggggacttgatccctttagtagaggtgcttactcttatgttgcagttggagcatcagggcgagattatgatattcttggaaggccagttgacaattgcttattctttgcgggtgaagcaacatgcaaagagcatccagatactgttggtggtgccattttgagtggtttgcgagaagctgttcgcatcgttgacttactgaacactggcagtgactatattgccgaggtagaaacgctacagacataccaaatgca

SEQ ID NO: 196924 - DNA, 1357 bp, Zea Mays
ggggaagggggcaaggaatgggttgctgccgagctcgctgcggatcatatcgtcctgcctcaagacggtgacctccaacgctggctccgtcgcgtctaccgtgcgctcggcgggcgcctccgtcgccgcctccatctcctccccttccgaggacgagaaggaccaggttcactgccccgcccctgccctcctcgtcttcaaacatttttttgttttcatttttacgctgctagtgcagatgactgtgggcgatggggtttgctaacttcagttctatgcttgcaattgtgtactcaattgtcaattgtgcattctgcagtggtaggtttgggtagtgcctggacgcacttcctttgttccagtagattcatcgtactagtagcaattactcgctcttcaagtgagttgaccattaacaatgttactgctggataggaaaagctagaaaatactataatattggattgttacccttgcaatcgtgtctcagaaacgccattttgcagtaggagctgtgagtaatccaacgaggtagagctgatgttcttgtactttcgaaattccagtgcaattaatggagctttgagtgagttgaccatgaatttagtttaactagtctgaagtgaaaaggctggagagcacagattagatcagtgttcacccaaacactaaacaataaggagttggccacctatgttgtagctgtttatttgggctaaatgacagtttaaatggtctaaattgccatttaaacaggataagtgtctgattaaatggacacgactagccactgctgcgtctaaatagcatttaaagggataaatggctgtttgggtggaacatcggagtcatttttgtagtagttcagtagaatttttctgtgctcatactgcacatggctaatgggtgccttgttattgttggcaacagtttttttgttttggatttttcttcagtgttcttaaattttgcctggacaacaaaatgtcggtttctccaagtatagttaatgcttagctcaattcagtttcaccactaacaattttgattggacaaatgtttgccgctgtatgtttctgctaatttatgcacagatgcaatcttgatgatccatctataaacaggttttgtgggctggatttgataaactggagcttcaaccatcatcattcaagcatgtcctgcttgttggttattcaaatgggtttcaagtgctcgatgttgaggatgctgcaaatgtttgcgagttggtctcaaaacgtgatggcccagttacgtttttacaaatgcaacccactccagttagctctgaaggcattgaaggattcagagcatcccatcccatgcttctagttgt

SEQ ID NO: 196925 - DNA, 540 bp, Zea Mays
gccagaaggggcacgcgggcggctgtagccagtgactcagagcaatggcgattagacaggctcgggggcagcgactcggaggcagaggactcggctggatctccgcgcatggccactgccgtcccggcccggaccagaggactcgcccttcatttgttgggggagagaatggaggttggagggaggggcagaacttcaatgcgggcagtgaaggccagaaggggcacgccggcggcgacggcggagaccgtggtgttctgtgcagtggctaaatttctatagtaaaagctgtgcaccatgctgtgcagggagtttgccacgtcacttctttcttctcagccgttggataccaaacggagtacacaaaattgtccacgtcgcctttcaatagagtccattggatgtgcagggagtttgccacgtcacttctttcttctcagccgttggataccaaacggagtacacaaaattgtccacgtcgcctttcaatagagtccattggatgccttttaaacggtgcgtactctgccttcttttttt

SEQ ID NO: 196926 - DNA, 364 bp, Zea Mays
atggagtgcgggttgattcgtgtaaagtgcggggtctctttaacaaaaatgcacggcgaaggggtatggagtattcagatccgtccgatccaaaacggaccgccctgatcagatcattccacgcaatgaaccagtgccaactacaggccgttggatcaagatccgagggcccaaattcatttctacatgagctaatctcggccctcgcccacggatccaacgattgctaacttttcccctttcctaaccatctgtggccgctcaaccaagtatcagcggcccaggggtcttcttcctcccacgacaccctctctcctccatcgaattctcatgccgcccagcccagtaccggtggcggcgccat

SEQ ID NO: 196927 - DNA, 651 bp, Zea Mays
acgccaggctgatcagggacgacctcaaccagtggcttgagctgcaggagctgacccagagcatcggcaatgtcatagcgtcgactgccagaagcacgccgtcgttggtgagggttaagtcggagcatggatacccggtgtccaagaagtgcagctatgtcagggagctgttggagagggatggggctcatcgagtcgtcctcatagtcggtctctctggtatcgggaagtcatgcctcgcacgacagattgcttctgatccgccacttagtttcgtggatggtgcgattgagattggttttgggaggtggtgcagcagggcagcatgtaatgggagcagaagcgaataccataaacgccttgctaggaagatctgcacgttccttgtgaagatcggctccatgactctcaaggaggagactggaatagatcttgatgatgtctgttgcttgctccagacggcattggtcggaagaagcatgctgatcctacttgatgatgtttgggagcaagacattgttgatcgcttcacaagactttatgataatgattgccggtatctcgtgacaacaagggatgaagctatctacgagatagcagaagctgaaaaggtagaaatatgtaaagacgacatcaaggagatcagcacgg

SEQ ID NO: 196928 - DNA, 425 bp, Zea Mays
agcaaatattttgggtcaaaagcagaaaaggactcagatgtccaaatggcagacgcctctggggggaagagtgcggctaaaagaaaacttcagaaatgcaacgatgaagtcaaggaggacagcaagccttttccagcaaagaaaatgtttgatgatgaagaagatgacgattttgtggcacctgcaaagaagaaaactccagtgaagccaccaccttcaaaaaagcttaaagttgaatctaatgttgaagcccctgcaaagactactggtgttgatgatgctgaggatgaggacaggatggatgaagatgccaagaccccctctaaaggagctggaaggggaaggggaagaggaggaagaggaggagcaggagctgcccctgggggcagaggtagaggaggtgggagaggttttatgaattttgg

SEQ ID NO: 196929 - DNA, 1217 bp, Zea Mays
cggaacactctcttgcagcttgtgccctgttggatcatcttcaaaggccagatgcagagccttcattgagattgccagtacgtttgcctcctaagacctgttatagtgctactatctccttttcataatgtggggcatgtattaacccaggatggtctccaaggctacactttgaccgttaatatctcttatgttatattgttaatgactatgagatcgatatcatatgaaagcactttcaaataaaatccacttatactgaatttgtatgttaaaatctacaaaattataattcttttcaaagattaagaagtttgcatcttggcttgtgtgctgcccttaaaaaaagaaaaaggagtatggttttggctaatttaattttttggacacttcagtaattttgttgtgtgaaagcatatagtttccgctatttttggaatgaatagctgatgtatctgcatttgtactgtatgtattgtgggtttgtggcttatatgattgtattagtggatatctatttgtgcttgattagaaactaatacctgatacgattcttttaaatttaattatggtaggtttttggtgctctttctgagttagaacttgaaagtgatatctggaaacaagcatctgttcatgcactcgaattattgtctgactcgaacgatgagcctcttgtagctgccattacttatgttcttaaggcggcatcacagtgtgagcatctttctgtagcggtatgtttcccagctatgcttcttgactttctgcttgctcagcatcttctcacttttcatgtcattaactgctttgttttttttatttccaaaggttagagctgttagatggagattgaaagatttgggaactgaagttccacattgtgtgcttgactttttatctaaaacaattcaaacccagctagatgtagctgaagctatattgaaggatattgattctgattgtgagcctgaaaacaattgcctagcatcaacatcaccttctagtacttgttctacagatgggctttcagctgaagggatgtattcttggcaagagcaagctgtgcatggaagaagtcatctatcagatgtttttgcactgatagaaatgttatcaatgcctggattatttgttgaagtcgcacaggttattgagagggctttattgcgagggtcctttggtctacaattagtagccatggtgctggaaagaag

SEQ ID NO: 196930 - DNA, 543 bp, Zea Mays
gggatcttgaagcacaaaagactacatctttttggtctcggcaacgtgcaaagcattgatgagtttgagaacttgggattatgcaggcatcagcagctcaactcactaagacttagtagctcctacatgaatggtaatgaagtggctaaatttatcccagatgacattgtacttgaaaagatcatacctccaaggaccctggaacactttgaacttttgggctatcatggttcagaatttcctgagtggatgctgaatctgacaaccattttgccaaaccttgtacaccttaagctttctggccttgctacatgtgaccatctgccgcctcttggccagctaccaaatttgcagtccctggtcatagaatgtataccaaatgtcaaggctgttggagaagtttttgctggtggcagcagagcgtttctgaaattaagggacctcactatcagtggtatgccaaacctagaaaggtggctgacaactctatcaactaccaatgaagaggcccatgtgtatgtgttccctaaccttcaccatctg

SEQ ID NO: 196931 - DNA, 456 bp, Zea Mays
gagttaaggtaagacaagacttgcaacgtgacaaaggaaaaggaaatgaacaagagcgggatagggaaaacaacactcggattgaaatggaacaaatgaggctttaaaaatgtgggtgagtgtcagggtaaatatggagagatgtcaagggtcaaggttgataacagacaaggctataagtgaagaggtaaatgtgcatcagaaccaaggatctaagtacaaccaagaatagagttaagctaagtcttgcaaatggtaaggaatgggatataaccacgggtgagataagcaagacgccactcttgaacgaagatggaagattggggattttagataacaggcatggagtaattaccaaggtaagatcaagagagaaaggtggaggcaataacaaacaaaagcacaacaaaggacgaagttacaaactcgcaagccaaagaagaggatacgaccaag

SEQ ID NO: 196932 - DNA, 594 bp, Zea Mays
cgaacctattccagatctcgtgccccttttcgcgagattactgaaccgcgtcttctcgcgaacaacatgctgctcgcgtcggcgatcctcctctatcctcgtctttcccttcggcgtccacctcgtcatcttgggcccacgggccggctctgatcgtcttcgtctaattttatctaaccctgtctaccacccatctaactctgtctaaccctatctcgtgcaacttgccgcgcagctgtctctctcgctcggccaagacaagagccgtcgtgaaattgacaaccacctctcgtgccctctcctttctatacataccctctcctttctatacaatcgtacaccctgccatgaaccccttccctcttccttctcacacatgagcagcccacgcgttttcctctctatgcattgtgccttcgtggtcttagggtccacctcgtcgtcttcctcgcgtcgtcggaggagcagccccatcgtcttcctcgcgtcgtcttcctcttctttgattgcctgctcggctggtcttcatgtgtaggtgacaaatcctctccttctccctcgtcttcgcatccttcttcctcgtcactacgcaaa

SEQ ID NO: 196933 - DNA, 277 bp, Zea Mays
gtcaaacctagaacattcaccccaattgtcggcaatggagaaagaactatgttctggaaagacaggtggctgaatgggaaaggtattgctgaaattgcccccaatctgcttcagatcataacaaggagagtggctaatagaagaacagtagcagctgcactaaataataggcaatgggtggctgacattagaggggcattaacagttcaagtgctggaagagtacatccagatatgggatcaagtagaggggatcatcctgcaacaaggtgtgcctg

SEQ ID NO: 196934 - DNA, 494 bp, Zea Mays
catgagttgggcatgataggcatccgtatctcaactgttcgttgcgatggctttatccgcacgcacgtactccctacttgatacttgataggtagtcagttcacaccagaaaaatccgtagctagctgttcttagacgcacgcaacactgacgtttcacacgatttggaaggatgatttgaaaacatcattatcgcaaatgtcgcgattggtattgtttgtatatataacttgctcaccgttgttgccaaattgctgctcatatcaccgactgtgcatctcgtcttctgacctttcgtgtggtgtgccacccaacaaaacagatcatgtacacgagccttgctccgcacggtcccctgaagctgtaccacttcgtcatcatggtggccgtggtgctggcctttctctcccagctaccgtctttccactcgctgcggcacatcaacttcgtctcgctgctcctgagcctgggctacacagtcctcgtggcagccg

SEQ ID NO: 196935 - DNA, 459 bp, Zea Mays
tccctctctccctcccttcctaggatcaacaggttctactctccaacttccaaactatgacgttgcagcctccagcggaacgagtggttcttcgactccggcgctaggactcatatgtcctctgatgtcggtattctctcccgatccacccctacacaacaaccttgttccattattgtcggtaacagaaactctattcctgtcacctccactagtcatactgttcttcacaactcccttcaccttaataatgttcttgttgcacctaaccttattaagaatcttatttctgtgcttcagcttacttccgacaataactgctctgttgaatttgaccctcttggttgttcggtgaaggatcttccctcacggagagatcgttcgttgtgacagttccggtccgctctactcgctacggtttccagcttccacctttcatgtcgctgtctctccatcatt

SEQ ID NO: 196936 - DNA, 277 bp, Zea Mays
agaatctccataatttggagtctctcacccttacacaatttgatcacaattaaaccacaagagtaagggagggaatagaaccacacacacgagacaaacttgcagcgactcacacacacaaaacgagagagaagagcacaaagacagcacaacggagttacagctcagcacaagtgcccaaatctcaatctgctaaagcaagggcatgaattcgatgcctcagcgttgttggatgttcaatgaaggtttggtgtactgctccatgcgcctagaggtc

SEQ ID NO: 196937 - DNA, 940 bp, Zea Mays
cacaaacccaacacaactccgccgtgtcgcctacacgcactggccacgaccaaaccctaggcgccgccgcccccggggcccccaggtacgcctctcgcctatccgccgccgtgattccgcctccgcgccgccgtcgtggcgctcagcgactgagagatacgcactagggttcgctgcgatttcgttggtaagggtgatttttatgttttatttttgttccggtgtgtgattggatcagggctgtcgtagggaggagaaggaggaggagatcggtgaggagagaaggggatttatgtcccagcgaggggacaggggcgaggggcacgccaggagacccggccggtccagcagcttcggcggccaccgcggaggcggagtcggtggcgcgggcaagggcggcgcgggctcctcaggccagcctcctctctcatccaaccgcaggtaaattactgccatatttgattgattgccctctgcctctgcttcgcacgattggttgatctcgccagggatgatagggttttgatgagaactttggatcttgattgcagctttagaaagcctggcaatggccacggcgggcaccagagggtggtgaaccagcccgacaccactggcttccagcctgcaccagcgcctggcacccaccaaactcctgcgcgcccgccacctgcgcctcagaatgcagccgtgcatgttcctgtctccgcatcacggccacaacaccagggtgagtgaggtgtcctgttccgctatcttgtactgtgtttggaatggtgccgtttggattgataaacatgatgtgttccttcgtttgattgcacatgtttttttttgattcaccagatccacatgtgtcatcttcattgtctgccagcgagaaaccggctaatccgccgttaccactaccgaaagctacacatgctgctccaagggctct

SEQ ID NO: 196938 - DNA, 400 bp, Zea Mays
tttgtttgttaaaacttataattgaattaatttgaagttcaaattcaaaagaataaagaatgggaaagaaaataggaaataataaagaaaaagggggaaacaagacctatttgggccgaatctaccgtggcccatcccatcggaacgaccaccacgcgcgctcctgtggccactgaacggtgggacccgcgggtcgggcgcttgacgttgtgcgcgcgaagacaatgacatatggggcccgattgtctgatgcgtctccttcaccgtaacaacccctccgcgtttgccgccgcacgccaccaaatcctagtgttccggtctcagcggttcctggaaagctgggtgaactccgggccgcgggcgtatcctacctcctggctgcgactcggactcgcggcta

SEQ ID NO: 196939 - DNA, 326 bp, Zea Mays
cctctggaagtctgctgccccttgcagcggttccatgacaagctaaaaaggcttgcaaggcaccttcaagcctggagtcagaaaaaagtgggcaacattaagcagcagattctgatggcaaatgagatccttcacaggctggaaatcgctcgtgacgtaaggaatttgtctccctctgaggaatggctacgtcgctcccttaagcaccactctttggctttagcctccttggaaagaactgttgcccaagtaagaagtggactgcactggctgaaagaaggagatgccaacactgcctattttcatcaccacgccagacacaggaa

SEQ ID NO: 196940 - DNA, 415 bp, Zea Mays
atttaatgtctatttggattttaaggagtctggtctaaaggcagatgttgttctgttcagctcttttattgatactttggccaagaatggcttggttgagtgtgctttgtctttgcttgatgagatgatgaagatgggtatcaagccaaatgttgtaacctacaacacaatcattgatgcatttggcaagtcgaagatttttactgaggaggattctgatattggtgacatgggaattgttggggtttatggtggccaggttgtaagggtcactaatccagtgataagaggagggcgctctgccactgatgttaggatgaggaggtcacaggaactatttttcattctggaattgtttcagaagatggtccagcagggtgtacggccaaatgttgtaacattttctgcgatcctg

SEQ ID NO: 196941 - DNA, 1206 bp, Zea Mays
cgttcgatctttggtcagatcgtgggagcctttttgcgtaatttgcgagggcagccctctagcccttgcacggagcaataggtcgatcgagggatgtctcaactattggttcatacgccccttcgtcgcctctctgcgaggaggaagagggggaatgtgtcatgctaccctcgatgggcaacgagcatgacgtttccatcaagctactaacaggtgatccgagcgggggtccaagctcctttcgattggagttagcttgaggtccagagacacgtcccaaaggcacctgcgggtgatttgcctggccccagacccgttcgatgggatccgagggctcgatgcctccctacgatgggataccgtcacgaatcgctcccgtgggttctcggatatgtcttaaggtacctcgggtctcagcccgagctagggccgtgtacgggcgtacctatagccatccctgactctgtgctctggacggttttggagccctttcaaggggccaaccttcgaacccctgatcagtattgggctcggagccctgaagtcctgaggtggttcgtctgaaccctgttgtgggccgagcctttgaacctctgaacccaagcgacagaccgaggtagaagacgactttttctgattcgctgctcctttcccgagggggttgcccgaggcagaagacacttctttccagttcggttgtcgagaggataaagggcagtgtagtcgacgggagagggcgtaccctttgaggcgggatgaggaacgacactcgacgtgtttttcctcggaggggacacgatcatttaatgcgacgagacatcctgcctgtcagccgaccgttcgcagcacgcgtgcgcgtgggattcgaaacggccgtcatccaaccgtattcgaatcacaccttggtggctccgtccgtcctataaagctgtccgagagggagggcttcggaccgttacctttacagtcttagttctttgccttctaacgccgtttccaccttctgcccaaagagcccttcgtctttttctcgcccattcgttcgtttcgatggcggaaaagatcaccatctttcctccccgcgacctgtggcccatgtcttcagtcaccgatgcagatctggaggcgctggttgacgccggcttgctctggtcccgaaccaccggcccgcagccctcgagtggatcgcgtcgtacgacgagcagg

SEQ ID NO: 196942 - DNA, 1737 bp, Zea Mays
gctcttgatacagattgccttgagctattatctgaacagccaagaatactgttttgcttagatcagccaaatgaaaagaacatgcatgatcaggttgattcttctaaaccagtttccaatggaaacacacatgggggaagcacctttagacaatctcagcaaagggaaaacgtttgtaattcattgatggcagttcctccctgccatgtagttgcaaagaagtactccaggtctgttgctactgctctgagtctgggatctgattctgatattttgcacaacggtgacaagcttccaaaaaggaattctagaaagagaggaaaacagtgcaagcgaacaatccgcaaaaggctgaatttggcatcagaaaccatttttgaagagagtacttatggtgcttctcctgcggaggtagttccgaccaatttactggttgataagttgtcagagaccacatcctctgctagctcattggttaaaactgatggtcggtacaaggaggaccatgtggaatgtggtattatgttgaatttagctacattgggaactgatgagatggatggttctggatgtgctggttcatcttataatgatgcaggagggagattaagctccagttgtgtttcttacttgaatgacaaatccaatacgacagattcttcagaatttgacggatccaccttcactgaacatggcttgggagaagaaagcaatagctaccagaagttaacatgcccctatgtttataatcccagttatgcaaccatggattccatctttagtaggtggaacagcgacaacagtgggaactacagtgtcgatgttgaggctaggttaaccgtcaaagacgaaaatagacatgatcattcgaaactgggggcttccacagggcggagtaatgtgaggatggaatgccagttgatagggtcatgttttagtgctactcatgctgaagacacaaacgatcctctagggatcagatcatactcctctaaggatgttactgatagttgtagccatactgaaatggttcagtgcagcagcaagtcctttcattttaaatcagggaggaggaacataaaatcaagtaaaacaccaagctatgttgatttgactgcgtctaacagagtgagaggttctaataggcacaagaacaatggaaaagatagttcagcagtgtggcagaaagtagaaaggaatgacaagatggtatctaaagcaggccatccgagcgatacacctgttcatgataagggtgcaaatgaagttggtaagaagggtgtacaggaagatccaacaagaattcgggcaaaacataatccgaataagaaagtgtgcaaacagaagccttcaaatggagcagttgaattggagcctgccaaaggagaagatgcattgaactcatgccatacattttctggacctttctacacgaagcaagcaccctttctacgccagcaaagaaactctttttcgaaacaaggttctcagtcattgaaaaactactgtgctcctaggaatggtatccccaaggtggcaaaggattacttgcagcaagaagaattacctatgttggtgctagttcatgccaagaacaccagtgataaatcaagctcatattcaagttcagctgatgaagttggtctaactggagtcagcaacaactatccaactgagggaaatgagagttcacaacctgatattgaggtagcagcgtcagtatcttgcaacttggtt

SEQ ID NO: 196943 - DNA, 558 bp, Zea Mays
catttaggtacttgataggataaactccttggttgagcaagaaaggtctattatggtcaatgagtgtggtcttgttgatggaaatcctgtagttatcaaagcccaccctaagtttcgaatgtttttgacagtaaattcaaactatggtgaagtttcaagagccatgcgaaacagaggagtggagatctttctgatggaccaaagttggaatctgaaaggatttagcaatgtacctggggacagtgaacggaaggatgtgataagatttttaatttcttgcggaatacccagaatggaactggtctcgtcaatgtgtgaagcacacatgtacgcaaaaggtgaaggttcacgtgttggtgtgaacattacccttcttgaaatcacgcgctgggttcagttgttccaacaactgattgttaaaggaaatcagttcctttggagcctgcatttgagctgggaacacacatatctaccatgtttgggtgaaattaatggatctggcattgtggaggaaggaaaaaataagtttttgactaattttgacagatctgaaatttt

SEQ ID NO: 196944 - DNA, 703 bp, Zea Mays
tcccttattcgtctgactacaaaaagttgtaccggacattgtggtctttatttcctcctgatttatttgccaaagccctcaacattctaggcaaggcaacagccactcctgaggataaaggttttagctggaatcagcgtggggagtgcccatcttttgagactgactgtgtcattactattgtacgtgcaaaactttgcttattaaattttatgtcttttagtgactagatttcaatcacttattgtttgcaaaatatcttacaggatgatatatataagtggctcatatccacatttttcttgtggtttgtccttgcgatatactttgacaacatacttccaaatgtaaacggcgttcggaagtcagttttctactttcttatgccttcatactggacgggtaaaggaggcaagatggaaggttagatattgaagtatttgatagctactcacattgtttccgctgtcgtatcttacactgcccattaatctttattccagagggaggcctctttagcttttttggttcaagccgtcctgcagatgatgctacccctactgacgaggatgtccttgcggagcaaaacctagtaaaggaacaagctgcaaacaatgcggtagatcctaatgttgcagttcaaatacatggtctacgtaagacatatccaggaactttcagcattggatgttgttgcaaatgc

SEQ ID NO: 196945 - DNA, 500 bp, Zea Mays
aaacataggcagtatccaaatcccgtggtcgttgaaccataacaactgaacgaatgtcatcccagagaccatccaagaatcgcatgatgtaatacaatggatctgaattgggactgtatgcatgcaactgatctatgagctgggaaaatcgatcgacataatcagacactgtggtggtttgcctgacatggaacaactgcctaataagaacttcatgctggtccttgcgaaatctatccatgaccatgtgaccaaactgttcccaagatattctactcaaatgacattctaccgattggagccatcgtgctgcagaccccgtaaaatgcatgcgagcaatcctaatccacacactagtgtcaacagaatacatggtgaaataatcttgacatcgtgtctgccatagtttaggattttccccatcgaaccccggaaatggaaccttaggtatgttacccagaggtcggtcgaattgagaatgtggatgacttccaaaagca

SEQ ID NO: 196946 - DNA, 690 bp, Zea Mays
cctcctatgatcaccttcgtgtcttcgggtgtgcttgctatcccaacctctcgaccactgctccccacaagtttgcaccccgctcgtctcgttgtgacttccatgggtactctcctgatcataagaggtatcaatgttatgatctctcctctcgtcttgtcattatctctcgccatgtccttttcgataagtcctgcttcactttcgctaccactgcttccacctcgagctctgacttggcaagtttatttgatgctgaccttgtggctcctcctgtccagccacctttgtttctcccccctgcaggtcactcaccaaccgccccgttgtcgccgctcatgcatcctggggtacatgaggcctcttcggccccgtctgtcgtgccccgcacggccccggtctctcctgctgtccctcctatggccccagactcccctgttgcgccacctgtggctgcagagccctctgctgtgccgcgcacggatgcggtgctcccacctcgcccaggcctggaccccccttgctttgtgcgcgtctaccaacgatgcccgcggatcgagctaccaccttctccgacagcgcctccccctccgttggtgcctcgccgcttcgtcgagcccatgcacgtctactagcgtcgtgcttgtgagggtgcaccgaccagttccctcgccgagccgtcggtgtccc

SEQ ID NO: 196947 - DNA, 524 bp, Zea Mays
tcttcgtcgcgccgcactcgcacaacgaccccgggtggatccgcaccgtcgaggagtactaccagcgccagtcgcgccacatcctcgataccatcgtcgagtccctctccaaggtcttcctagtgttctcgccactccagatttgctttcgggcgttggtgctcttctccttttgaccatcgtcaggattctgctatggtataggattcgcggaggaagttcatatgggaggagatgtcatacctggagagatggtggcgcgacgcgccgcccaaaaagcaagaggcactggctaagcttgtccgtgataggcagctcgaaatcgtgagtggtggatgggtcatgaacgatgaggtgagaaggaagcaaaactttgtggtttagatgaggcttaaggagtaagccgtagcttctgtttccttgcttgtgttttccattgccatgctaatatgccatgcgtcatcatctgtcttggacatgaatgaaatggaatttcatttcacattttattacctggttgtcta

SEQ ID NO: 196948 - DNA, 345 bp, Zea Mays
ggcatcgttagcgagcatccaagtcattgatctcacctacaacaatctgtcaggcaccgtgcccagctccatcttcaacctctcctcgcttatatacctgggcttgggagacaacggttttgtaggggagctgccggcgacgatgggcaaccgtctcccaaacatccagggtcttatactgtcggcgaataatttctacggagagatccccaaatcgatagcaaatgccaccaaccttgtggacatatacatgcaggagaactcgctcggcggagtcatcccctccctgggaaccctacgaagcctgcagaccttgttcctgtacaacaacaagaagctggaagc

SEQ ID NO: 196949 - DNA, 458 bp, Zea Mays
gtagaatccagcttcttatagtccttggtccgggaaccatcgacgatctcctcctgcaactgagcaagaacgtaggcagtatccaaatcttttggccgttgaatcataacagtggatttaatatcaaaacgaaggccatctagaaatcgcatggtgtaatacagtgggtctgacatttcctggtaactattgagctgatcgaccaaatgagcaaaacgttccacatattcccccaccgacccttgctgccggatatgaaataattgacgcactaggctagcatgctgatctttcccaaatctctcacggatcaagttcccaaactctagccaagacaaactagcaagcttatgctcaactgaatttaaccaacgtgcagccgccccagcgaagtgcatggttgcaactttaacccacacacaagggtgcacagcgtacatgtcaaagtagtcttcaca

SEQ ID NO: 196950 - DNA, 846 bp, Zea Mays
gcagccacatgaagtcgttgtggttgcccaccagcagtaggatgcagcgccatcctccatgcgtagccaaagtgattggcccacatagatcatcgtggacaaacttaaggatatcactgatgcaatagttgcccagtttcagaaatgggggcctcctctgcttccctgtcaggcagttattacgaagctcgccagcgcgcttgatgacaaagagattgtgcaccatctcctggcatgtcaggctcccaaactcattgaagttgaagtgcacatatcaagtgtgcccacctcctcactttgcctcatggccaagcacatcgattgtgctagcttgagatacagcatggttctcaaatcgcttcaccttagcaagaaggtggcgttagcggtcgcgaatgtgtaggtcgttgttgttgatgaggacttggcacccacgctcatccagttgcacgatgttgaccgaagcctcaggttgttgtacacatccatcagcgcttgatgctcatcattctagcacttgatgatggtgtcacggccacggatgtccacccacaagttgtcaccgaacttcacagagccaaccacactgacatctagcttcgcaaacgcgtccttgttgtcgggttatgtggttgctagccccagtcaggtaccacctctactccatgtcgccgccaccactcctgaggtgaacctagacccgagattcgtcgagggagatgctctactttgcacttgactccaactcttcaaccacatcattcagcacacacacttgctccattagaagcattggtttgttgtcttcagcctacatggtgcacctactcctttccttctttcttg

SEQ ID NO: 196951 - DNA, 412 bp, Zea Mays
gcgacgcttcgtcccacggctttggggcggtgctggtccaggacagccaccccgtggccttcttcagtcggcccgtggcgcctcgtcaccgcgctctcgccgcctatgagcgagagctgatcggcctagtccaggcaatccgccattggaggccctacctctgggggcgccgtttcgaagtcaagaccgatcactacagcctcaagtacttgctggatcagaggctgtccaccataccacaacaccactgggtgggcaaacttctcggcttcgacttctccgtcgagtacaagccgggacacaccaatgccgtcgcggacgcgctctcacgccgcgacacaccggaggagggcttggtgctggccttgtccggaccacgcttcgacttcatagatcggctccgtcaggcaca

SEQ ID NO: 196952 - DNA, 427 bp, Zea Mays
gggagcgactgggcgtgagcaggaagaagctcggctggagaggggcgagcaaaaaggaaatgaagaggacgctcggccatggaggaaactagagatccgagcaggggaagcaggaagggcgcggcttgagagcagcttggaggagcgctgcgattgagagctggggcacgacatgggaaagcaggggcgcgccagggaagaagttgcgcgcgggtggggaagaatcaggggcgagcttgtcgcggccaacaggaagcagtgtgcgcggcgatgggagcggcttcatgacgagggcgtacagagcacagggagatgggcgccatccgagccaggggcgagctcggggcagggaggaccgccgcgatggggaggaagaaaagcgcggtgtggaggcgagctgccgtgggctgctcagcgtggagatgac

SEQ ID NO: 196953 - DNA, 486 bp, Zea Mays
gctggtgtgggtggattggaatcctcagaaaagggaaacaaggtttcataaaaaaccacatgacgggagataatggtgcgattggattggcgatcaaagcataggtagcctttgtggtggggggaatagccaaggaagacacaaagggttgagcgaggggataatttatgtggagtggtggcagaaaggttggggttgcatttgcagccaaaaacgcgaaggtgctcataggatgggttgcagccgaagagagcaaagtgtggtgtagagagtgcgagtgttttggtgggtaatatgttgaggagatatgttgcggtgccaagagctgcagcccaaaaactggggggaacactagattgaatgaggagggtgcgaatgatattgttgatggaacggatgacacgttcagccttaccattttgagctgaagtgtaggggcaagacatgcgtagatggactccatgggaggagaaaaaggtgtgggct

SEQ ID NO: 196954 - DNA, 320 bp, Zea Mays
cttaggagttctagacttgggaggtgactgaacttggacaacaacttcaagatggacaacaccttcaacgaggggaacaacaactcctacttcatggacagcaggttcaacttggggacaaacaccaccttcaacatggacaacaccttcaacatggggaataacagcttctgcatcatggacaacagcttcaacttggggaaaaacaccaccttcaacatggatatcagcttcaacttggggaaaaacaactccatcatggacagcaccttcaacttgggggaaaatagttttgtcaacatggacaacagcatcagcat

SEQ ID NO: 196955 - DNA, 1426 bp, Zea Mays
ctccgccggtgtccactccggagccggtgtccactccagcagcagctccctcaggtggggcgtcactctaccttcctcaggcgggacgtccgaagcttcggcggtggattgacacctcccctgcctcgtcgtcgggggggtcctgtcagggaggccttggcactcgctgctcctcatcacctacccaggctccgacaacctttcttgaggcggttatcaagggacccatcaaggcagcctgtcccccgtcggtgcagaaattcccggaggttcacggcttaaagctagaggctttacgtcagtcctctgctccagaagccgggcgctgtcctgctactcaatacagcagggacgaagaagggtggcagctcgtggaacgcaggcggtctcggcaggttgagcgtgagcctcgtcgtaggtcccctgtggatctccgaggcaagtgctataagtgcctgtcgacctctcacttcgtggcggcgtgccgtagaccccctcgctgttttgggtgcctacatcttggccatcgcgtggcacagtgtcctacacacttcaagaaagagaagaagccgctcaaggagagactgggttcgcgggcgcctcgcacctcggtttggcagcgtattatcatggaagacggtggccgggccttgactccaactcaggcgaatccaactcagttgattccaacgaagcttccggtctggcgtcgtctctcccctccagtgtcttcagaggtaccccctcctctggccatggcggttggcagtgacataccccataagagaaaaaggcgtcgcggaaaagggggtcgggcagacccgcaagtgaagcatccctcaggatcagctggagaagacgacgctcatccggcaacggccactcacaacatggttgccaggccttcttgtgtattggatttttcctccgacatggcacgagaagaggcggcgcttcgccgcgctttgtttgtcacgatcattggtacaaggccagaggtgttaggctctgaagtcattgaagaagtggcacgaagttttgagatcgaggcagattccatgtccattcatcagaccttcccggaggatttcatcctgattctctcggatgaggatgctgcaacaaaggtgctcaatggaggaagagttctcagagggcctcagtttcatattcagttcaagcgctggacaaggctggctcatgcaacggcagctgcattgccgtcgctggtcgacatcgagatacaagggattccgttgcacgcttgggggcggtccacagctgaacagctacttggtaattcctgttggatcatagatgtgcacccggatacttccctgaaaagtgatttttcagccttcaggcttcgggcttggtgttgcgagttagagaagcttcaacgtgccatgaatctggtcattgctga

SEQ ID NO: 196956 - DNA, 547 bp, Zea Mays
cctcaacaagagtggcattttgatactggtgcctccagtcacatgacatccggcgctggtataatatctcatccctcttcttcccagcatcttcctacccatattatcgttggcaatggtcatctcatccctgtcacctccactggcaccacccaccttccctataatctttctcttcacaatgttttagttccccctccctcattaaggatctgatttatgtccgtcaatttaccactgataataattgctctgttgaatttgatccttttggttattctgtgaatgatctacccactcggcgcgagatcttcagatgtaacagctctggtccgttgtaccccctgcgattcccggcttctgctctccttgcatctaccttatggcaccaatgacttggacatcccggtcatgtcgttttatctcatttagcgcagtcatctgcaatttcttgtaataaaaatactagtactcatccatgtcatgcttgtcaactcggacgccatgttcgtataccatttcctacctcttcctcccgcgccacatg

SEQ ID NO: 196957 - DNA, 410 bp, Zea Mays
gtcgttatcgaaatgataaacaaggccatgtaccttcaggcgatgcgcatcatcctcgtattcgaattccaggaagctttccctcttgcaccaacactcgctctcatcatcgagaaacttgagcacgacacgaaagacgagaacgaggggcaggcatcggtatgtttctcatctttcctgccctgcaccacatttgtcaaagaagcagacttacattggtgcatggttctgcaccaggagcgcgatgaggacgacttggctcttttgagttcaatatccaaatgcatggaggatcacaagctatctccctcagaattcactacctttgctgccaagattgcgctgctggaagagcgtgttgggaaggcaagacgacaagcctgtagtacaggagctaagcggaagagacc

SEQ ID NO: 196958 - DNA, 450 bp, Zea Mays
cgaccagccatcaatcttgagtgctcagactgcatccatctgtttcttcggctcgattctggatcaccccatcgtaaatcctctctgtgattccgatgatgaatcaccaaatcctctgagtccatgtcttgagccatttgctccaatctcagttacacaaccaccttccccgtctgatccagttgctgtaccaactggattctctcctccacggccttctaggctacgatcacggccatgtccgcttgccctaacagctgctgctggatgtcttccatgtctgcaaccttctctgtcaatacctccaacttcgccatcaacttctcccatcaatcaccttcctccttcgacttgcccgccatcacctccagtaggaactgggtctgcaccgatggtttcgctgctggcgccatgatctcccttctcctggaacaccgcagcaaggttgca

SEQ ID NO: 196959 - DNA, 527 bp, Zea Mays
ttgtagtactgaactgaacactaatttcctttttttgtaacattgacagcaatatcattcaatgcatgtgacaacgatgagttcaagcaaatgtgtgaagcaattggataatttgggcctagaattgaacctccaactatgtttgacctgcgagggagattgttggaagaagaatatgcaagaaccaagagtttgctgcaagaacgtgaagccgagaagatgaagaatgggtgctctattatgaccaaagtttggtcagataagaggagaagcataatgaatgtgtgcgctaattgtgctgatggaaccagttttatttcctcaaaagagatgtcagatgtatcacacacaagtgaagtgatctttgaactagtggacaaagcaatcgaaggcattggtccaaatgatgtggtgcaagttgtgactgacaatgcttctaacaacatgggagcaaagaagctactgcatgtgaagagaccacatatcttttggacctcttgtgcaactcacacaattaacttgatgct

SEQ ID NO: 196960 - DNA, 468 bp, Zea Mays
aacaggatatacaaaataacaggcagaggtacaagtcactaatcaacagtcggcttaggattagagcagcaacaaccgttagtgtttgatcactggtgggagacacagacagaacagaactagaacataactatagagatgggggagagggagcagggggaaccttgagatgacaagctcatctcgtcactgatgctagagacgctggtgatctggagtagccgtcacccaccggtgatctggactctagagttctgaactgtagctgtggagcaggctagcaggcagaggggcacatgtgactggagcaggcgagcacctgccggtgatcgggagttcgggcagaggggatcactagtgctggagagtggagacgccggtgatctggacctctggagcagccgccgacagagggatacatgcaaggtttaggcagcgttagggttttagcagaggagaggagaggca

SEQ ID NO: 196961 - DNA, 378 bp, Zea Mays
gtgagagacctgtccaaacataggttaacgttgtaaggcacattttttaaaccatgcaaaaagttggaatataaataattcaatacaatagataaccttttaaactacaaatgacgtttccctgatgtcaagggcattgtattagcacgagagggtattagagtacaactagtggatgaagacgtcattgggctagctaatgaccttttgtgattctaggtttcctataatcccctctaggtttcctataatcccttctactcaatatgccacatcgtttctcaaaataaaataaagaccatggaaaatttagccaaattgcatgagtgaattgtccaaacataggttatggttgtaaggcaccttttttccaccata

SEQ ID NO: 196962 - DNA, 387 bp, Zea Mays
cgctgatgttaatactgagttctccataagggattccttgcattcagaccttggagttgggctaggacattcacgctctatatctttattatcagaagatacagtgaaaatgtgaggctggttaagtgaagcattcgatgcgtccgcttcatttggtctttgctgcttcacaaactcctccattttgcatgtatcagaagcggatgcagaagatcttgcaagaatttcaggcgtcgctggtgttaatactgagttctccataagagattccttgcattcagaccttggagttgggctaggacattcgcgctctatatctttattatcagaagatatagcgaaaatgtgaggctggttaagtgaagcattcgatgcatctgcttcaat

SEQ ID NO: 196963 - DNA, 565 bp, Zea Mays
ctaagccctccagcaagtcacagatatccaaaacctgtgcaagcgccctaactgaaagcgcaccccttatatcagccacccaattcagatttgttagagcatcttttaccagccttttggaagcgacacgcttagggacatgctcaaggacctcaggtgccatctcgccgatgcatctaccattcagccaccgatccttccaaaaaaggatgtcatgcccatcacccaattgagacacaactgccacattgatcaaggcttccaccgctccacaggcctgaacagggaggaccgaccaaggcttagagtgatcggttctttgagccaaggccacctagctcgaagcgacacgctcaaaagccgaagatcagtgatcccgagcccgcctagatctttaggcctagtaaccttaccccacgccactaaacagtgaccaccattggcttgttttcttcctttccaaaggaaacctcttcttatcttgtcaatagctttgatggtccaattagggaggtccaaagccatcgcagcataaatcatttttgttgtgagaacaaattgaaca

SEQ ID NO: 196964 - DNA, 321 bp, Zea Mays
tttaaactttacaggttcctagtgctgtaattgcactggtgtcatctatcttgcgaaagggagaagatgatctagctcagctatatgccttacggacagtcgataatatatgtagccaaggaactgaatggacatcccgttttgcatctcaggatgcgattggacatctgtgctacatctataaagcaactggaaagcaggagagtacgaggctcattgcaggatcttgtttggcccgtctctctcgcttcagtccatcatgcattcatttaatattggaaaagatatcattcaaggatatagcatgcacacttatcaagg

SEQ ID NO: 196965 - DNA, 376 bp, Zea Mays
gaattctgctacaacacgtcgttccagacagcactgcacaccactccattcaatgtggtctacgggtgcgaccctcttactctactgtcctatgagcagggccaatccagggtgccagctgtggacactcaactggtggaatgagattccttccttgcagagataaaaggagaggttgctgcacgcccaggaaattatgaagagaaactatgatgcacactgacaccatcgtcatgtggagtttcaggtgggtgcctgggtgtggctgcgcctacatcattgcatcgcagccaccctcactgataaagctaaggggaagttagctccaaaatattatggacctttcagagtgctggaatgcattggtactgtggcg

SEQ ID NO: 196966 - DNA, 842 bp, Zea Mays
acccgaccagacagacagcgactgcaaacaaaaccagagacgttgcgagcatgtggtgcaggagaaacaatttctctccccgccgtccctgtctccctgacaagtacgattccgccacctaatcctctgtatgtaaatgtaatcaagccccacgctccccatggttctcttccaaccccaattaatcctaggcaggcaaagctcgttttttcttgtgcgccggttgattgggctctctgtttgcggagtcttgctctccctctggtcggttttcgttgatccctcctgcattggtttgctccggctcagatccgattctctaggtttgtatcctttcctttagttctgttttggatcctcccttcgtcaagttttccggcggtgacggtgagggagaagtgggttggcaatttgacgaagacacggccgcccaccgccgtggggtcatccattagtgcgacgtccgacgtcgccatgggtgatccggctgctcgagcttgctcaggtttccttttaggggctattttggatcgaagatcgtttcttggcggaaaactcccagatttacagaagctcacctattgcccctttaatattttttccagttccagatttcccagtagcccccttcaaatctttgatcggggttgggtgcaaagcaacgttatttctgcttcattcatgtgcggtctttacgagttcaattctgctgccccttcaagatttgcccttgcgtcctcctcatctttatctcttttatatatatggtgtttgcaggaagagagaccaaagtatcaagtggaacaacagaattttaggtactgccgtgccgctcaacaagg

SEQ ID NO: 196967 - DNA, 736 bp, Zea Mays
atttttaccgcacctctctctttctctctcctccggtcctccctcaaccccagcagcttcgtctcccctcccctctccccagaaatcggaactagatagatagatcagccctatctttgcctcctcccggacgactcggcgcaaggtcgcagcttttctctcgatctttcgcgcttcctctttttgacgcttgctccgcatggggttcctggagatctttggggcggttcgctgctgagatggttcgccgcatcacgcgctgctgtgactctcaacaggtgggcttccgtagactttccactttcttactccgatctactgtacggagcagccggggagtagtattcactaaccttctctgccggctgagagcgtgagctcggtggaggagtcctgatctagccaaagattggatttttgtggggttgattcgaggtgttttttttcttgcgcgatttggtggtgtgggcttccttcctttcattttcgtagcatctatctttatattccttccgatttcgtgtcacttctagtccatatctcgcactagtgatgacttgcttgactagtttcttgactggtttcctctgtttatcatcgtcgcttcagttcttccgatccgacgagccccggtgatggacggcacgccgatctctgcgtcctctacggcaggcgtcgacgttggcgcggtggcgaccggcacgcccatgaagaatgcgatgacggcggccgctgt

SEQ ID NO: 196968 - DNA, 395 bp, Zea Mays
aaagcctaaaggggcgccccctaatgggctctaaaggaacaacctacaacctaggttggatggctcgacttcccctagactactctgatctgcttgcttcgtatctcactagctcatttgaaagtagactttctgatctttccaacatgtccttaatcaccttctttgcatctcgtatgatgaagttatggtcacattgatgagtttattgttgttggtttcgggaagagcggggaacatcagtgcattggaacttggacttaatgatgcttgctagccaatcttgaccctcctttatcctttgtccgcaaccatcttcatcctctccatcattccttaagatgatcatcacaagactttagtagcatccaatcttgaggtgaggttacattgtt

SEQ ID NO: 196969 - DNA, 881 bp, Zea Mays
gtagacaataacttacaaacatcataggaggcatgcaagaaagtagagttagtaatagctaataagctccagcaatacctctttcctttaagatgttcctgaagcttcttcactgcatcctcgaggactctctctgaggcattacatatcttgttggcaagattaagaacactaaaatcatctgacacagttacccactttagtagatggaaatgctccttgacctcagggtccttgtagatgagctgagcgagggtggtcttgcctagtcctggcattccaacaatgggaacgaccatgagatcacgactgttaacatggccattgaccaatatgttaacaattttcttcctctcatcgtctctagacctggcaacaatattttcaggatcaacgataatggaatccatctcacgcaactccttccgtgccgttgttgcctcgggctcaagcttgttgaatctaaaggtgtccatttcttttataaggtccttgaaggtgtcaacaactctgcgaagcctatagcccatcctgatatggaaggcaacacgattgtgggtagggaagagttttacactggtcataacgccaagctcggcgatgtgcccattcttcttggctcgacggcggagcgcctcgtactcgaagtcgtcgaagacctcgttcgcctcgtacaccgctgtcttgagctgctcgagccatttctccacgccgcggcgagatgcctgcctctcggcgtcggtgatgactttgaggatgggaggcagccagcgcacgagggtctcgtggtgcttctccataccctccatcacgttgtactggtcgaggagagagctggacgccttctccttcaaccgggacaccagtggggcgaccaccag

SEQ ID NO: 196970 - DNA, 1211 bp, Zea Mays
aagcttctgataggaaccagaaggctggtagcaacgtgctagcactagaaagcaggtgggtgcttcctttgaccatggaaatttgttgtttaggaccaggtttggtcaaatcttagaaactaaaacaccaataactactatattatttcgtttgaaaacaagttatatgtgaagatttgcattcaaggttttgacaaaatctctaaattcaaaggattttaaaaatatattctagataaatataatggtcaaagatacccattcaagaccacgcaaaatcaaatggcttgactatttttgaccagaggtagtgcccatttattttgatgagttccattgttgaagaatgcattgattaattggtctactcctttttccagtgaacgtgcattattaaatcgcttgatgattgagctgagcaaacttgattgtgatgtacttgtgggacacaatatttcagggttcgacttggatgtgcttctacaccgtgctcaggtctttttaatcattatgtgctttgttgcttcctatgtttaacctgtagcacactactcttcttgagttcataaatttgtgagttttgtttataaattatttaggttttttgttctaggtaggttcaagggaacttgcattacaaatttctgactatcattttcttatttaatcatctgctagacatgcaaagtgccaagcagcatgtggtccaagattggtcgtctcaggcgatcattaatgcccaggcttaccaaaggaagcacactctatggttctggagcaagtccaggaattatgtcctgtgttgctggccgtcttctctgtgacacctatttatgctctcgtgaccttctgaaggaggtaacctgcagtgcgattatttttttaataatggaaggcaactaaccatacaatttttaaatataatttcagttaccaaattcagcgtttaattctgttccatgcaggtgagttattccttgacacaacttgcagaaacacagttaaaaaaggtcaggaaggaggtttctccacacgatatacctatgatgttccagtcttcaggcgaactgctcaaactggtaatttcattcaaacaaaatattgtgctgcttttctctaacagaatgtcttctatttttctcataagttatgaaactaattgcaaaattgtggcactcacctaggttgaatatggtgagacagatgcatgg

SEQ ID NO: 196971 - DNA, 482 bp, Zea Mays
tacttggactagaactacgatcaggtcttgctctctcagtcagagaatccagacgcccactgcctgaagatttttccaaatgcacacgttgatcacgtgtgcttggaggctttaaatcatattggtcatcattttcctcaggaggtcgttttttccctctactttccttgtacctattgttgtaatcctcataatgatcaacatcttgaactgcatcctttctgtaatggctctctgagcttctgcgtccatctttagcactcttatattcagctctatcactttcatgactacgggccactcgctcattagaaaacttgtcgtcatgttgcctcttatcccttacgtaatcatccttgtacttttccttatacttgtcgtcatcaaacctttgttccttagagctcctagatttaccatgttcatatctggacagggtctttctgtcatcactgtctctattgtcagtggaccacttatct

SEQ ID NO: 196972 - DNA, 571 bp, Zea Mays
gccaatatatttggcttgctccgaggccgggactgacgctggaaagtgactaccatcaattgctcctatgcaatccttgaagtggggccaaaatctcgcctctcgcaaacgaggatgaatctcgatgaaatttgggtctttgggcttgattatgtcagatgacatcttatacagtgcattaaggacttcactatacttgcgactaatagtttccaaggagtgaccaaacttattccttatctgcctaaatgattgtggacccccacatgcccacaagaaaatgcctagagcttccatagtactgacaccccagcttggaagcagaccataattttccaccaacgtatcatgcaatcgtctaaaaacagtacgtcgcatgcgaaacatgttgaagcagtcgttactattctccaaagttctctcaacccattgaataccagtttcaaccattgttcttctaggaacctcactgaaaggcctgccccaaatgtctacagcatatagagcaacaagtaattctgcatctctgtcatccatgtcatgatcatttgtgtgtgcaccagggtcacac

SEQ ID NO: 196973 - DNA, 507 bp, Zea Mays
ggtgatcacaacacctagctgggggaaggccactaggtgtctcaaacacttcgtgaagttgctgtagcagacattccatcataggtttgggctctgctttgagtgaccggactgcaggtctcatggaaatgtcccagcgctgtgaacccagtcccgtctagagaatacactgttgtgggggacagatatccggcgcataggggtccggcggcggacgcacgacaggatgttggctccaggcgtgaggcgtctgggtggctgcaggctgcctggggattgaccgattgaggttgagggggatggctggatggggaattagggattagggtgggctggtggcttggtgctttggtgggctggcgcctgggctcaatggacaatggtggactggtcatttgttcattagtgtccatgtgtgggccgacaataatggactaatggtaaatttcggatatccaacggattacccacgggtgagatttaatatccaaatccatgcccacttta

SEQ ID NO: 196974 - DNA, 2746 bp, Zea Mays
agatcggcagacggaagcagttgacgccacagggcttcgtgctgccgaattccccagatattctgggggttcaaccgaacccccatgcccgacaacactgtgagttgcttcctgtatcctgtcccaaatttccctgggaattacgcttcttttgttggggctatgtttttgcttgcttgcttctttcttcggtaggattgctggtgcggagtctttgcttcggactggggttttccgcttcctatatgggagacgaattaaagtagtcagccgtgctccattttgttgcccgttatgttttgcattgttcggaattccttaatcatgtatgagtaggtttaaagtagggtttatggcagaccatgctgttagttggtttgccatttcatgaactctagatgggggaaacagtggagtttgatcatctgatgatcttctgcaggggcttgaaattggccttaaaggctccaagggagccccaatgccaggaacggaaggaagagtggcaaaggatttgaagaaagctcctgcctccttggaggaaagcaatgcttctcgtgatgaggatcctggcggagggcctgccttgactgggaagaaaaggaaggaccggaggggttccgcggatgacaacaggaatgtgacaagaagggtgttgaggtccgacgccatgaagctgcgtgctgaggctgaggcaccatgtggagcgggtgtggaggttagcaaaactgatagtttggagaggaaacactgtgacactactgtggaggctgaggcttgcaaaagtagtgtgctgatggaagttgcctgcaatggtggggaagccaacggattagttaacttggatgcgagcgatgtttcggaagaatcaactaggtgttctgataataatatgggaatgcctggtgttcctgcaacagatttttctcaagatggtggcttagctcaaggtagcattgcagaatcagatgataagacagtcaagtcagatgaggtgtccgctgtaactcattcagagcagaatgactcccaagctggaataaacagttataatgctgatgaggcccaagataacaaagtgagacatgggccttgtcaggatgaggtcatagactcagcaattactaatggtgccaacacaagtacagatttaaccaaaaccagccctaccagtggatcagaatctgttaagcaggatgatagtaagcaggagaataatttggttcatactgaaggagtgatactccacagtggtgatccgaaagttgagaatcattctcaaattgaggacacttgtacagaaactgagatttctttgactgggaatggaagatgtgcagctgataaccacactgatcgaactgggtacactaagcaggaggagaggggcagccctgtgaacgaaaccaatgatatttcggcacatgacattgtttttacaaggagaggtagaaaatcatgtgaggcaaagcaggggacatgtgaagaggagtcacggtttgagaagcgagttacgagatcagctacagttagacagagagaagtttctggaagcttatgcaaaactaccacgaatgagactgcactaggaagcagagggaggaagggagatattattgctcactatacaaggaaagtgagcagtgcagtatctccaaaaggtcaccatgctgagctgggagaatgtaataccagtatggagaatcaaacagtgaaacaaaaggtggttgatcgaagagattcaggtgccactaagaatgataatgatgcgaatgacacaaagaataaggaatcagaaaagacagagatcaatctgaagacgcaaccacctgttggaagtgttagcattgtaaataaaacaactgtaggagctgtttctgtggtgggtcagagtatctctggttcagccatcactgagagaaatgatacagatcatactgattctgatggagttaaatatgaaaatatgactcttgtgcagaaactactactgtctgttggcgcgaagattgttgccagcaagaagagggtattggaagcaggtcctgataaaaccactggaaggtcaccaattgctttgccatccatgaaaaagacaagaaatacgtcttctgatcctgagatagatcaacctgataagtcttctggagagaagcttattggaaataactgtgatttgggcaataaacgtgttttgagggaacggcagcatcagaatcaaacatatttgtcaagcaggtcttctaaccagtctaatcaaaatgctatcaagcagacacaggatcaatctgacgatgatgacatcagcagcgatacttcctacaggagaactcgtagcggacgtcgtcgtggtgctgcccgtcttgccgtgccaaaacaagaggactccagtgattctgaagaagttgttgttgtgaaaaagaatcgacggaaacgtaagaaatctgtgcataaacacagggctggatctaagttgaagcatacttctggtagtcctcccaaaacaggtcgtttgggtagacctccacttgtcaaatctgaatgtggctgcttacctctgcagccaggaaaagggaaaatgaatgtgcctgaaggtacaggagctctacgcgaagaaaaacaaaaaataagtgatcagataaaggccatgcttctagatgctggttggacaattgatttaagacccaggaatggtagaaactacatggattccgtgtatatacatcctagtggcaaagggtcttac

SEQ ID NO: 196975 - DNA, 564 bp, Zea Mays
attttattacagattttgtgattccagatctgttgacctcaagccagattgggtacaaccttattgttgttttgttgaccaactatagaaagaaaagctaaaactctaccctctgcgcaaaccttcaaggtcgctccctatcttccttcactctccatcaaagctttgctcacatcaaattaaatttattttctttacgaatttagcttcattatataatattttgctcagtgaattgatcaagtttggtgcacgagtgtcatgctcctaggttttgtactaattgaagaagtagcaaatgtagttcgtggtggtggtttaagtcatgtctgatgaaattgatgcttatatagaggggttctttgtgctttcgaaagaattctgcaggaaaatcgactgcatttgttgttcttgggtacacaatgaaagatgggaaggcatattttccccccacatgacagtatctatacatattgcagttgaaatggaaataattgaaatacaaggtatgtgcaggtgcagtctattatattggagttaagagagcgctagcttgcagtcaca

SEQ ID NO: 196976 - DNA, 679 bp, Zea Mays
atggcatgcaactacagatgttgtgtcctcgcacctccctcggaacggttgggccgagcacatgattcgcaccagcactaatatgccgcgttgcctcctcttctaggcttttcttcccacccgccgctgggttgaggtgctgaacactgccaactacctcgtcaaccatcttcccttcaaggtggtcaaccattccactctattctttgacctcttcggcaccatccccacatacgagcaccttcacgtctttagttgcgcatgctatcccaacacctctaccaccgctcaccaacaaacttgcacctcgatccactcgctgtctattccttgggtactcctcatcacaagtggaaccggtgcctcgatcttctcacccaccacatcatctctcgttatgttttgatgaggatgttttctccttgatgctgagtatgtcgatgtacctcctcttccctctgcctcttccgtgccacgcgtggtcacgtcaccttcgcctccgccacacacgaccttgtcgcctccacctgcgccgcgcgtggccctattgcctctgctcgtgccgcatgtggccccgttgcctccacctgcaccacatgcggcctcgttgtctccacccgtgccacgtgcgaccccgcctccaaccacctccgtctcgcttcattgatcctactcgtgt

SEQ ID NO: 196977 - DNA, 289 bp, Zea Mays
gcttgctccctcgtgctggttatgtcgcctcacaccgatcgagatggcttagtgccgtcgtcaagtgtcgtattacaactgcaacaaattgttcatgcgaggtcactagtgctagcatctattatatcttgaggccgccgactacttgctcgatgaggcacccaaggacgagggtgtcgaggtgactcttgaggattgaccctacgccctagtcatctcactcctcgccatcactgatatacacaccgaggacaccatgcacctccacacttacatccattgtcaccgg

SEQ ID NO: 196978 - DNA, 1282 bp, Zea Mays
cggagtggtagaaaaagctggatgtccatcgccttgcttccaggttttctccaaccatgtccaccaacacactgatctagtactaggactagtactagatcgatcctgcctgcctgcctgcttgtaacagcaacagcagcagaagtggcgcactgtgctttgcggtggcggaggctgcgagagaggaggaacttgcaagccgacttccatggctgccgccttctccgccgctatcctcttccacctgctgctgctcctcttctcgccgtccgctgcgcagcctggtgagccgtcgctctcctgactccttccgagtcccaatccccattctcatgtccaaagattcgttttttttaatttcccctggttgttttgtttagggcggcaccgccctttctctacctagtttacgcatgcatactcatatagtcagtgtcatggggagaatgttccggcttctccagcagatttgcgagattgcaagaggaggaatgtgcatatccacactgaccccctgtttgattttgctcctttgcattccataaatgttagtgctagtaaatctaacctaacggagtaagcaagcaactactctgaattggctatctcccatcacgaagaatgggtttcacaaaattgccatcagactcctcggtcacaattataaccacaaggagtcaacgattacaatggcaaatagctaattatatccatttgtggaatgtgtgtgttgtactacatctaaacctcaccatctttaatttgcccccttcccatcctgctcctgcaggtttcattagcttggactgcgggggagctcgtgatcacacggatgccattgggatccagtggacctctgatgccagcttcgtctctggcggccaggccgcgcagctgctggtccagaatggcctgcagcagacccagcagcagctgaccaccgtgcgctacttccccgcggacaacaggaagcactgctacaccatgaacgtcaggaacaggacgcgctaccttgtcagggccactttcctctacggcaacttcgataacagcaacgtctacccgaagttcgatatctccctcggagcgtctccctggtccaccatcgtcgtcgacgacgccaccacccccgtcgttgaggaagccatcatcttggctgctgctcccacgctcagtgtatgtctctccaatgccagcacgggacagcccttcatctctactctggagcttcgacagtttaacggttcgctctactacaccactgacgagacacgcttctttc

SEQ ID NO: 196979 - DNA, 1302 bp, Zea Mays
ctcgaaaacacaggagagctgcgcttcattatttaagaagcagcaaacaaggtcccaaaatgggccagcacaaagggtggcactttacagtagccagcacctgacatagacaaacttatccataaaaacacgtcacagcactcaaacacctaaatcaggcccatatcccggctaactcagtagccccagcaagggccaattcctggcatcctctccgatatctcgcagcacctgggacacatccgccacgccttcttcgaagatagtaattgcgatgtttccacaaccaccaagccactaaaatcaccacagaattgaactcatttccctgcggtttggggactcttctctctgcttgattccaccaatcctgaaaattgacctccctgggcattgggctaaggtgctgtaagttgattagagaaagaacttgaaaccagacctgtctaccaaacgcacaggccaccaacaaatgctgaactgtttcctctttctgatcacataacaggcaaagttcaagatgctcaagtcctcttctagcaagccagtccacagtccagcacctattgaggctcgcaagccaaatgaaaaacttacatttcggagggccccaggttttccaaacccttttagccggtttaaaggctactgaccctacgaagaacctttcatatgctgacttggaagagtagcacctggaagcagaaggggtccaaagatgcacgtcttgtacacccggagccaaattgaactcatttaggatgacctagagctgtagaaattccatctacgtttgagcattactgcacctcttatatgtctgacaccaacaaccattgttcatagtgtcctgtactgtttgtatctgctgaaccttactggggatgagcttgataagagagggtgccaagaccgacaaggattgcccatggagccacctgccataccaaaacgtgctgctagcaccatctcccaccgcagttacaagcgaagcagtgaacatagcaagaccagaacatactgaaaagaaagaccaaaagcaacatgaccaaaactaccacactattgcctgtgcccctcctaaaggtctcccaataagcttcaggaggccctttgctctagctgagtaccaaaggatgcactcataagttacagcttgcaacaccgttgtaaggcttggagtagagccgttaaaaacacagttgtcctgtcccaagccaccaatattgccagtgaattgaaccccttctgtagtccattgttacctctttaactgcctggtaggctggtaccactagcttg

SEQ ID NO: 196980 - DNA, 928 bp, Zea Mays
tcttgccagtcggaaggaggacatctgttttgacgagctatgtgatgcagaaccttctgttgataatgattctctgaatcccggagcaggaaatgaaacctggggtctactaaacggccatgtgttagcaagaatcttccattttatgagggcagatgtgaaagcacttatttcttctgcagctacctgtaggagctggaatgctgctgtgaagtattacagaaacatgtgtagattcattgatctgtcttctgttggccctctttgcactgattctgtgttttgtgatattatggtatgtgtcttgcctatctgtttgatctcttgagaaattacttctgtcatctcctaacgttgaactcaaaatcactcctctttctttcaggctggttatgagaagcaaaatattaggacccttattttagctggttgttcgaatcttagttcgcatgcccttggcagagtacttgagcagcttccacaaatatcttatgttgacatccatggttgcggtcatctaggggatctgaaaaataaatttcagcatgtaaaatggatcaggagctcattgaatccagaggagtcatatcggaaaattaaaaccttgaagcagataggtgatgggaacaactacgcatccaaagttgcaaggaacttcaccaatcatctggatggttctgatgagcttgatgggtattttgctgatatttcaaatagagagaatgctaacctttcatttggacaaggtttctataaacgatcaaaattgcttgatgctagaaagtcctctgcggttttgtcgagggatgcagaaatgaggcggttgatgcagagacaggcagagaccagttacagaaagatggaagagttcatcataaacagactgagagaaattatgaggagcaacagatttgattttttcattcca

SEQ ID NO: 196981 - DNA, 500 bp, Zea Mays
gccagccaacaggatcctctttgctgtcgaatgtgggaaagggaaggttgtggtggtgctggttgggagggttttgctgcggtgggtaagctgtatggtggggttcggaaaagcctggattggtgatggggagtggaaagggtgtctgatggatgggtataggcatggtagatgtgggtggcagcaaggctgaggttggcggtggaaggttggttgaggtggatgggagtggagcggctgtggtggtgattggcgatgatggtatgggtggcgcggcggggtttgacaagggaggtatcccgccataatctggcatgccatatgggatggaagtaggtctggtggacgctgggggcggtggtggtattggcggcctactgatcatttgagtgatggcggtggtgagatcggcaagggccttcgtcatggtgtcgatcttttgctctagcgctgcgttggcggaattggtcgcggcagcagatgcgacatcgctggtgttg

SEQ ID NO: 196982 - DNA, 310 bp, Zea Mays
ggagcatctggtggtggcccacgaaacttcttgaggagttcgatgtgaaacacatcatgcagtcgggcatgaggtagtagagccggtaggacagcgacgttgttgatgagctcgacaacacggtatgggccaaagtaacgtggcttgagcttcctagtgacgggatgggggatggatgaaaccgccctctccaaaggagggcccaatcgcccacctggtacacgacatgtcggtggagcttctcgtagtgcttcttctggactttctgcacctgctccaagcgacagcggacgtctaccaggaactcgtc

SEQ ID NO: 196983 - DNA, 622 bp, Zea Mays
cgacttcctctagttcatcaacagatgagaacccctgtcctaactttccaaggtcatcaaaatcatccaccacctcacccatatcgtttttgtttaaacgatattcatctgtcctctcctgtaaccattttaaattatcgtgttcattcatttataatgctaagtcattgagccgtgctatgtcagccggctttacatgaataggcacaaaactatctcgctctacactgataaaatcatatcctgacaaatctcttcctgtcaaacaccgcatattaccgtgttgccattccattggcgtttccatgagtgcgatacacatagcggtgtctgcttcaatcacctccacctgatcacctacccattgaaccaaaaaactgatgcaaagtagatggcacacaaccattagcatgtatccagtctcgccctagcaaaacattatacctccctttcacatccaccacgaaaaaggccgttgggacagttttgctgcccactgtgagttcaacagacataattccttttgcttgtgatggctcccctgaaaacccacttagattcatattcgtcttaattagctcactctctttgtatcctaacttagaaaacacggatagcggca

SEQ ID NO: 196984 - DNA, 361 bp, Zea Mays
cgaaataaagaaggtcagcgttccctccctctgctcaaagagcaatctcctgcctgtttcaaccattgcctatctcgtgttcgtctttgttattaccgtgagcaaagaaaggaagaaacaaacaagagcgccgccttctctcttctccttctccatgtaatggagcatttgttccgccgcgtagtcgagtgcaagcagcggttttcctcttttggaaacccacccccacgcacggttccgttccaatctcgcccttccaattgaccaacacaaacctttcctaagatttcttgtcctccttacccttctacagacaagtacgaaacgcaatcgcacaaggttatactactactagctttta

SEQ ID NO: 196985 - DNA, 522 bp, Zea Mays
atccattgtgaaacatgtcctacagtatcccttgccaaccagctcctgtatctgttgcctgctcgattcgttgaagcacagagtatggagaaaacacaacatatatcgcatggattatgatttgttagtgcatgtgttacatattgacttatcgttttgagttgtcaataggtccaaggtactaaattgttgatgcacggatttctaattttatcaatttgttttgtgggctgcgatttattttaagtcgctctaagatctcaattattcctcttttttgttattttttatgccttagctgtaatgtttgttttgaatatttattattggaaaatttgatattttataggtgagacattaattaagccattttcataaaagaacactcctgtggtgacaattagacaagaatactaataatcagattaacatacttaaccttgactgcacatatagagactacagtgttgtgttgtgttggttcactgtaccacaaacaatattgaagaggactgatgaaga

SEQ ID NO: 196986 - DNA, 607 bp, Zea Mays
ttccgttcacatttttggggtctgccggattctctgtgctcaacagaggacgtcgagaatttctgatccggtttctgcgctcgtgttgtgttcaacggatggagagatttgtgggcgctcgcagctgactaggttagtgctgttgacgtttggtttgtgttttgggaccttgtgttttagtccgtgtgatcgttgacagactgatgtgacctctacgcgccgctggttatcctcaatcgcgcttggcttggcgtgtagatgcaagagatgcgctccatcctgctgtcgtgcctgtggtttggttgcaaggtctccagatcatgtcagcaattcagcatatatcgcaggttccatgtatttctggggatactcaacatgtgatctggtgcatgagtgctcatgcagtggaattcgtgtgcagcctttatcatcgggttttattatggtctggtagagtttgaaactacattaacttccactgttgtgttggtcaatatgtctttggtgagggaactattcttgggaacggccaggtctgatgtaggatttaggctcaggtgccttcccttggttggagttccaagatgcgaaagatgttctgaattac

SEQ ID NO: 196987 - DNA, 362 bp, Zea Mays
ggaaagcccaccgaggctattcgagggggaaggtatcgatttgagtttttggccccttaattatgatgatcatatgcttagcaccttcacctgactccctatgggcctactgttcttccccaagtgtaaagcaggtttccttttatgatgatgatgttcgcttttggcaacattggcgtaattgctctgctgctgctgaggccccaactgcagtcagtcagcagtcttccacgttcattgcacctgcaccttcgacacgaggaaggcactttgttgtcatttgttgtgagaacaaagtcatatttttggacttggtgactatgcggggccgtgatgttcctaaacaggagcttgacaatagg

SEQ ID NO: 196988 - DNA, 1239 bp, Zea Mays
tagtacataaaaagtattttgttatcagaggttggaatggttgaatgcacacaacccaaaacgacacttatttaacttgagggagaatttttttaaaacatattcagggtttttcatgtttcacttttcttttgaatgagcctattttaaaggccttaggtatggaagcacaatccattgttagtgacgggtggcgtgctagaaaaaatgatgataacaattatggtaacaaagatgacagtggtgatgattgtgatggtgatggtagcagtgatgatggtgatggcagcagtgatgatgatgttaccgatcaaatatgtgcgctatgtgatgatggaggacatttgcttaggtaggtgcacaaaattgactatctgtcttttattccatttcttgtacatgtgctccatatctttatccatgccatgatcaatattattaagcaccttccacttggatcaacacctttaacgcttgcatgaaatatggtcactaacagtatgcgaagattaaggcaataggcaaggggaaataaggttaacgttaaagagataacagaagcaaaaggtagcagagaaaagagaaaggggaagatagataacaatggccaccaattcagcctaattgcagctagatccaccttgcttaatccttctaagtcccatttcctaatcgtagcagtctcccttaaattgtctcccaatttgaacacagttggtatatgtgagctatagacaaagatgcaataaagagtggatccaaaagctgtgaaccgcatatgaggcggactaggatgccacgcctaagtttgggtgtttcaactatcaactttcaagatcacttgtgcctcttatttacactgtcagttcataggctatgagttgtctccttgaatttgtacaaggtgaatttactttatgcagtttcacattaagggtttgcttctggagtaaatgtggaaatctactgaattacttgtaagatcagcgagttgaagttttgatgaaccataacaaggaaaaacacttattactttctgcatgcaagtgacagatgaggatgtcttccacgatatccatggagtgttcattgtgttttgtagcatataatgtttctgtctgtaagctcttgttgggttattaaatcagttcgattatatactttaattcttacaatgatttaattcagctgtgacggtccatgcaagaggtctttccaccccacaaagaaagatggcag

SEQ ID NO: 196989 - DNA, 511 bp, Zea Mays
aattaataattccaatcaacgaataatactagttgcaacacttggggaaaaaatggggtttacctgtctattaccgaaaataacaaaacaaatccaaaaaatggggacagagaaatgggagagagatcggatgcgcttacacggcggtcgcgggcgcttactactccggcgcgggacgttcgcggtctctgacgggagcggaggatccgttcgcgcagaagtgtggagggggccggagctgggaacgagcgggagcgtgcgggatggaggaagacgggaacgggagcgagcgcacaacggctacggcgagggctaggtcgccggggaagagaatggattgagacgtacgcggagggcaaggaaagtggaaaaggcgcagtcgggcgcgggtaagtgaaaaggcagcgtcggttcggctttggggataggttgggtcggaccatgtgcacatgggcgcgtaggttgcgcctgggtgcattctctatattgaatgcacccaggtgtaatatat

SEQ ID NO: 196990 - DNA, 727 bp, Zea Mays
agcgagttggttttctagtttggatcttcgagcgggattccaccaaattttgctcaaagaaggggaagaattcaaaacggcattccaaacacacactgggcactatgaatttcgcgtcatggctttcggtcttactggggccccagcaacctttcaaagtgccatgaacgccacattacagccagtgcttcgcaagtttgccttagtattcttcgacgacatattagtttacagtcgatctttggaggaccatgtggagcatctgtcggcagtacttcacttgctgcagaaggataactggaaggtcaaactgtcaaagtgtacctttgctacccgttctatcagttatctcggccatgtcatcagtgcagcaggtgtccaaactgatcctaacaaggtgactgcagtggttaactggcctagaccttccaatgtcaaagaactctgtagcttccttggtctagccggatactacaggaaatttgtacctcactttggtataatatctcagccactaactcttctcctcaagaagaacaccaaattcatttggacacaagatcaagagactgcatttcggtgcctgaaatcaaggttgagccaggcaccagttttggccttacccgatttctccaaatctttcgtattggagactgacgcctgtgaccagggaataggggcagtcattatgcaaggtggacaccccctcgcttacgtcagtaaagca

SEQ ID NO: 196991 - DNA, 383 bp, Zea Mays
ctcaaatgatcagtaggccaccaacaccaccaccgcccccaacgtccaccagccctaccatatggcatgccaggttacggcgggatacctcccttgtcaaaccccaccgcgccacccataccatcaccgccgatcaccaccacagccgctccactcccatccacctcaactaaccttccaccgccaacctcagccttgttgccacccacatctaccatgcccatacccatccatcagatacccttcccacactccccatcaccaatcccaggcttttccgaaccccaccataccgcttacccaccgcagcaaaaccctcccaaccagcaccaccacaaccttccttttcccacattcgacggcaaagaggatcttgttggttg

SEQ ID NO: 196992 - DNA, 273 bp, Zea Mays
gaagacgtggtgtagcccagaccttgcagaacatgtatgtgcctctcttttgccctcgttcgttcgctatctagaacgttgcgacgtgggctcctcatcccccaaattctttcaaggtgggcatcgctgcggcattgtggaggtgaggggatgcatattcataacgaagggacaatggaggggtggggtggggatgacgctggcataccttcctgcaggtgacaagcgaggcaaggaagtctagaagtggacgcagcctgtgcagagccgaag

SEQ ID NO: 196993 - DNA, 1282 bp, Zea Mays
ggacaagtcacatctacaactggtatgattattaaccatccttctcactggaagttcccaatcaattattttttctcatttataaacattttttacctgtctagcgatacttttgatgagaacactcctccattaagtgacccgaattatatatcttcgttgggtgctgcaacgttcaggggtatgcagagcggtgacaacgatgctatttggttgatgcaagtatgttctctgtgtgttagtattttgcttattattggatttttctgtaaaagcagttattagagatatgaatatagatcatggatgtcttggttgttgcactttacattttcacttctggaactactttcagatgtgtgattcttttctccagttgagagaaatgccgtgctctattgtcacgttcttggatatatggatatgcaaggttctgtaacatttattactctgcagggttggctgtttacctatgatcctttctgggaacctccacaaatgaaggtgaaactttattgtatggtttgataagatatgtatgctagtaattttattggccctttttatttgggcttcttgtttcttcaaaaaacattgttggagtagtaaggattgaaattcatgtgactttcattttttttccatttaactgtttgtcctaaatgtcatgtatttaaaaatggagggagtttgttggatatgatatgactgcaattcatgttccagtggtgtgagttgatcacattcatttagtcagggtaagcattgtgttttccaataacatattaggatttttgaaataacaccaaggaggtacagcaatttgcagtggtgtcatctgttatttttatttggttcatacagtaaaaactaaaaaaaaaacatgcctgtagtgactaatttatgttgatagcaataatttcagattattcttggagaaaaaggtgatgttacattgccaaatgattgacaaccactgtatttctaataatctaataattatttatgcactcagtttcttcaccttttctgctgaaaacttgaataagccttgtcagcttaacgtggctactgtctaatacatcagttgtctgttttgagcatgcaccttcgttattgttagtgttgttgtgtttggggattcagctttaacgtaaccaattttttacttatctgattgaactcaattcctgttatttttaggcactactgcattctgttcctgttggcaaaatgattgttcttgatctttacgccgaagttaaaccagtgtggataaatt

SEQ ID NO: 196994 - DNA, 411 bp, Zea Mays
aaatgcgctaagacacagccacggtcaaactaggatggcgggttgatatcctttaaccccggggtttcttgtgtaaaaacgccaggccgaaggggtatggatgggtctcagccgtcggattaaagccccacgtcccagattagattcacccgagagtgaactggtacgccctaaccgccgtccgatctaaaaattaagcgccaggatctgtcttcatttttaacgaataggtaagtgatcgtgaccaccggatcaaccatcaacagcccgcagcatttccaccccgtgccctaatctcaaccgctccctagtcgatcgacggcttatacgtcatcttccccgacgggactttacgccgacgcgctccgtggagcaacgcggacaccgacggtggtgtaaacgtcaccagcg

SEQ ID NO: 196995 - DNA, 619 bp, Zea Mays
tgagaggaagaggactgattgaccgaggacagattgagtaaatgctagtacaaggcctatcttgattgattgatatctctgaactagttggtcgcctaactatgcgcttcggaggtgacttgcctcaccaggacatgtgataaccataaactacgccctactcaacgacgtggactctgtatctgctaccatgacaggacgcatctgccactgccacaagacatgatcgacattgtggcacgaccgaaacgtgcactgcatatggcttcatacctatagtagtagttgaatctttgttgggtggggcccaccgtccagcagacatgtaactttctcttttcttgcgctataaaagagattagagtaatgtagaaataaatcagacccaggcgaacacactcacctgggctggtacaggtctagtcaatccagaatctgtttaattccacaagttaggtcgaaccaagggttcaagtgaaccagaggtcagttagtctataacactcactagaaccaaaaggaacgagagagctatttggtcatctgtgtctcgagcaatatctgagtgtgtaatcttcttcgcctctgtttcaatcaatccatttatcacaaagagtac

SEQ ID NO: 196996 - DNA, 445 bp, Zea Mays
gtgtgacagttctcatctgatgtgaacccttcttcgtgatcactacaaacgtactagtcactcatcttgttgtcattcgttagaagcactccttacgacgaggtgattctacagttgatgagttctacagtcatatgtttgccatctggtgttaagcttgatactcttagtccacaaatctctatcactactcctataaagcaccagtttcgatggtcgtcctgcatcacgcacgaagcgcataagtttgttcccctccacccgataagttgattcccctcccacgcttctcgcctaacaaaccagactagtgtaaccaaccatgcaaccaccacgagcgcttcctcctcatcgttcccgtccaccgcttctcgcctaagcctttatctattgcttgattgcatgtgtaaccaaccatgcaaccatcacgagcacttcctcctcg

SEQ ID NO: 196997 - DNA, 690 bp, Zea Mays
aaccctctcttttagattggaaaatggcaagttcacgcacaagatcatgcattcgaatacatttaatcctaccaaagcagttcctctctgcaacgtgaagcatgctccgtcgtataagttctttaagataactttcagcagtgtcttctaagctgcatgcccctttttgttcaataaatccttcagctatccacaatctaatcaatctctttctgtgtattagatagtcttctggaaacatagcacaatacaggaagcagttcttcaaatagtctggtaagtatttataacttagattcataattttctccacgcgattaaggttctcattgttgtgtagctcccagataagctggtcataaaatagcttccactcgtcaacattcttcggtctcagcgacaatatgcttcctattgccacaagggctaatggcaaaccatcacatttctccacaatgtttataccacactgacgcaactctggagggcagatatggttttcatctttcagaaatgccttcctacaaaatacatgccaggaatcatcgacacccagaggttctactttgatcttacaactacccttagctagtgaagctacctcctcaattcttgttgtgattattactctgcttccaaggccattatctacaagaacttctttaattttaaaaaaaacattagccatcc

SEQ ID NO: 196998 - DNA, 372 bp, Zea Mays
ataaggctgaaaaatatcctcccatcattctgccatgtctccatgggcttccttatgggagctctgatgtaatgcttgaggatccaatatcaaaatgtcatctcagaaagctaggcccattcttcattggctctcagctcgctatggtgacaatagtcctaaaaccgtgttattttgcaattaaaaaatgatgaagtgaacttgctataatcctgtaaggattatatgggttatggatcttttggagataagggtggaaatatcctcccttcattctgccatgtcataaagggcttcctaatgggagcttccagaagatgctttaggatccaatatcaaaatgtcgtctcagaaagctgtggccattctgca

SEQ ID NO: 196999 - DNA, 636 bp, Zea Mays
ggtggacgttggccaggccacatgtagaaggcccccgtccaagggttgtagtagttgtagttggaggatggtgcagagccaatgatgccgctgctgttgttgccggaggttctaccaccgtgcttgcctcgcttgccgcgttgtccggagtaggagccatgaccaaaaccgcccccaaaatgttgggaggggggtagggtggctgatgtgaagagcgtccggcgagagcagtgggtgtaggtggcttggggccgccgacctcgccaggtggtgcagcgacaacaacgagggctgctgctggagcagcgttggtcatggtgagttcctcgagagtaagatcatcatggacctgcaaaaaagtggggagaggtgcgacgaaggtgaagaccgagcgcttgaaggcgttcgttgaggccatagatgatgttgagggcaagagtcttgtcggagaccggctcaccaaggtcgcgaagatcctcaggaagccttttgtagcggcggcagtactcagcagcagaaagatcgccctgagtgaaggagtggaaggcttggtcggcatagagggtgcgcatcgtgcgattctcgagatattgggagtcgatggtgagccacaagacgcgagcagtggcgccacac

SEQ ID NO: 197000 - DNA, 920 bp, Zea Mays
ttaaacaacatggacaaaatatgaatataacataatttcacataacaatataacatgtccacaaccacactaccacaaatccacaataacaaaagttaaagtgttcaactaatagcaactagctagtcgacaaccacaaacaaagtggaatgaaatgtgcagtagtccacaaccacagccatagcacaaaagcaactaaagtggaatgcaatgtccacaactgcaagcacacaagtgttactcaatctccctatatcatatctcaattacggatgaaaaggtcggaaacgattggcaaacactaaaaccgttaccgttttcataatttttatcggaaaaaacggtaactttggaaacaggaacgatatagatccggcaagctgacagagcagggaggcagggaccggcgattgacgagctggaggagcagggaggcgaggaccgacgagctgacagagcaggcagtggtagcgccgagcgcgagtaggtcagcagggaggcagcgtcgcgcgaccgttggggagaagggaacttgagcaacaacgcagggaggaggagagggaggcacgagcttaggcaagatgcttactggatgacggtgaagcctagggatgccggaggcgacgagcggacggaggcaccacgagtccgtgacgactagctcaacgctcaacgaggctgtgggcgtgacaaaggaaggatgtctgttttaggttaggggaactaggttgggttgggctcgaagtctggaaaagcgtcaaaacacgacctttttatggtccagagcgtttttacgctaaaaagtggcgctttagcgcttaaaacgaatgctttacgttattttgtgaaaagttacaacactttacattctgagtagcgcttagcgcttaagcacctttttaataaccatggcgtgaagc

SEQ ID NO: 197001 - DNA, 505 bp, Zea Mays
gaaaatcctcatgcagccggtcagtcctgcgacggcgcacagactcctcgaccgcctgggtgcggcacatggcgaagacaccaagaaggcccttggccggacgaatgaaaagtccccggcctcgaccccgtccctggcccggaccacttcctctcccgctgcggtccattggacgtgaggcagcggcggcgcgagaggaggatgggtgatgtggaggctgaggaggtggctcatcagaagaagcagggcctccagaccctgagggagcccgctttgtacgagcagctgggttggtggaatcaacccaatagggtacatagcgaaagtgtttgacatgttttttgaagtgagtctgggtgaccacttcgatcatcttcataataaagggtgcatgaagacaccccttgagaggagaccagggagcacgaaggatctcttcccagatcatgtcaaacacattgatgcgggtgagactattgggagcaaggaggagaaggaagactcg

SEQ ID NO: 197002 - DNA, 306 bp, Zea Mays
aatatccctcacccatcttctcgcaacaagaccttgagctactgttcttctattgctgactatagctgaaatcagcatggagagatttggacccagttcttgaatggaacaatctttccaaaataatgtgttttccccattaccaaccactgtctcaactgccatatgaaagaaggccttctccttatttgaaacaggcaatggcagccctgcccaaggtctgggagcatcaagtttctccaaccaaagccatctaacccttagggacaaactcatcatttggaggttagaaatgcctaaaccccc

SEQ ID NO: 197003 - DNA, 358 bp, Zea Mays
cctcaatatcatagaaacactatttttgtgtggtgttttacttgagtggacataaacacaatctaaggatgccatgaatagaggggattatagttaacatattatcacaaaaggtcattaccttgcccaataacgtcttcatccactagttgtactctaataccctctagtgtgaatacaatgcccacaatatcatagaaacgtcatttgaggtttaaaaggtgatatattgttttgaattctttatattccaactttttagcaactgtatggtggaaacctgttatcacaaaaggtcattagctagcccaataatgtcttcatccactagttgtactctaataccctctagtctgaa

SEQ ID NO: 197004 - DNA, 393 bp, Zea Mays
gccgctgcctctgctgcagccgctgcctgcttcgctgcctggactgccagcgccgctgcttcctctgcagccttcaggcgtgcagcccggctggagaagtcgcccaactctccctcgctggttcccttggccttgagcctggcagcgcgctcagcagaggtcgacatgagtagagaagagaggagtcggccttgagactctcaggtgtctaacctaagttctggtaccaaatgttagaggtaaacagagtggttttgccggaggtgctaacctcagccatcattgcttgattatatagaaagatgagatgagtcacattgattacataacagctcattagagcttagctaatcagataggagccttggcagccgcacacacctgttgagctgc

SEQ ID NO: 197005 - DNA, 583 bp, Zea Mays
taacacaagttcagctaatagcaagtcgacaactgcaaacaaagtggaatgaaatatccaatagtccacaaccacaaacatagcacaaaagcaactaaagtggaatgcaatgtccacaactgcaagcatacaagcgttattcaatctccctctatcatatctcaataaccatcatccaaaacatctataccaacatcatcgttgtctttgtctttctcatcaccatagctccactgttgtttgttgcttcatcaccatccatatcaaggtcgtcaagcacaaaattttcatcatcttcattccgttcacccacttcaagcccatctacatcgtcctcaaatcttgacacttgaatgccatgagctctactgggaaagttgcggccttgaagttatgtagatgcaccgacggcatgatcaacatgctcccatatgaaaagagggtcatccccaacaagagttgaattagctaatgtatcaacccactcattgtcccaatcaaaatcttcaagaaccaaaggatcaaagttctttccttcttcacgcattttttggaacatagcgaccatctttctattgtatga

SEQ ID NO: 197006 - DNA, 498 bp, Zea Mays
ctgaggtggtaggttcgactcctatcatctctgttcagctatttcttttttttatttttttgcctatcttcttcacctaactccaaaatggctggacgtcctcgcataacctccctacacatatcttcttcacctgacctctcttccttaccctccctcatagcagtcggctgccgtggtccggtgacctccccacgatgcctcccgggaagagatccacacagccctcacggaattccgaaggtaattttgtttagttgctcctctctgttcgtcacttcgtgaagcagcgggatctaggtttgggaaggttttctcctccatggccatgacgactcatgagctctgtccccatccttcccgcctcccatacctccaccatctgttgcctcctcttctctgtcgcctgactcgtcctcgccatcgcggtgcctcctcctttgccttcactgtctccactagccgcaaccgccatcacctgcagcaacctccgcctac

SEQ ID NO: 197007 - DNA, 722 bp, Zea Mays
caggaggctgttttggaggatgttatctcggcagggcacatggttcggggaattgcatggccagagattcttcttctcagattaaagctggtgttatttctagtgtttgctctgtcaaggcgaggaaacacctttcctgtcagtccggacagctggaaagctaaatcgccttgtttcaaagtctattccaggagacggatgacctaggttcaacatgtccaggaggaccttctgttgcagtcggttgttgagctagctccacctttgcaagagttcaggaatgcggtttcaaggccaactgatggcctgctacccccccccccccggagtaccaaaagaaggaaaaagacattgccaagtaattttcgaccaaggcgaagtcggagtgtggccaaattccctctggagttgggttccagttcggctgctcatgtgtgcagacatctgggattttgtgatgataatgagaatatatccttcaaggattactttccccccaacaatctgctggtccgctgaaatctaatgggcctctgcagcaggaagagggcactctgggtccggtgacccactctgacgtagggccgctggggcaggtcacattaatttccccccaacattctgttgggccgctggaaactgataggcctgtctcgccccagtgtcagagctgcagaatgcatccaaatgtctacgggacatcacttaaagtttatagtaga

SEQ ID NO: 197008 - DNA, 517 bp, Zea Mays
ggatggtctagttcgatcgggtgggttgatgagcatcacgaatgcacacaggtactgaaacagaaccgcagagagcatgatcagacctggaagtggctggccacggcgagggtgctttaatggcggcggtaaactgatttgggggaaaacggcgattctccggctagggtgggcaatcgagtggaagaacgggtgtgtgggcttcgtgatgacctaacgcagctgcccgggggctcaatttataggcagcttcgtcggtggcgcttaatttggccggaccgtgtgggcggccggagattaggaagaaccttggcgcggtgaatacgtgtccagtggcgtggcagttgttccggcgatcaacagggagttagagggagtcacggtgatgtggtggcgcggttgggacacgcggtgaacaacggcgatggcacgacgacggtgagcagctttacccgcgggcggtgagcaagggggaatgaattacggctagccggaatggcttccaggtcaccggcgg

SEQ ID NO: 197009 - DNA, 642 bp, Zea Mays
tggcagcagcagattcaccgtcctacaaggagctacagaagaagtttggcagttcgaaagaactgatcgagtcggcgaggagcatcatcacgtcgaaagaagcgccagctgcggtggcagatctaacgagccgcgtcgaagtggcgaagcaagtctctgcctgcagctacgagacgggcacgagctggggtcaggaggtgtgcatacgattttaacactgtctgtcccgtcccgtccctcgcatatatatcacatcatgcatgacatgacattgcatgtgtcgccgacgccgtacgtgcgctcgcaggttggctgggtgtacgggtccatgaccgaggacgtcctgacggggcagcgcatccacgccgccggctggaggtcggcgctcctgagcccggacccaccggcgttcctcggcggcgcgcccaccggcgggcccgccagcctcacccagtacaagagatgggcgacgggcctgctggagatcgtcctcagccgccacaacccgttcctcctctccgcgtccaagcgcctccgtttccggcagtgcctcgcctaccttgtcatcgacgtgtggcccgtcagggcgcccttcgagctctgctacgcgctgctcggaccctactgcctcatcgccaaccg

SEQ ID NO: 197010 - DNA, 499 bp, Zea Mays
accattgaattgaaggtactatatgggaataatgagatacaaaattacataatatgcaacttgaccaccctctctcagccataataatgggaatatatatgctacttgaccaccctctctcagccattcagccaccaccctctctccgtcttcgagccctctcactctctctcccagccacttctatgcggtggcactgctgctccaccctctatcgcagccacttctaactatggaatgaaagcaacaggtgaacgagctggcaacaccgtagtcagtaaagacagtaaccctttttgacggagataaaggaggaaagcatgcatgtcaacaaatataaaagggtgtcaaggaggaattatacaaaagacaatttgaaacacctgaacacacagaaccagtccaaccaccagcccgcaaaggtaacagttcactggggagtaggtccacaaaatcctgcctcagcccaacagtgattgaccatggaaaccagattaac

SEQ ID NO: 197011 - DNA, 276 bp, Zea Mays
tgcttccaaggcttcagccaggctatcagcttgcttcatattaccctattttcgtgaagattgcacagaatgagacggtacctcagctccgcctaatagaattgctcaccgagcagatggtttctctcaccaagaagcatggaccggacacagagctgaagtcatggtctcagggaagcaaagttgtgggcatttgtcgtgtcatgttgaagcatcatcacagctctcatatctttcttcccctttcacaccttcttgtgctcactatcgagtcct

SEQ ID NO: 197012 - DNA, 525 bp, Zea Mays
ttaagttgcctgcttgtaaaatttggcccaacccaattaggaatctacacaacttcaagaccgctactttcctaggagagctcatggtactcaagtgccaattcttgaggatgatgaagatggtcttgatgtgggtgatgagaatgaagacgatgacaattttgtgcttgacgaccttgacatggatgatgaagaagaaacaaacaacagtggtagccgtggtgatgagcaagacaaggatgatgttggtttagatgatttggatgatggttattgagtgcttgagtaacatttgtgtgcctgtggttgtggacattgcattctactttagttgcttttgtgctatgtttgtgattgtggactattagacatctcattccactttgtttgcggttgtcgacttgctattagttgaacttgtgttattgtggtaatgtggttgtggacatgtcattttgcacaatattattatgtgaacttatgttggttgtttggtatttgactttatataattgtctgaaatta

SEQ ID NO: 197013 - DNA, 340 bp, Zea Mays
cagggaggcgtcaagattggatttttgacgatgtgtggggaggccagtccggagattctcgcggacttttcctcctcggattttcgccctgcccgcctgcctgctcacatgctcgcaatcacacgcatcgctcagcttgatgagttgatgtgtgcctgctctctgcgggtgctggtgtgttgttttccctgcgctttttcgttttctccttttcctcctccgcttcattactgctgcaagccgggggacggacggaggaaaaacgcggattaaaagattaggaatttcgggagcaggattggtgagggggcgaaataatctctttctgggagaattgttt

SEQ ID NO: 197014 - DNA, 440 bp, Zea Mays
tgaattattctaacactttaccatttgttagagttaaaacaatcaattgagcactaacaagtagacttacaaattttatccaaatcatttagtgcactaaaattaccacattcatttaacaaacgcattcaccacaatcatcaaatccggcacatatttatatcgaagcgcatttcacccattagtccgcattttaacttagacaccacatgagcactactaatttttacctgcgaccataaccatacgcatttagaccacaagtaattcatcgtaactacgagcttaaccaacgccatctagcaagttggttaaccaaagccacaacctaggccgctatacaacatactcgtcggctaccctattattatcgaaatctgagacacaacatataccacaacatttatataaacatacatattcacatgtattttcacaca

SEQ ID NO: 197015 - DNA, 949 bp, Zea Mays
cgacagtggatgtaacattgcatcattaccgaaggcgaatggatctgcgcggggaccccgatcaaattcagggtcaatattgaagtcatatccaaacattcatcgatcacaagctagttctgatgattgggaacatccgtctggtacaaataagttaatttctgctggtggatctggcattcataaacgtacaaaatcaacacattcattatctcctccgatccaatggggtgggcagaggcctcagaagatatcccgttcagcaaggaagtcaaatttagtccctataatcactactgatagtgcactggtaccaggttcgctggacagtcctgtcaatgaagattgtgcaggtttaccgaggcgtgcatctgtaaatagccttcaacaaacaaaacgaggagatcatgggctctcaactggacctgaaggcaatgagcctgtagttgctgagaaaaagctaagggacaagggcaaaagggctggtgaactggatgatgggcatggctctggttttcagaagattgctatgcttgggcatccttccaaaaggaataagttgcctgctgatgaggatattggagatgctttaaggagacaagcaagagttgtcccgggttttactctgaccaggcctgggactcctgtatccattgacaagcttgaaaatgctccgattacaaaacaaagaagtgtgaggacagtctcagagagaactgagaggtaacttgtttccttagctgaaaagcagttttatgtggctaaatactctaaccctgaattctccctgtagtaaatctgggagaccactgatgaagaaaatatctgagcgcaaaagtaatgcacggcctaggcatacaagtagcagtgtgcagtcagactctcctggtatagcgtctcttggtatcaatcagagtgctttatgcaacttgaaacagttccttttgaa

SEQ ID NO: 197016 - DNA, 349 bp, Zea Mays
acaagaggcatcctcacaagcgtgtcaaaactgtttgtcaggtatgagttccacttttctccagactagttgatcaatctgatgcccctcctgaaaagctatcaccatgcctaggctaatgaaatatgttaggctgtacacaatggtttgaagaaacaacagctcctactttcagttatcatccagtataatcagtgaaggtaactaaaacaaggagtttgcatcatcatcaccaataatccctgcacgagcaaactccattcctgaagtggtgaaatctgttcacgtccctcacaacaatctcccgatctgtgaatttggagatgaacttggtgactgaatgacagtc

SEQ ID NO: 197017 - DNA, 664 bp, Zea Mays
gatcttccgaaaggaagaaggaaaagaatcatctgccttggttcaaaagctacagaaagagattaaggaagtagttagagatacaggcacaaatatacttgagaaggatgaatcttttgatgaaaaactgttgactgcgttccgggcagctatagggaaatcagtggatggaccagccaaaagtactaacaccaatcaattaataagaacaaggaggtcattgcttcagaagggcaagaaacgtgagaatttgaccaaaaagttgtatggaacatctacaggaagaagaagaagcgattggcatcgtgattgggaagttgaattctggaaataccgttgctccccaggaataaatcctgaaaagattgagacattgcaatcagtacttcagctactaaagaaatcctctgaaatggacaaggaaagtgctaaggggaaaagggaagagaacaacaacagttccattttgtctaggttgtatttagctgatgcatcagttgttcccaggaaggatgatattaggcctctctctgcccttgcaggatgtgcgccattagaaaaaagtagccaaattaaagctagttgtaacaaatcgtctagcatacctgcaggaggcaacgagacaatgaaaatcagttcacccagcagcactgggaaagcatca

SEQ ID NO: 197018 - DNA, 805 bp, Zea Mays
caagcttttggggatagaagtagtaccgaagattgattgtggtgttatgcatgatcatggacatggagcatgtaaagtgaacctgttgtctggaactggattcagtttctctgtaaagtgataggagctgggactcagtatgtaggtggacagttacttgtatagtttccctcttttaaactgactatatatatttttggctgtaaacatgaattcctgtctgtttgtgataacatgcagctttttaaagacttggtttttttttgctctgcacaaaatagacttgtgttttcccctagttcttcccatgggcaaatgaaacctgtaagttcagttttattgatccataaaagtgaaatacctagctgtacttgaacaatcagtttatattggaagagaccatacttgtaagcaaatgaacctatgaacaacatagaaaggtgacacaaatgccggatcatctgctagcagcccatgcggggcttatttgcatagttattgaagctggatgggcaattgacctgctcaggcaggttcaacagttttcctctccaacaactagtcctcttagtagcaactaccgagtatatttgccttggtgatgtgatcagcgtggttgtatctaagtacctaaaccccaattgtatgctgatcgtttcagttggttcgtgcaaagtcagatggctcagtgataatttgcatctatctgatgacttgaatcatgctgaaccaggctttagttctgctagcagtctgtccagtttcaataactacgtttatttgttgatagcatttccattcattt

SEQ ID NO: 197019 - DNA, 347 bp, Zea Mays
gccgttctcaacctccacgcccagtccgtctccgtgcagaacacccgaagtctggtgcccctcgtcctcgacacctccggcaactacccacgatggcgcgaaccgttcctcctcgccgtcacgaagtattcgttgcaggaccacgttcgcagctccgcacctcggcacttcctgattgggctcggatgaacgccgtcgtcaaatcatggttgtacagcacggtcactgccgaccttgccgacgccgtgatcgaccaccgtgccaccgcctacgaagcttggatcgccatcgaggatcacttcctcggcaatcaggagacccgtgccctccacctagacgccaagttt

SEQ ID NO: 197020 - DNA, 418 bp, Zea Mays
tgggcacaaattatcaaaaggtgggataccattggctaatggagatgtgcaactaccaaaaccacctccatgggcctatcctttgtggagcagacacgaaacacaaaactatgaaacagacagaatgctgaagtctacttctcaggttattgaccaagcaatggctcaactctgggagactaaagtaaaatttgtaaatgttagtttctctattgagaaacttggtcgctcaaggagcattgtactttctgaaacgggtcgtaggctgcgacatgatgctacggattctcatgatccacctggagattcgcaaacagttgctgatcagcctattgaatgggtgaaggttacgttgtctgcagttccaggagttaacatggaagatgtagatgataatgaaccaacacgaaagaaggac

SEQ ID NO: 197021 - DNA, 274 bp, Zea Mays
accgccgcagcgacgtcagcgtatccagcagtaaaccaccaacggcttcgccgtcccctagctccgcacgggaatgcgaagaatgtgagacttgagagatccaacaggggagatgcaccgcagcgacggcatggaggtggcgggagggtggaggccgcctgctaccgctagctactgagacagctccgagtcttcgagctctggttccggcctgcgcatatggtacggatgccctccccttggataccttcttgctaaatctgtgaaatgcttg

SEQ ID NO: 197022 - DNA, 298 bp, Zea Mays
gtactttaggccctagcacccaggctaccctataaataccctcgtcttgctcttggatgggacatgcttgacaagacattgaacacccctactttatattttattgagcattgttgccttacctaccctcgagtgcttggtcaacgtgtttgaacccaacatttggtgcctactgtgtctgctctgacaaccaatcccatgatgcctcctaagaagatgaacacctctcacactccacccctctgaccgagatggcgaatgcagtcttcgttgacaacaccaagaaagtcaaagtcac

SEQ ID NO: 197023 - DNA, 477 bp, Zea Mays
aaaagatcaactcaacagaagaagttcaactcagctgaaaaagctcaactgcttttcaataggaacactcactgtttctcaatcctaacaacagccgtacacagagtgttggcttcctcgccttctgccatctcaagacagttttggagggctgcattctcttccttcaggtccttgattcgttgctctaggctttctacccgggagtttaggtggttgcaatgggagaaaaggtcatcaaagtggatgtcaagggtgtggagatattcggccttgtagattacggtaggttcatcctcattatgctttcttcacgacaaagcttggagtcttttcctccaagcaaggttattttgttgctgggtgggaagtagcgaaggggtgtctcagcgacttctttgttgtagttttggcatagttggcagagggcttttagggcagcattttggcatgagtcttagaagtggcggccagtgg

SEQ ID NO: 197024 - DNA, 609 bp, Zea Mays
tttttaggtgcttttacgatttctcgcctgcagtcttgtgtctgaatactgggataacaatgatattctgaacgaaatttctgaattccgggaggatattgtcagctcagctaagggtgtgatcgatatgatatattcagatgtctatctggagatagatgggtataataaacaacgtctttcttacatttacggcattctttcagcatgtcattcatatctgaagaggaccaatgagatagaattgagatacccagtgcatgtgcatacccataagcttgaaccatttcagtactataaggtacttgaggaagagtgcaagaaagtctgcttcattgatggcttgaactttaaaaacattgctggactggataatctgaactttgagcatttcaatgacgaagtatgcaagaatatccatgcctccaccgtcactgctatagccgatatggtacagtctcttgtgagtatgtatgttgatgtactggccaagggactcatatcacaacaaggtgtttacaagcactatgttctggggttgctggcatcacttgaaggccgcagtgaagcacaatcgaacaacacagattatgaaaagttgcaggcttc

SEQ ID NO: 197025 - DNA, 571 bp, Zea Mays
gaaaggttgtgctcatccttagtttgacgccgactagcttgaaaaggtccctccaaatgtgtcccgtgaacactgggtctcggtcactgactatagagcttgggaacccatgcagtcggacaatctcatcaaagaatgcccttgctactgtggctgctgtgtatggatgactcaatggaatgaagtgggcatatttggagaatcgatcgacgacggtaagaatgactgatttgccatatacctttggtagggcttcgatgaaatccattgagatgtctgaccaaatctgagctggtacctccaagggttgcaatagtcctactggatggagtgtttctgttttgttttgctggcaaactgcacaagaacgaactcaatctctaaccagtgccatgtccatgtgaacaaagaaatttgtcctcaacctttgcagggttttctggatgccgccgtggcctgcggagtgggttgtgtgcaggatagcaggaagtatgctggaggattgtggtacaaaaatctgattgccatgcattatgagtccctctctgatctgccatggcgcaccctgctg

SEQ ID NO: 197026 - DNA, 506 bp, Zea Mays
tgaaatctggaacaggtccctctgttcctgatgcactctacggtcttcgtctccggcctggccttcgccacctacttctgctggaggctggccctggtttcgttccctctcgtcctgctgctcataatcccgggactcatctacggcaagtacctcctctacctgtcccgccggtcgcgccacgagtacgccaaggcgaactccctggtcgaccaggctctgggctccatcaagaccgtctactccttcacggccgagaagaggatcatccagaggtacacggcgatcctcgacaagacgatcaagctggggatcaagcagggcatcgccaagggtctcgctgtggggttcaccggcctttctttcgccatttgggccttccttgcgtggtatggtgggaggctggtggtgttccatcatgtgaccggtggaaggatatatgctgctgggatttccttcgtcttgggtggcctgtatgtttcttgcactcttcacgctttatctga

SEQ ID NO: 197027 - DNA, 304 bp, Zea Mays
cctggtttgagcactttgtctggtagagttaccaaaggatactacgcttgtgtccattgtgacaaagatccttgctccaaaagaataaggaataaaatatgctatattggtcatcgacgttggctaccacatgaccatccatggaggaaaaagaaggattatgatggacaaattgagaaccgtgacaaaccacaacaatttagtaccactgagttgatgcaacaattggaaagggtgaaggaagttaaaccagggaagcatccaaatagcaataagaggaagcgagatgcaaatggtggtcaat

SEQ ID NO: 197028 - DNA, 346 bp, Zea Mays
gccagacagttaaaacacctaccccggagatcctcagggatcgatcgacgggaaggtggcgaaggggggagttgacgtcgacgaggttcgaccctaacccagccctcccggtcaggaacaggcctgcgcaccgttccaggacgttgcaccaccgcaaacttcggtctgtgcggaggtcgagggagggactggcgggcagacggcaggggcggagggagcagcagcacgtccttgaaagtcctctgcgaggcaccgcttccaacggcaccaacgcccaaggccgatgaggacgggctggtgaggcaggaagacgcccaccgctgcgccttggaacgcccagcggggg

SEQ ID NO: 197029 - DNA, 740 bp, Zea Mays
ctaaggagggcaattatttcttcgcgttcaagctgagtgcctggtgttttgatccaatgagtctgcctgcttctttggatctccatgtggaagagccattggttgacactggtgaagagccttgtttcttcagacgttggtatacccggttttagtgttggtgtctcgttctagagttttgccggctgcgaccccatctccgccgccgccgtgcaacttcgacgatcaggaccctagttgccagagaaagcgaagatttatgtctcgaccccctgttcatacttcggtgcatgagcacttgggtccgcaggttcaatgcaattcggtgtctggcgagccagttgatgcttctgctctctcggccatctcggttgtagagcgagcggcacctgtctgcaaactcactggatcctgctctgccagtgggcgttccctctcctgtctccttgggtgctgtatcgccaacagttgttaatttggttgcccctctagactctgttgtaccggcttgtttgaatatggtgggatttggttcctcgtttccctacaacccgccccctttggaagttatggtgcatgctttttctgccaccccctcgcttgcgtgctgctctaccttgtgctggtggcttgatttcgggtggcactgctgctgggttatgtgacctggattctgatgtggcttgtctggcttcaagcttggttttggatactgaggtgtccgctactgctatcgtgac

SEQ ID NO: 197030 - DNA, 490 bp, Zea Mays
gcgaatgatcggttagtgttgcacttgtctagtcgataaatgttgtcataaataattgtgcaaaattggtcatgagaatgtcgtgggcacgtggtttgtttggatgtgacaagtagattggaagtgtggggtttgtcgaagcactgtgatgtcgaacgtgtatatcaaagtgcattgtagtggtaattgcgctaagtgaatcggtagtgtctcgagtgcacgccacaacatggttgtatgtgagacgggaaaatctaaggcgtgctcgatgggaatgttcggtcgttggaggtggaaattgtctttgcttgaatagagaggtgctgacatgccgaagtagtcatcgcttcctctatgtttataagtcgagtcaaaatatggggtactagtggtacgctaagcggtgctccaaataaattaaccagttaaggcgaaatctgtcatgcgtgatttattgttggagagtagtttgaattacgagttatatgag

SEQ ID NO: 197031 - DNA, 450 bp, Zea Mays
gatttttattaagcctagggactctttcgcaaaacgatcgggccgaagaggtatcccacgctacgatccccacgatcctatatagatggttcaaattaaatcagccccgcactgaaacggtatgcgcccgtggccgttagatcggcaaccaacagaccagatttaaaaccccaacgattgattcccacgcgtatgattcgaatcggacagttcagtttactctaaccgaatcggtacgctcggggagatccgggccgttcatcccgatcctactgttccgaccatcacacagactcttctaatcttaacagttcatcgcaaaatcgatggcccagaacgcgcctctaccacgctacccccacggcggcggcgccgccaccaaccacggcgggggatgcccggagttgggcgaaccggcaccgcagtgctgctattctatcgtggtttggg

SEQ ID NO: 197032 - DNA, 518 bp, Zea Mays
ctgattaagattgacatccattgccatattcaaggtgatgttgtccttgaatgcattagcattgatgttgatcaagaacgagaagagatgatgttccgagtcatgttcaatacagcctttatcagatctaacattctgatgttaaaccgtgatgaaatcgatatattgtgggatgccaaagatcgattcccgaaggaattcagagctgaggtatgtatttgttgcagtgaatcagtgtttttttatctagaagttatgcaaaagtcgataatttgttttgtcttctggttaaaggttcttctttcagaaatggacactgccaatcagttaggtcccatggaggtggcaggtataggagagaaggggggtttaccagttgaagcatttgcaaaggttcaagagatgttcagcaatgtggactggctagatccaactggggatgctgcagtccagcttttccagcgacttacttcatcagaaaatattcagctgaggcaaggattcttgtccccaagtaa

SEQ ID NO: 197033 - DNA, 473 bp, Zea Mays
gccgctcaaagtcttcttgtgtggtgtgacagctctgggcccctgtacacccttcgctttcctgcatccactacttcgccatcttcgtcagcctcacctgctttgactactaccgcttcgtccactagttggcaccgtcggctcggtcatacatcgtcccgatgttatgtccaaggtgtctagtagttttgtcctctattgtactcaaggccaccatgagtctttatgccatgcttgtcagttgggtcgtcatattaggctcccttttcctcactccactcaagtcgtgcgcccttttgatctaattcactgtgatttgtgggcctcacctgttcagagtattttgggttgtaagtattatcttgtgattcttgatggttgctcccacgagtattctgttgcacttgaagtctgatatgttcccccacactttctcacttcttcgcctgggtgtccacttagttcgatcgcac

SEQ ID NO: 197034 - DNA, 707 bp, Zea Mays
tggtgcccagcgtggtggacgtcacggtcgtcaccccctacgaatcccaggtgacactcaaggtatgtgttgtgttgtgcgccatcaccgtatcatcagttgcattccttcctaatccttcttctcccacacttgattgagcgcgttaacgctagctgattgatcagagagacgagtgactgtgctgtgctgctgcgcactgattgattgtgcaggggatatcgacggaccgtgtgctggacgtgcggaggctgctggggtcgaacgtggaaacgtgccacctgacaaactattcactctcccatgtggtaataatgctcgcctctcgcactctcgttccctcaactgcctacagtactagcagcaggcacggctaattctctggctgcgcggtatggtcgtgttgcaattgcattgcaggcgcgcgggcaccggctggaggacggcgtggaggtcgtggcgctcaagccctgcgctctccggatcgtcgaaggtgagtgggtgtgggtgggtggtggtgaattggtagcacaatcgagttgggtatcgtagagccaggtccctcccacccagtacacgagaggacgtacgtacctggctgccgtcgtccaggcaagtacacgtacagcgcgccctctgttggtctgttactctgttatgctgcgttcgtagtacagtacagtacaggccacgcaaggcagttggcc

SEQ ID NO: 197035 - DNA, 408 bp, Zea Mays
cattgttgcagtagaccaggatactccttatgagggggttgtgaagctcatggaggaccaagagatcaggttggccccaagaaacaccgcataaccagagttcgatcgacaggtgtccgggcacccaacccaatcatcatcggtgtggacaattagccatgggtggagcaccagaggtggaggccgtagtcgacggtgccctgaagatatcgaagggtaggcaaacctgttgaacgacatatgcgatgtcaggcttggtgaagatgagatactaaagagcattggtgagactctagtaggtggtggtgtcactgacaggagtgtcatcgccaaagagcttggcctgcatgtcgatcgaggtcacacatggcttgtagtctagcatgccgagctgctcgaggatgttca

SEQ ID NO: 197036 - DNA, 504 bp, Zea Mays
ggcttgcagggaagcattgacgacgacctgaccctactctgcaggtgtggttccagtcgggcaataccacctagcgacccactactgggcagcgttgctcacgccatgatgttagctttcccaacttttttgcaatttggcccttttcgggtttttttcccacatttatgcccctggcagtttcatttcaaaaaatggacccttagctcggcgccgtcatcattggcgccgagcatgtgtgtgccggcgccaatactattggcgcttatacgtcagacgccggtgtgatctggattgacgtggcacgtacctcggcgccatagatcttggcgaggtaggcgcccggtcaacgacgcctacctcgccaagatctatggcgccgaggtacgttcctataaatagtaccctacgtctggcttgttgctgtgctcatttcaattcttctaaactagagatgtctaggcgtggtaaatatgctaaacaaaggtaagttttggatctgcc

SEQ ID NO: 197037 - DNA, 716 bp, Zea Mays
gcacaggcttatcgttcagcaaagtgctgtctggaaagcttacactcctgagcctagcaaagaatctcgaccggagaaggaaaaaccgtcgaggaaagcttctgcatctcatcatcaccagaacaaagctggcacacgcgacacagctaagaatcccgaaggtgcccagggcagtgagaagacggaatgggcccgggaggacggtttcaaggagatctgcaggtcatggattgttctgaggaaagaatcgcggtcgtggtttctgagcttcctggaggatgcacttgaatcaggattcatgtccgagggccaaaccaccaagaacacgagagaacgcgtgcggggacaacccaaacccaagggtggggacgggaggatcgcggtcctgctgtcgcagctcaaggagacgagcaactggctcgatcagctgctgcaggacgaggcggacacttccgcggacggtttggccgaaaccgttgaccagctgaagcagaaggtgtacaaatgcttgcttggaacggtcgaaaccgcggcgtcggcactcggaggaagataaaaaaattgatgtaatggtgacgaagacgagcattaagttattgggtgttcagtcctgcaacaggatgttggggtgaagaacacaatgaggggaagatgtaaatagtcgggttgctcatttttaagttataaactaatttatttttattttttgggaggtg

SEQ ID NO: 197038 - DNA, 322 bp, Zea Mays
catcttggtggtgcctagttcctaggttgctactgtgtagcctgttatatggatgttagtgcaggcgagcgaggtgaggaagagggggcatggaggacaaggtggtggtgctggcagttcacatttgtaatggttggagaagtggtctaaaatgagggggaggtgagaatgacagcgatggtcatagttctctgcagctaaggtcaacttgacatcatccaggtgtctgtcttgccacccgaatggctgcctaggtgttcggcagcataggctgtaaaagcgaaggtcagccacctcgtagtgctgatttttttgctacgaa

SEQ ID NO: 197039 - DNA, 851 bp, Zea Mays
gtcctacttttgctagttcgcggtcggaagaagccatagccatccaggaagaagaagccatagcaaaagcagctgaggggggattagagaagaacagcagcgcatcagatagggagaattgaagctgatcttttgtatcatatatctttcctgcatgcttcatcagtccgacacttgagagaggttcgagagagaagttattaagctgcctccacactggtagcaagtgattgcatgcatgggggataggacatggcagcagccacatgcgcaggcttcttccccagacgcagggaccaaggtccaagcttcatcatcgtccgtccatggcaacatcatgtaaaccctaacacacatggatatatagctggattcggatcttgctctattttcttgcgaatatatagatatatagatggatcggaattgaaggtttgctttttttttttttgcttgcttttgactcctttcttctgatttctgaagcatatggtggattatatatactgtggcgtcaatctcttctctggttttcatcagatttttaattttccacggtggatttaatttaactgttcaacatagaatttgctcgatcggaaattttgtctttacataaacttattttttttattggtagcatttccagtatatcattttagtaactgaccaaactaaaatgatgattgataccagcctaatttataattttgcgtgtattgatttgtgcaagtgcagcagaaaggagccagctggaggcggcggatacgacgacatggccgagttcgatcaagcgctcttcctctatcttaacagcagccaggatcaagcatcagttattcaagatcaac

SEQ ID NO: 197040 - DNA, 1061 bp, Zea Mays
atcttctgccacaaagggaacttggtgttgccgatattgtgagaatagacaacagagggaaagttgtttggcatataacaacaatgcaatagctgctgggagagttgaaggagttgatgccttggaacaaatattcacgcggtcgatacgtattgctacaacacttgagactggatttggtggttgcgcactgtgcaagtaagtgttcttccatggcatgttgcttgtatatccaccctggccttcttttcttttgcactgataataaattacatgtactttcaatcttacctaaaacatttcgtatgctggcagagaaaatttggcaaacttctcatcaagtaatgatatttgttgaataagctggttaatgaatcggaagctcaatgttcgagcgctaaatctctttacccatttcgaactctctgattacttttgcataaatgttagtttcattaatcttactttaagctttatttgccctagttaattctgtgttagcattagtcgtggttgtttatgggtgtttggcgctaagtattgaccagtttgtggaagtcatatcattggtaccttctatcaaaaaaggttacatattgttttcgtttaatgccaacttgccaagtactacgacatttcttcaaaacttggagtgccataactttaggtccactttttggtatacaacttttgttgtttatatatgtttatatttgatgatctggagttgccaatgtcctttcctgtcacaagtatatataatccatgttatttggcaggctccatgatttcagcaaaaagaaattcagtacccgaaccgtgctgctttgtgaccaagtacgtttgccagtcatatggtattatataaaccaagggttacctctgcgagtctgatagtagtgtccttccatggtttatgtactgtgtaactcctgctgtttctgtgttctgcttcttaaaaggcatcagtgatttgtaatataagtcattgatatgtcttttttgatgatcagtgtggtagagaatatcatgttggttgcctcaaggaacataatatggct

SEQ ID NO: 197041 - DNA, 910 bp, Zea Mays
tttattagtagcgccggaaacaatggaccggctttgaacactgtgggtgctccaggtgggactagtacaagcattattggtgttggtgcttatgtttcaccagccatggctgctggagctcactgtgttgtacaaccacctgcaaagggaatggagtacacatggtatgttagtaccagtgtcccacaatttcatgtgacaccgtcttattatgaatcatgatatatattgtgcaactaaaataagtccaccgtgctgtgcaactaataaaataagtctcgtagaaccattggaatttaacaactgtatttgtttttactttttagacagtaacatttaaatctgttattggaaatgaaaggtctagccgcgggcctactgctgatggggatcttggcgtttccattagtgcacctggtggtgcagttgctcctgtaccaacttggacgcttcaatctcgcatgctcatgaatggcacttccatgtcatctccttctgcctgtggtggggtagctcttcttgttagtggcatgaaggtttgtgtggtcaattttcttttttgttcattaatgcagtacacccttttctatgtttggtaaaggtgtaaagcaagacaaaacactacatattattcttatttggaatatatttcaggctgaaggcattccattaagcccttattctgtaagaaaagcaatagagaatacagccgcatctataagtaatgcacctgaggagaaactgaccacaggaaatgggcttttgcaagttgataggttagccgtagttaacttgtacatgttattctatttgacgaaatttttgtgatatgttgtgttggaatttcagttgacattagttttgctttggcagggcttttgaatatgcacagcaggctaagaagttgcca

SEQ ID NO: 197042 - DNA, 464 bp, Zea Mays
acccgttgccaagccgacagggagtccggcaggaggacacagttctgtcagcaggccgggggaacacccatccgtagcctcaccctggcccatacccgaaaacatgtccagcccaaccggcccatgctcagccacaccaactgggccaagatcaggggaccccgaagcaagcatcacaacaatagggtgctacatgggaacagacgtgccgcccccaatcaaagcattaggagcaacacatgcagatgccgccgccatctcttcagaagccgaaacagccgggcaacaattactaatcagggcacaaaccaaagcaccctcctaagctcccacgccccggaaggacgagcatgcgggcgcatcaaccaaagcgggaccacgttgaaccatcacaggaacgggagactccccggaacccgcgacctccgcctcgactccaccagacaacaacgccgagcacgccg

SEQ ID NO: 197043 - DNA, 931 bp, Zea Mays
ccccctagctctgtgctttcgccttcgtaatatcttcgggaaagagggtcgtatattattgagatgtttcttgtacgcacttgtttgtttggagtttatgcaagcgtgacttcacaactagagtcacgcatgcatatgattgcgttttaagggggtcttgtggattgattaggctgactcaccttgtgctgatgatgtgacctgcgcccagaccacacaacacacatagatgtcgataatccaatacagagacagggtgctggccacattagtgacaaagttgtgagtggcagatcagggcagcttttcaaggaggcagaaaaatccaggataaggtaatctagattttcttcgagggatagatgctgtgtgctacctggttgatggtgaaaataaacaaatatccctgtaggtagtgcaagatttctaggagctgggatccctgaaatctggtgaagtcagttttgtgcttgtgcacctcctagcaactggctagcatctccccagtgtccaaagcattaaggtgttaggccgggaagacacatgggacctccatgcaactcatgtccctggaagcctcatcatgcaccaaactccagcttgtagcataaacatgtagagagagagagagagagagagatggaaaggcaggaggacaaacagtggtgatggcactaataccctgtactagctgctttcagatgtaaaagtgctaactagtagctcacctcaagcagcaggcctcacagcccacaaggctccaccagacacgcagcactggttgttgctcgctggtcctcctctctctcctttctgctcactctttatttttattttttttctgaacaagacgatgttggcaacttggcatgaccccagtgtctatattatatttatacatgcaggcttgccatgaatagctggagctggc

SEQ ID NO: 197044 - DNA, 425 bp, Zea Mays
cttagtcatgcctttcggcttgactaatgcaccgtcgacatttcaggcgcttatgaatgatgtactcaagccgttcatccataagtttgtactgatattctttgatgacatattaatctatagctcatcctgggtcgagcatcttcaacacatgcggcaagtattccagctgttacgagagcagaagttggccctcaagcgcaccaagtgttcctttggcgagacacaggtgggttacttaggccacatcatctcggataagggagttgcaacggaccctgccaagattgaagcagtggagtcatggccaccaccgcgcttcatccaggcactcagaggatttttgggactgactgggtattatcggaaattcatcgctggttatggcactgtagcagcccccttgacagcactgttgaaacgag

SEQ ID NO: 197045 - DNA, 541 bp, Zea Mays
tagcctgttgttggccagggcgaggaagctcagtttggagaagccaagatctgcaggaagttgcccggacaggtcgttgtagttcaacagtagagccttgccatccgcgactccaggaatgatgcctcctcccttatcagggccagttcccaaacgaaatctaaactcgatcattgcagcaacacagtgaatgttggctctagctctcccagtaacttcagaatagtcctgaacttggaggtcagtattgtcgtcgacgctaagatcgtacgagtattcaaggcctgtgagtcggggaatgccgccgttgccgaagttgttggaggcggcatggaagagtgcgacgtcggggagctggtcgacgaagccttgcagcttcggtgcacgcagaccgaagccattgagaactactgccgtcactgtgagctccttagctcggctggtcggtgttgcacagtagaagccgacgtagctcttctcgccgcagatgtcgttgccggcccacgtgccggtgatgttcttgggatccgaagtgatcgtg

SEQ ID NO: 197046 - DNA, 2606 bp, Zea Mays
ggtcgaggtgcttcatccacacccagcgaatcctcgccgcgggagtcacgcaaccgccgtctcctcgccggcacgcttcgccgccgccgcctctctcctcctcgtctcaaccgccgcctgcacacgcagaaaaggagggagaataagaggatcagcaaaccccaagccctccactcgtcgccccctgctgcaatcgccccacccgcctccgcccgccgccgcttctcctcaccgttctcttccttcccaggccgttcatagcaagcgaccgcagacgttttgacttttgagcgttgttgatacggtcactctttccccagttcctctcccgcgacatctcagttcttcatcaccaaaagatggtcggcggcggcaacgagttccgtttcttcttgtcctgcgacatcagccacccgcttgccttccgtgttctccacgcaggtacgtcactactatctctcttctccacctcaatttgcttgccaattcggccctgatgtgctcgccgtgctaccaccggctacaaaaactcatcgttttccaatgcttttcactcaacaaattcgcccccaacagcgatctgaatccaatattcctatattctcatttgcagatttgtaactgctaccatcacaggatttaactgtttgtactgttattacactgcgctgatctcttttcggttctaagtgcttatttggataccaagggctaattgttagagcaactccaaatgaacgtgtaaactaaccccaaaacagatattagtcaagaatagtggtttttcttactccaacagctccctcattcttcccccaaaaaattagcgtcccgcatccatagcctcctctccctcatattttggtgtgttccatccctccccaatccattcctcaacgcatcggatcatccacagcatctcgacgactgtacagattgtgccacatgtcacatttaaaggaactgttggagtacccatcataattcactcttaatattttttagcatgctcttaataatcaatttttggggtaaaatttttaacatccttttggagttgctcttagctagctaaaaattagccaaaattagctctagccatccaaacaggggctaataagtgggttattatttagcctagcctccaactaattgttagctggctaatttggccaaatttttagtctcagctaataactagctctagctgatccaaacatgccttaattcaatgtttatcttcgttcctccacactacctgttttcttctccttaatgcatctcaatcctccacactacctgttttcttctcaatgcaatggtacacagctttcatgcttatttgagaataccggtcagcattttatcccataggagaagcaaaattttttatttctttgttctatactgctgtaaaaaaactttcttgagttcgctagtatgcatcaccataattaaaatgattaatatgttgttcgtctttgtcttacacacacaaatacacatatatatttcacaatcgtcaaaatttcctgtttccagaacatatcttgttgaccgaccaaaaagtcccagagctctttgttgagtgcaagctatacatcgatgggatccaatttgggttgcctgtaaaaacaaggtacatatttttatttttatatattctataattatttaaaccaattgactgcactcaccagttctgtttcttggaatttcaatgcacattttttctcacgctaggttggaaccttctggaccgaaatactgttggaatgagctcataacattaagtaccaaatacagggacctaacatccctctcgcagcttgcatttacggtatatttcttggatttgtacaatgtacaccacacatcagttgtttttttccctcaaactatgcatgagagctgtatgtcatttcattaaaaataaaaaggttacaagagctaggtgaaaacatccctgcagagtagttcttaacgaaagaaattgtatctttgtgggtatcaaggttgatatttttttagcaggcatgtggaggggttccgtgtgagtatgatggttcaaaaagttgagcacatatgtttaatctgataaaaatatgtcattagatggttcatgctcaacatgttgtgtagctctttttatggtagaaagtttagcttctcatttaagtggaggcattgatttatttccacatgcaccctgaataaacaaataggatgttttttctatcaattttattggagatcaccttaatggtgaatcaaatttaatgacctgattataccttgatggtagtgataacacattatattagggaagtaactttgctatgcccaatgagtattgtggtttatgatgttaataaattcagttcataagatcattggtgtccagcatgatttatggagtgctcacctgtatggttttccttgtgttttagcttcctatgttttttaatctctgatgtaggtgtgggatgtctcatctggtgagaaccctgaggttgtcggtggagccaccatatttctttttaacagcaaaaggcagcttaaaacaggaagacagaagctgcggctgtggcccacaaaggaggcag

SEQ ID NO: 197047 - DNA, 407 bp, Zea Mays
ctccgtatctggctaacagccctgctcagcgctcgtgctcgccactccagtgctctagcttgttgtctctgctcgttgtccctttgccgttcacgctcgccactgcctccctttgcttcccctgcccctgctctcatccttctccccttcccgattgatctgctcacattctcctctgattttggttatgatgatgaagcaacaaacaatagtgttggctatgatgatgagcaagacaaagtcaagaatgatggtggtatagatgatttggatgatggttattgagatatgatagagggagattgaataacgcttgtgtgcttgcaattgtggacattgtattctactttagttgcttttgtgctatgtttgtgcctttgtggttgtggacattgcatttcacttta

SEQ ID NO: 197048 - DNA, 562 bp, Zea Mays
aattttgttgattagttgttgtagttccttctttgtggtcagcagtatcattgttctgatgaattcctacttttcaggacgatctctatcccttgctcatgcactatgcactaagaatcagaggaactgactgactgtcaccccgaaggtacacttcttcgggttcatctttagccaaaacctcctggtccgttctagtacatggcgcaagtcctctatatgcccctctatggatgtagacttgactatgacatcatcaatgtaaatctctaccagcttccctattaggtcatgaacaacatggcacgttgctatgtagctctagcattcttcaacccaaaagtcatgaccaaatattcgaacaatcctaccgagccgggtaccctgaatgtggttttgtgcacgtcttccgaggccatgaaaatttgattatacccagcattcccatccatgaagctcaagatcttgtggcaggcagctgcattgatcaacacttctgtgactggcatgggggattcatccttcggtgtggccctgttgaggtctctgaaatccaagcaaa

SEQ ID NO: 197049 - DNA, 439 bp, Zea Mays
gtggcatttgataggcgcttctgtgtgggttcggttgatatctgtgcttgaacatcgtctaagggaattctttgagaaagagggacttgaacatgaagctggtgttagtggttcagaattcaggggtcttatcacttctgttgctgcaaagtttgttatggattccattcattttgtgtcatcttcattagtaccactgcatgcatcgttcttgaggaagaatttaccgatgaattcaagttcaagtttgctcttctggttagagtccaagttgcctcagcaactcccagtcagtgatagctatgatcacctctcgaggatttcacagctttcaaacagtgagaatatggaggcattgtttaatattttgtgggaaatatctgttaatcctgtggatgtttgtaatgcctttgtgagtgaaggagttaattgtttttcc

SEQ ID NO: 197050 - DNA, 303 bp, Zea Mays
caaagaagttcagcaaccacctgtacactcaggcatggtcagttgtcgacttcaaagctccaaatatctatatcccaagaaggtcaatagcagagacacaggtcagcagtggaacatgcggtttcaacagttacagcaaggtggatgtcataaacaaccagactacctgcgtgtgcgtcccacagtacacatttaaaggtggaagtaaaggctgcacgcctgacttccagcaaccaagttgtgacttggatgaagcaggtgccacgaagcagtttcagttagtaacaatgagcaatgtggatt

SEQ ID NO: 197051 - DNA, 597 bp, Zea Mays
ttccgtagatggattgatgacttggctcttaaggagttgcctctggtaggtcgtaagtacacatggtaaaatgggcagcagaatccaactcttgtcaaattggatcgtgtcttcagctccttggactaggatgatcagttcccttgggccctactgcaaagtttggcctcctttgattcagaccattgctcacttcttctgggtcttaaggatattgtgcaaggaaaaccgcgttccattttgaggctttttggccaagattggaagggtttcaggaagctgtggaggaagcctgggctgctgtccctgccagacactgtccgttgtttactctttccatgaagctcaaggccacgactaaagctcttcaaggttggggtgagaaaaaagttggtcatattagatcgcagcttgatcttgccagagagctgctacatcagtttgacattgcccagtacagtagaagcctttctcctgaagaattatggttgcataacagattaaagcagcacagtcttgctcttgcgtccctatggcgatccttggttcggttgaggtctcgcatttgctggctgaaagacgaggatgcgaatagtg

SEQ ID NO: 197052 - DNA, 298 bp, Zea Mays
ggagccagtggaaatgacaggaagaagcgagccgtcaccaacaataatggaggaaggtgcagtaatagagggagttgaagtttttgatatggtacccgcgttggaggtcatgtgggaggttgcacctgtgtcgaagtatcggtcggtctgctgaggcggagtcagggacacaatactgaaggcggatgcaagggactgagcgtcccaagatggagtggccgactgtgccaggatgccgtagggagactggggaacacttccctgcagagggtcagtgtgcagagtgtgctgcagcgag

SEQ ID NO: 197053 - DNA, 311 bp, Zea Mays
ctagagttgcatgtatcagagctggaacaggaaaacatagagttgtcagaacggatatctggactggaagcacaattgacttatctgacaaatgaaaaggagtcaagcgagctacagattcatgactccagatcgctcatcattaatctcaaagataaagtagagcggcagcaatccgagatggaaactcaaaggctcgagtttaagcagaaacaacaagaatctcaaagaagattgtcagaaacacaggatgattctgaagttctgagaagatctaattctaaactacaatctactgttgagagccttat

SEQ ID NO: 197054 - DNA, 533 bp, Zea Mays
atctatgatagcgtactttttgacccaagggagagtatgattaaattttagttcttccctacaaggtagaggcagactcttagttgaacgttgaactatattgtgttttcatttttacctctttttgatatttacatttgctttttttgaggatgatatttacatttgcttgtgtaggaggagtgcaaacgtttaaggcagagcatgaagtgtgatttaattagcagactaaaagtggtactgctacatgggactaaacacttgtgacctagttttgttttggcccatcagatatgtgtaggtttgattggtgtttgttttgtgttattaatgcagggtgatatcctagagaaagccaagatattgcaatatgtaagagtgaatgatgtaaggacaactcgatatgtatacaatgatatgtttttcttcaaaagatctcaaacttgacttactggtatttataatcgtgacagtggtttgaaaatgaaaagcagaggcttgggcatcttcgtgaccgtgcaagtgaaactggg

SEQ ID NO: 197055 - DNA, 292 bp, Zea Mays
gaaggggcgacggaggaagcagagatgtcggaccgatgcaggcggcgacgagggcagtggctggaggcggggggtggcgcactggagtcgatctcctcaaggatgagataattgcggacgtcgtcgaaggagggaaacggcttcgagagcttgaagtggaccttcatgtgggcgaacttctcgtccaggccacgcaccacgttgaggacgagggtgcggtcgtggatgacctcgccgagatcaccgagggcctcgaccatccccttcatcttgcgacaatagtcgctgacgg

SEQ ID NO: 197056 - DNA, 428 bp, Zea Mays
ctggagggtgcgaatgagattggtgatggtgcaaatcatgtgttcggccttgccgttctgaggagaggtgtagggctaggacatccgcagttgcacgtcgcgcgagaggaagaaggcataagacatggagttgtcgaactcccacctgttgtcacactgaacagctcgaatggtgcaaccgaaacgagtcaacacccaagcaaagatgtgagagagggtggggaatgtgtcagacttatgagggatgggaaaagtccagaggtaatgagagaagtcaaccaggatcacaaaatagtactggttaccggagaggctcgatatcaaggaggcccaaaggtcacaatggatgagatcaaaggggacagctgtgcaggacatggaagaggtgtaagataagcgagtgtgatgaccaaactaaaaaacatggc

SEQ ID NO: 197057 - DNA, 655 bp, Zea Mays
tggttttaaatattacctggttattcttgataatttctcacattacctttggacttttcccctccgcctcaagtctaacacttttaccacccttgctaatttcttcacctatgtgcatacccagtttggcatttccatccagggagttcagtgtgataacggccacgagtttgacaactccagctcccgcactttcttcctcaccaaagccgaacgtattattcgcaccatcaatgacaccgttcgttcgctcctttttcaggcaagcgtccctccttactgggctgaggctctcaacaccgccactcgtcttctgaacatcttgcccaccaagacacttcacttgtccacacctcactatgccctcttcggcgtagctccaacatatactcacctccgtgtctttggttgcaaatgttatcccaacttatcttccactactcctcacaaactcgtcccccgctctaccttgtgtgtcttccttggctattccgatcatcacaaagggtatagatgtctcgacattcactccaacaagatcatcatttctcgccatgtggtcttcgacgagtaatcttttccccttttccctttgccgagcagtcttccacaccgtctgctacggatttcgagtttttgttggacactgaccctc

SEQ ID NO: 197058 - DNA, 681 bp, Zea Mays
ggcagaggatgtagggagaaaggttacaggtggttctgattcagattcttctggtcgccagggaacaaatttgagcaggcaatcatccattaccatccaggaactaaacttccaggctagagtgatgggaccaggaaaagggaaccaagatcggcatggcgaattgcaaatgaaggctaatgagttggagaaattatttgctgaacacaagttaatatcatcccgacgaggcaaacctacagatgtgcaggttgatagcacacgtacggtgagtgaggtaaagccgataacagttcttcatgagacaattcatacaaaacaagttgtaaaggagagtataacaaccaatgattttgatgccagtgagcttctgaagatggtgagtaatcaaggatttaacattagcacaccacaaaaacttggcattctaagcttagaagagtcgagagggaagttttatgagcattatatgcagaagagggatgcaaaactgaaggaagactggaaactgcagaggggggagaaggaagcaatgttaaaggctatgcatgagagcctagaacggagcaaggctgagatgcgagctaaattctctcagtctggagatgtttctgactcaacttatgtttatcattgttctcagaagattcctccttcgcgatcagcaagaagaaataatga

SEQ ID NO: 197059 - DNA, 310 bp, Zea Mays
attttgtggagggacttccccgctcagggacaactgattgtatcctagtcatagtggacaaattcaccaaatttgcacattttcttcctcttactcacccatatactgctgcttcagtggctcagtcatttttctccaacatatacaagcttcacggccttccagctgccatcatatcagacagagacacaatatttctcagtcagttttggcatcacctattccgactggctggcacagaattacgtttcagctcctcttatcacccccagacggatggacaaatagagagagagtgaatcaatgcctg

SEQ ID NO: 197060 - DNA, 308 bp, Zea Mays
tatagctgcgtgaatacttgatggagttgaggacgcgctcaatttatagaccccgaggtcggtagctctcaatttgaccgcgatgtgttggcggccggagaagaagtgagtcaccggcatggtgattcgtggcctccttaccgtgacggccctcccggcggtcatcagaccagtatggcaccggggttgcgacgtggtaacaacggaggcacgtggcgttcggtcgtcggacagccaactccggtgaggataacttcgaccgaccgcacgacaagtggacatgacggccgaaatagtttactgggccg

SEQ ID NO: 197061 - DNA, 556 bp, Zea Mays
tgctcagtcggtatgaaaaagaatttggatcaagaaattatcaattttctgctgggaaggtggacttcgttgttgttgatgcccaaacacttgatggtatatttcttcacctccacctgtgcactacagcattaaaaaaatcaacaattctagtacaaaattggattcataatatagatttagaatctacgatttgattgtttttcttcatgattaatgatctcaagttgtccatgattttcctgcgaagcaactgctttctgcagctaaaacttcttaccaacttaccatctttctagcaggagctaaacaaagcaaagaaaggtcctcctcttgggagttcattaaaactctatctccaggcatgctcttatacagatgatcacacattatctacaaatgctatcatttgctctcacctctcagtcttagctatttttttccttctctttaaggtaacacatcaaacccaaaggttctgctaacacatattccactataccgacctgataactctccttgtggcccgcatcgttcttcacctgttataaatcag

SEQ ID NO: 197062 - DNA, 472 bp, Zea Mays
cacgattactggagcttcgtacaattcctgaagcattaccctttttcattactccaaaagcagtagatgaaaattcagtgctgttacagcaactaccacactgggctccatgttctgttacacaggcattggagtttcttactcctccttataaaggacatccacgtgttatggcctatgtccttcgtgtcttggagacttacccccctgagactgttaccttttttatgccacaattggtacaatctctcagatatgatgaaggggtgagaattctttcagtgatatgcatgtttctgtcatcaatgtacacaaaggacaacttcagtctacatcttttgctttatcattgctcatagaagccatattattttcttaaataatctattacttgtatcttatttcttatgccttttaactcaatcagaaactggttgaagggtacttgcttggagctactcgaagaagtaat

SEQ ID NO: 197063 - DNA, 475 bp, Zea Mays
cgagccgttgtcgaggtgtcgtgcatcgagtagttgtggtcgatgtagctgtcgaggacaccgaagaagacaaggcgcacaagtcgcgggcgcaggcgcaacacgcgggaaggcccgcggcgcgccagtaggcgccagggtgacggtggcgcagaagaagggtgccatagacgaagacggcaacacagttgagacagtcgtagaggaagtagccgatgtcgaggacgatgttgtcaaaccgtcgtggacgaggcgtgctccaggtttgccactcctggaaacgcgtcgtatacgaatgcacgtgtcggtgttgtcggtaccgcacgtactaggtagaaggccccaaccatgtgtcagcgtctgaagggaccagtagagaagacctcaacgacggttgtggtgcggtatggcaggagtgtcgtcgcagctcacggttgtcagagcggagtaacgtagtcgaggatgagacgacgac

SEQ ID NO: 197064 - DNA, 1199 bp, Zea Mays
gctcatggcggcagcgggcacgattgacgccgctggaacagagacagcaacggtacggttcttgtttcatcgaagtgcctggaaatggggttaggaatccggtgggtgtattttatttacaaatgctggatattcagattctaaggaaatatggagagccaatgcacgaaggacgttattatttgtttaactggggtttgctttgaagtggaaacgccatttagtgacattttttgaaaaaggaactcacattgttgctctcttatttggacggaaattagcttgacgatgctttctgggaggaggtgagcgccatctgtgaggagtgtgatgcccagtctgctgccaagagccaggagaggacgaaggaggaggggagcttggtgctgtcctgcgatgatgcttcactcccccctgctatttccatcaccgcggagggtggggaggtatgtgaatattctgtgttcatgatgtttgtttttgattccatgaatcagaggaggaaattgggacgttcttgtatcgagtatggtgcatgggattgttatagatttggggagaatccttaagttatgagagcacttcacaataacttaattttttgtttcatgaactgaaatgattttaggaaatgtctgtgaaacatagcaaattcatgtttattgtgtgtgtggcgaagataggaaataggcatgcacaatttggggtttattgtttcttgaaatgcgactgtgttaatgtaccttatttgtaagagaaatttattgtgttgaatctctgttgaatttcttttgagatgaatttagtttgaagatgcattctgggagatcaatgccgttatggaggagcacaatgccaaagctcatgccaagtatcaggaggggctcaagggaatggaggagaaagatggattgttagcactgtgcggtgatcatgatccttcagtttccccagtaatatccgttgcaatggggggtggagcggtatagcttttttcttcagacaatggaacaccgagtagttgtaggacatcagacagtttttgtttcctgtgtctggaaattagcatcagtaccaaatggaaatttgtactgagtggttttagtctggaatgaagtctctaactgagttcatttgattccttttctcttgggacatatttagcttgttgatgcactccttggtgaggttgatgctgc

SEQ ID NO: 197065 - DNA, 772 bp, Zea Mays
ctcgcgagcaagctctccaatgatgagtggggaacggtcctgttgtgcttcaaagaatcagcatcacatacatttgttgtgtttgacaaaatagttaaaatgatgaaagtcattgaaattccagatagaaatgaatcttactctgaagctgagcaatattcagatcatgacatatacaatgatgaagaagaggaagccaatatggaaacggcgtcttatgctattgtcagaatgaagaatcatatggctttgcaactcttaatcgttgaggtacttaaactaaagtatagaattcatgtggcattttgttagttctactagttttcagtaatcccctgtattgtaagcctgctagattgagaccatgaaagaacaaaaaaacaggacagacctagtacacgtggcttccacatgagtaaggtctgatgaaggaatgaataaactgaggtaagcctacacccgcaaatgcggaggggctgcttcaaatccatagcctggtgactcagtgagacagctctcaacactgcaccatgtctgtccttcaagaccatgaaagactatgaattcctttgcattccaattaaaatacgaaccaaaattaaataaaaataattctattgcatttttaatgcgccaacagttataaatcaaaaccttgtcttggcttccttgcagggcatcatcaaattgtatgaggttcacaggagctttcttggtgctgagcatatagtcataatgttggagattctatctgccattgcatcacatgcaa

SEQ ID NO: 197066 - DNA, 371 bp, Zea Mays
ccgaactctcatacaattctcacggtcagttccactaatagcatttatagacaacttatatacttcctccacttccttatcttcctgatccagctgctacaacgcctcatctgacaaaaccaaccccatatcctctatagtcagattatgtaattgtgctccacctcttttaaggcatttagcttgatgccctggctcgtacttctctccacaaccaaaacataaaccatttagcctctgaaaatctctcagttgcctctccttagccaaatcagcagggccagttattgctctaggatctcctttcgctgtgttaaccatcactttgccccctaaataattcctctgaaatttggccttgttcatctcca

SEQ ID NO: 197067 - DNA, 407 bp, Zea Mays
gttaaatctctggtccttgatatcaagccttccattgtttgtctacaggaaaccaaattgtgtgctatctcggactttgacatgttgtctattcttgggactggtttcagtaattttgtgtatagtcccgcccaggggactagaggaggaatactaattgcttggcgtgatgggtcttttgtctctgtggcttcggttgtgaagaatttctctgtatcagtccagtttcaggatgagtctggttcttcctggtggttcacaggtgtgtatggacctcaccaggatatttttaagcaggagtttatccatgaattgagatcggttcgtgatgaatgtgtggggccatggtttttatgtggggattttaatatgatcctccgggaggaagataagaataattccaacat

SEQ ID NO: 197068 - DNA, 904 bp, Zea Mays
ataacatgacctcaaggccaccagggtctggtactgcatcaggtacttccagtcagaggcaaacagttgcaaggtaaaggggcaaaaggacccttctgtgatacattcaaaggatctgtgctgtttgtttatgtatatttttttgtcagcacacttatgtttactttagaagtttaaagtgattttctgttttccttcacataattttgttgtggctcgtatgtctatttttttgttactgcttggtgttaatttctttggtttagtattgttctttaggtagttcatttcatttagtttatgacattctagttcttgtgaaaaagataatttgcaatattgtcggtgtttagaatcaacataatgatctccaaatgtttgaatgatgcctatctctataaaatagagaattattctcaacttcaatattttcagaccatttagttctaattattacattttgctgattgctggtgttaatattctattttgtattcacagtccttctgcaaacaaacatatggttgctgatggaccagctgcatcattgcaatcatcgtctgggtttcagcatggtggttggtctgggacacctggtcagttgtcgatggctgacattgtgaaaatgggccggcctcagggaaagacttctatcaaacctgtggtcacagctgacagaggttatgctggacagtacccatctttgccaagcacaaaccagaatctgaaacaatctggaagcatggttcccccaacagagcttgacaaggggttacaacctgcccaagattcggttcaggttaaggatcatgatcattctactgctgacagcaagctcccatatggtactgactggtctccacaagatggcccgacatttgcgaaccaatcttcccttcctgag

SEQ ID NO: 197069 - DNA, 571 bp, Zea Mays
agaaaattctgtagcttctattcttgtttctcttctagatatcttgtttcttaagaaagatgtgaagcaaaggtctggaactacataactatttttgtgtagtaccctatgttctttatggctgacatgtcaccctcatgcaggtcgcgtttattacaacctcttttccagattctatcgaagctcctttctgatcaatgggtctcagttattgttagtcagtataacgaccaacaagatacctcatctgaaatccctgatttatctagttttgtaaaagaagttcaacacttggtactgctggccctcaaagatattacagatacactacaatcgggtcaccatgtacttgcttttgttattttcattcgatcactctagttctgttgaggttcttttatttgtttggatttatggattacatatcttcttgcaggatgcaatggtcagcagttccgatgtaggtcttcttattgattgtgtacggtccatccaggacataggaactcggaatcatggcttttccttgatagcttctttgggaaaggcttgcccgcaactggtctcagag

SEQ ID NO: 197070 - DNA, 580 bp, Zea Mays
ctgccatcaacaggctttgatattgtattgggagtccaatggttgcgttctcttgggcccattctatggaattttggcctcactatgaccatctggcggaatggctatacggtgatttggcatggtattggtacaacatcagcttcctgtgtagaacagtcccgggatcatgaactcttgccgctctatttacttcctttgatgatatcttttaagatccacaaaggttgccccccctcccccctcggcgacatgatcatcacatcaggctgctacccggatcaacacctataccagtaagaccttaccgctaccctcaacttttgaaggatgagattgagtgtcaatgcgaagatatgttgaagcaggccattatctgggagtgtacttcgaccttctcctccccagtgttttacttgtgaagaaatcagatggctcatgtcgcttttgcgtcgactatcgggagttaaatgccctcacaatcaaggacaaatttccgattcccgttgtcgatgagttgttggatgaactacatggagcccaattcttcaccaaactggacctccgcattggatatcac

SEQ ID NO: 197071 - DNA, 428 bp, Zea Mays
ctttaggaagcccggcaatggccacggcgggcagcagagggtggtgaaccagcccgacacaaccggtttccaacctgcccccgcgcctgccccccaccaaactcctgcgcgaccgccacctgcacctcagaatgcggctgtgcatgttcccatatccgcaccatggccgcaacctcaaggtgagtgagtgaggtgtcctgttcttctgctatcttgtattgcctctggaatggtgcaaatacgaaccgatgtgttcctttgattgcatgtgtttttctttgactcaccaggtccacaagtgtcatcttcatcagctgccagcgacaggccggctaatccgccattacctaaagctactcatgctgctccaagggctccaccaaaaagctctaacccaccccttcctcagggaggatcgaaaggtttgc

SEQ ID NO: 197072 - DNA, 994 bp, Zea Mays
gtttgaaataacagaaccatggaactccacacttcggataacaaaccagagaatcagtatgcatcaatgcatcatacacagccaaattgtgtataatacttcatctgcatctaccaggatgcaccatggaggggtgcaggtgttgctgtacccatgttttcaatcagatcagatgaggaccttggcgttggagaatttctagatcttaaacttcttgttgactgggcagtcaattcgggcttccatcttgttcagctccttccaatcaacgatacttcagttcatgggatgtggtgggattcttatccgtacaggtatgactaatattcaataccaaaggtttcctgctcgtaatggtggtttttcttgaaatcagtaaggacgttatctaaacagtagcagtgcccctcatgtgtgaattacagctccctgtctgtgtttgctttgcatcccttgtacctgagggtacaagcactttcagatgcaattcctgtggatgttaaggtatacctttgttatgctttcaaattttttcattgtctgtcttggttgtgttatttttattccactaaatgtttgttacctcgtttggtacccaatttaaaatttactacaggaagaaattcagcaggcgaagaagcaattggataaaaaggttattgcatttgcatgttgtctttgattgttgtagatctctgagtaaatctttaatgtttggttattccttaacttggaaatgacctgtaaattaggatgtcgactacgaggcagcattgtccacaaaattgtcgattgctagaaaaatattcaatttagaaaaggaaaaagtgctaaactccagttctttcaagcagttcttatctgaaaacgaggtacattcactgccatttcgcttatcatgtgtaatcatggtacttgatttcctattccaaactgtatgtgataagctttcacactgctccaataggaatggttgaaaccatatgcggcattt

SEQ ID NO: 197073 - DNA, 783 bp, Zea Mays
ctttgctggtggaactaagttgttgacgtctgagctttgggctcttcccttctactgagctggctatgttctcgtatgtggcgtttttgtggaggttgattatataacattggatcatattgtgatgggtctggtagttgggggttgtaagcttcccactgttgtgactgatgttgcacaattgggcttgaggacgaagaatgtgagttctgcccttgatgctggatgtatgacacatcatagttagtcgagcattaagatgatgtatggcacacattcttcggctggccttcctgcttcacggttgccaattccttatgcttttggatggtgatgctacaatattttgttgtatgctctttattctccccgcaaaatacacaatactagtcaatggcgcgcgccagcgcttgcataggatttccctttttttactgggaaggtagagcggcacaacaacagtcgtcgcccacgcgtgcggctagatgtaccaacggccaagatttttcgcgcgacatggatagtgcgaatgtcgaggaagttgcatcggtttaataagaagaaatagctttcttgattgaccgttgttggagtacctgcctccaaaggtgtggccccccttctgtccctttgtgttgagccaccccagaaactactttgctggctttgctaaggtccgttcgaaggttggcttgttgttggagtttgcggaaactacttttctccatcaaactagggtgtagtctgaattgttcgggcttcccttgcatccttgttgaaaac

SEQ ID NO: 197074 - DNA, 453 bp, Zea Mays
gaggtagtaggcacatggagaacactgataccaccgagagccacccgatctcgaacaaagtgcaaatcaatctcaatgtgcttggttcgctgatgttggatggggtttgaagacatgtataccgcactgatgttgtcacagtaaaccaacgtggcacgacgcaacgggtgacgaagctcggccagaagctgacgaagtcaggtggattcaacaacagtgttggcgacaacacggtactcggcttcagcactggagcaggacacaatcatctggcgtttggaggaccaagaaataaggttatcaccaagaaaaactgcaaagcctgaagtggatcggcgtgtgtcaggacacccaacccagtcggcatcagagtatgcaattaactcagcctgagaagaagggcgcagctggagacccaaatgcagagtgccacgaacataacggaaaatgcgc

SEQ ID NO: 197075 - DNA, 342 bp, Zea Mays
ttagactatgaagctcttagaggagaggccttctcaaacaaaaatggccaagaacaacctggagacaatgaacccacgtaagtgatgcttgtcttgtaattgcagtagattttatacattaacatctaaatttatgttgtatttcgcatttggcaatcaagttgattggtggcgttcatatggtgggtgtgctattgagattcaatggtttgctaggcgtattgttggtctttgcgcttcctcatcgggttgtgaaagaaactggagtagatttgagtttgtgagtattgttgtctttgtctaattgtttaattcttagcttgtgtctagaatttaagccaa

SEQ ID NO: 197076 - DNA, 303 bp, Zea Mays
cggacaatagtccagctcgcgagatgtcgaaatagtgactctgtgaggcgggtagcagcccaaccccgtagctgtcagagtggttagtgagcttgatgtttgatcatgtaactttgagtcttgaactttgaagctcctattaaaacttacctgtgactttttatgacacataacgtgagaaccgatggtgctatgtatcgttgttaattcatactcagacacataaaggcagcagtgatccggccgtgagtatagcaccgatcttgaccgtcatatcgtatgccaaaccgacggtgaaaatat

SEQ ID NO: 197077 - DNA, 324 bp, Zea Mays
ctattgcatgtcaaggctgtcgtccataagccagcagagtatgttgaagaacatggaaggagacgaggaggaggaggaagcctgctgctgcaggacggcgcagtggatcaccaccgattcagactgtgagttgtgtcgtctgcattgtttattttgtctgtatatatagctgaacatgtaaactaatgattctcggttggctcgcagttgtggtgttggaactgtaaactaatggtcatcaagacatcaattacactagtgtatctatggtaaggtctgtgtctgtatcagatcagataccccgacggacttcgctgcattaca

SEQ ID NO: 197078 - DNA, 311 bp, Zea Mays
ccttgtttgtgcattttttatagccattggatttgcaaatgcctctctttggttctcataaagaacagcttgggcatcaatcctctctctaagatcttcatctaccaccattttgacaaacacatcattaaagcaaccccttagctctccaacatagccttcatcatcacctgctttgatgttgtagaattttccagggttcaaatattgtgctgctccatataatggggtatccatttggttcgcccaacgtcgatccacaatgttcatgatacgtttcagacatgctttcttgttttgagaatggtatg

SEQ ID NO: 197079 - DNA, 647 bp, Zea Mays
ctggaagttgattctaccattggtgattctcctcgagttgatcagttgtcaacaaactttatggctgaggaagctgatagtttaagggccacctacattcgtaggctaacttctgtactgatccagcatgttccagctttctggagattagctttatctgttttcagtggaaaatttgccaaggtaagaaccttaacagttgcattacaatttacaagaaaaatgtaaatagttgacattgtaactaactaactatatggttttcaaaattttttcacgaagcatatagctctgctgaaccacagaaacctatacactcttctacctctaatggttgtgcaatagtaaactgaaattaaagggtatttatgataacacctgtatgaatcatgatgcctgctttactcattgtgaagaagatgagaatgatccttcttatacttatttttgttttggaaagagattttacatggatttgctaattatatatattgtttattttcaggcagcttctggtaacgtagtttctgattttgatgtgaatgcaaagccgactgcaaataagaatgatgaaaaaggtggagaagtaaagtacacaaaccacactcttgatgaagttggtagtatggttcaggctactatatcgg

SEQ ID NO: 197080 - DNA, 537 bp, Zea Mays
gttcggatgctcagtttttgcacagaatgacagggttaagggcaggcatacctgtggttgctcgtcgccagcaaagggcccgacgattcgacgaagatctgggcagttccgggtaatgcggtggcggtcgcttgcacagttgcactgatgtcctgtccccgtacggtcgagaaacctagcccggcgtaaacaaacggttggatcgcgtgggagaaaaaacagcagcaaacaggtacaggtgtgggtgtggctagagatgtaaggcctagcttggcaccaaatgagaggaaaaacaaggctaccaagggattaaatatatgtcattgttttctctcacttagattggtagtcacaaaatccaaaggaatttgtcgggaccaataattagtgacacccaaattatccctaaaaacacactcagaaaaatacagactaaactcccgatgggtgacagccgagccacctataaaaaccgagacatcttttcgagcgtctcccaccacgagcagggctccgcctcgtccgaggccgccgccg

SEQ ID NO: 197081 - DNA, 348 bp, Zea Mays
gcttataaaagtagagtagcgtagagggggtgaatccaaccaacttctaaagggcagacatagaggtgaactagagaccgatagtctagaactataaccaaaaccacatgaaaagggggagctaggaggtcgtggtgctcaattgatatctgagcttataatcttcttcatttttgtgtttatcaatccatcatacacaagagaaagtaggctattagtgtattacgcatagcatgacccaaacctctataaactgcccaactgtctatgtggtagtaaccaggttgcactcaagatcagtgtacatacagtaccctcactctatccacaaactcacatgcccctctt

SEQ ID NO: 197082 - DNA, 1396 bp, Zea Mays
aagcagtgtacccattaccccgaattaaaaatttggcagtgcatcccaaattcaatttggctgcagtaatttttgcggttagaccatgctaactatgaacctaaatatttttggtacttaatgacaagggtttcagaaacacttgacatattcaatttgtaggatatgtctgggacagaagctgcaaagaacaaagctgcatacacaagagaagggaggagacaactttttgctcttcttcagggagctaggggatcaactggtaaccttccttttccttgagttattttcatgtttactttaatggggccctcagggaaatgtgaaccttggttcgtacaggacaaaacaatacatcatatcatgctacttatgcaacactgatctaatgtcaatccttggtttacttgccacaccatacttatggtatatttgggtaaaaaatagatgtttcaagcagtctgtgaatcctaagtacatcttggtttactctggtgctacagctgctgttttaaaggagaaactattagccttgggatcatctggaatattagcagagcatcaacttcaggcacaactacaagagcagcacttgaaggggtaaaattcagtgctacctacatagatcataaaaactttttatttgtctgaattcagtgttttgggggttcaataatgattctatgtagctataattttttattggtttcatgtcatattgattgttgtattgatttcacctgttttcttattgtcagccagagccagctgactatttcagatgttgcaaggaaggcattccttcacagtgtatgtgacaattctcttgacagtggcttcatagtactttttgccagttttctttagtagctcaacctgaactgttactgcttccacacatttattgtacctgtctaggttacaaaatgatgtaagacctatttctgtttcctgtagtctcagtgctgcagaaaacaaataaattaggaatgcttgacaatgaggccttccaaagaatcttgtgcatactttagtgctgccatcctgccatgtcacccgtgttgccacattcaagcacaggctttcctaatgtggtttgcactgagtcgagtccttatccattggttgattctactagcttagtcaacaattgtgtttgtagaccatttctattttcttatatatatattatctgtgcagcatttcatggaagggcatgctcaaagcggtccaatccctcgcctacctcttgttacaatttcagattctagcaaccttttgcgagatgttcctgtttgtcaggtaaccgttagagtaatttatttttttatttacttgctctctttttgttctctaaacaattagttgattttgcaactccagccattccatctag

SEQ ID NO: 197083 - DNA, 425 bp, Zea Mays
atcaagaacaggcaatttgaagttctcaagaggtatgagaactctggcagagtagtcccgatcaattctagttttgtgacaagcagcatccccgtctgaaattacttcttggtccacatccgtgtcatccaaatgcacagcaacatcaacataaaaaacgacatcagtaggattgaaaagctcaagttccagaaggcggagcccccagcttcctttatagggatcaaccttcaataagtttatgtctttgccactgacaggttttaagtgtgtttcagtaaatcgagcaggtatttccatggacaacaggcgtgctcttacaagacgcatgccctgcacaacacagatattcaagggaacaactaggcgtcttccaggtagaagagaaacatctccattctcaagattcgcagcaggacctgaag

SEQ ID NO: 197084 - DNA, 419 bp, Zea Mays
attatctagatcgagcgcagcattattcgaaagtgtagggcttattatgtaaatatttccaagactcacaattcacttgcgatggaccgtgggttggtttctctaaaactcaggggcctttgtgttaatctgcgcctgcgaaggggtatccttcgattccagccacacgatcagagattaagcgcctggatttgatcctacccattaacaaaccggtatgcgaaataggccactggatcctcaatcaacggcacatatcagatcggacggaccccgcgtttcaacccaaacgtttccccatgatcaaatccccatcgtccaaactcggatggacgactctggatatcgtcttcttcctcctgcgcgcggccacggcggcaaacaaagcatgcgtgacggacattcgccggagccctgcc

SEQ ID NO: 197085 - DNA, 727 bp, Zea Mays
tgcccaccggaaagcacacgatccgctagctcgacacttgaaaattgaacaatgaagttgtttgacgccaccatgcgtaagtcgagcgcatcagcctcaaggttgaaacttgagatgagcgcatccaagacatctgccgcgcagaaagagccatctatagcaataaccgagacaagtaaagcacgccgaagctcttcttcagcctgagaaatgatcctggagcgcttgatgaaacacacctgacggacggaggcagtggcaggagcagggacaggcggtgatgaggaagaggtgggaggatcatcatgaccactgcccctccgagaactcctcttcctcggaccacgacgagtacgccttcttcctttgccatcagaaattccatcgacgagacgcgcataatcctccattctgcacccaatgaccttcacgggagatgtcccctgggagaccggacgccacacttgggtacgacgatgacgaagcgtctctgtccttcggcgcgggcacacgtgagcacggtgcccaggcagctggcaacagaaacaccgcacttgatgatgacaaacggctactcgatgagatggcgagaggcaattaaagcactttcccctcagatcaatgggcatcgaaatagggaggggcttagaatgggaggagctccgccgacgagcacgacggccaagaacttgcacccagccatcaccatcctcccggccagaagaag

SEQ ID NO: 197086 - DNA, 436 bp, Zea Mays
gtgaagaggatccccccggaggcagagggggagcccgagaagcgttgtagagcgccgtggcgggagcggcggtcgcagtgacgaggcgaagctcctcgagaagcagatcgttcttggtctccgcaaaggtgggaaaaggcttcatgcgggtgaggatgggcgtcacacgatcgaagcgagggctcaagccgcggaggaggttgagcacgaggcactcgttggtgatgggggccccgagggtgcgaagagtgtctgccatcgtcttcatctgacggcagtactcgtccacagagagatcgccctgagcaagctgacgaaaggcggtctcgaggtacagaatccgagtctggcggtggccgaggaactgagcctcaagggcaccctagatccggtgagcagtgtcgttcggtacgcgaacgatgtcctgaagttcggc

SEQ ID NO: 197087 - DNA, 647 bp, Zea Mays
aacatacttcttgcggctgacatcctgcctgatgttctaagtgctttagtgaacagaaattctgtgtcagcaattgtcaggcatcctggttcaacagcttttgcttacgtacgatactttttgaagaaatatagagatgtggctggtgtggccaagtgggaaaaaagctttcggaccacttgtgatcagcgcctgttagctgagcttgataacgggcggtccattgatggcgaattgatttcttcttcgggggtttcagcaggcgaggagattgatgagcaggtccgccaaaagttgaatggaaggagttcaagacttgtgcagaatatgaaagaaatagtgcaacggcaagctgatgaaattcagcgcagtttgaaggaaaagaaagttctagcaactcccaggaatccacccacttttgagaaagaagatagctatcaaattgcacatgacattgtttcgggcttagtagaatgcatcaggcaaaatgggggtgcaaatccagatggagacctttcaacagttgcttctgctgtttctgcaattgttgcgaatgctgggcatgtgatagcaaaacatttggattttgcaggaggtaactatcaaggtgttaattctgtgagtaattcactaaatttcgttaggca

SEQ ID NO: 197088 - DNA, 324 bp, Zea Mays
tttcccggtcttttgggtgctgattttcagaggcaaagcactattaatctgtcgagttgtctcagagaggccgtggatctcagcgatcttgagtgccccttctcagagagagaagtgttagacactattgtgtgccttccgtctgataaggctccagggcctgatgggtttactgggaggttctataaaacttgttggaatatcattaaggtagatctgctggcggctctgtctatcatccaccagggcaatgttcagagattgggacaactgaattcctcctacattattttgattcctaaaaagatggacgcttcgtcggct

SEQ ID NO: 197089 - DNA, 698 bp, Zea Mays
gccttagccccctctggccgcctggtataggggattccggtcatagaagttgcactcttatcaaggtggaggcgcttgaaacagtcatttttcttaatagccctttgcacctcatcattccaccaccaggtgcctttcacttcctgtttgcctcccctactcacaccaaacacttctaaagccaccttccgaacacatgtgccatctgtagccccatgtcgtctgcatcttctccttcttcccaaggcccctcgcatagcatcctgtccttaaacgtttgtgtcgcttctcctctaagcttccaccacttcgttctcgcgatcttgccacgtttgtcctggtggacacaaacccgaaaatgaaagtccgccaccacaagcttgcgtagagggacaacacactccccaggtatcaccttacaatctaaccaagcacgtctatcctccctccttgcaacgataaagtcgatctggcttgagtgttgaccattgtgaaatgtcactagatgtgattccctcttactaaagaaggtattcgcaatcaacaggtcataggctaacgcgaagttcaaaacattctccccctcttagttcctactactgtacttgaacccctcgtgcacccactcgcaacctacattagtcgcacccacatgaccattgaggtctcctcctatgaagagtctctcaccgataggc

SEQ ID NO: 197090 - DNA, 508 bp, Zea Mays
gtcggcaagacaaagctggtgaggaacttgtacgacagcaagcagaccctgtctcactttgacatctacgagtgggtgagctttgggcccaatctcagtgcctctgatgtcctcaagatcatcatcagacgcattacagatggagaagaatgttccaaggacaacatagagaggaagctgcgggagatactgaaagaaaagaagtatctgttggtgatagatgctgagctcagtaactcggagtggaatcgcattttcgctatgctccctgaccccaaggatgtggatgtcgatgctgccagcagaatagtgaggatttctcagattccgccacataagccacccccacactatcaagaagccaaacttgaggttccgaagttttatgaccaagaagtagtcatcaatctgttcaaggaaaccttccaatcatgtggcagaaatgaacttcctgacgaagcaataagagaatacagacagagaatcttggacaacacaaaagggttgc

SEQ ID NO: 197091 - DNA, 532 bp, Zea Mays
gccatggtccgcttggactccactgctggcgtgttcctaggaggaagagaacgcctggtttgcagatcagtgaactggcggtgtgggatcgccttctccctcaacgaattagtaaaggagtttatccactgcgccaacctgtagctttcccgccgcgtgcgccattggcagaggaggtaaaataatggcgccgccgctgtgctcgtgtgcggaaggtagatggcgagttggtagccatccatcatgttttgaacggctgggattaggcctcgcgtatccttttgcgttgattcgatctggaacgtcgatctagattgggcggacagagttagatccagggtaataaaatcctcaccgttgaagtcggattcaaaggttagattcgtgtgctggttcgtggccggctagatttaatcctgtgcgcataccttagatcagacggccgtggtcgctccataccccttcgcgggtacatttttctaaagagaccctatactttgccagaatcaacccgccatcctgactgactgtt

SEQ ID NO: 197092 - DNA, 326 bp, Zea Mays
ggtagttgtccacatcgtctgtttctataccctgcaacctgtttggtgtccaatgctctcaccgatgctcattgatttgtgcttgcattcgcttgtgaatacctaacttactctcgtgctcagatctgtagtagtagtatggtgctctcgtcttgctggcatcgtccgcgttatactgatcctgtggagaaatcttctctaagttgcccacttatgtttttgataatctgaccagctgaccagggcaccggctcggcttcaatgaggtagacttgatctgcacctgtacctcctgtttccctttgcctgttgctgttagggattcg

SEQ ID NO: 197093 - DNA, 383 bp, Zea Mays
gcttctcctaattcaagctacctgatccttatcccatgccatcaggctgcaagctccttcacgccacctcacattccacgcacaggtttacttcttgctcttcacaccatgcggcttccaagactccgctcatcacagcgcttggagcttgccggttgccgagatgaaccctgtgcttagtccatcagcaccctagcctcccattcacagttcctccctgacctcccttacgctattgcagcagcagcacttgactccagtgccctcaacacccagccatagtctacctctgcgctcgtcacgaagccgcttgccctacagtcctgtcatgtcaccgtcctacaagcactgagctccgtccatctcgttgaacgccatcgtcc

SEQ ID NO: 197094 - DNA, 275 bp, Zea Mays
ggtgcccacagtgtgtaggcaatggcagtctatatatagtgtgtgtgtgccgtggaaacctcgtcgtgtctgaacactgaactgaaccctgcatgtgtttcggtctggtctggagactggagtgcgcgcggtggtggttggtgtgccaaatagctcaagctcgccatgcatcgatccgtgcgtcctcgtaaatgcgtgcctgtatacagacagacagagagaggggtcagatcagggagcgagaggtgcactgcagtctgcatgcaatggttgac

SEQ ID NO: 197095 - DNA, 508 bp, Zea Mays
taggtgctggactgctgacaggctcagaaaaagagggctagaccgaccagagcagtgccccttgtgcgaccaagaggttgaaaccataaatcatttgctggtcaagtgtgtttttgctaagcagttctggtttgatttccttaattcagtggggttgcgggatctgtatccagctcatgaggaatcctttgagtcgtggtggaagtctagcagctccggcatcggatcttgtgagaaaaggtttcaattctttagtgatcctaggtgcttggaccatttggaagcataggaataggtgtgttttttatggttgtaatcccagcttgctcacgacccttaggatggctagggaagaggcggtgctctggtccatgactggtgccaaggccttgtccttcctccaagtcgatgagttgctggcttaaaacagcggtgtgggtcgtgtttcctccatgttttagtcagtgatccgtagttagtctctagtggtgtatgtgctgtattgggg

SEQ ID NO: 197096 - DNA, 567 bp, Zea Mays
tgaaaagaagcagaacaatgatttgtccagaagtgataatggcaaggaagatgttaccgtgcatccaaaaacaatggaagtttctggtaaagatgcttacgtagtgaagacatctgatccaccagttcaaccccaatgtgccaaaaaggatagaccaaatgatgttgaggatgacgatttactcatttcagtgaataatgttaacatagcgccaaatgagcatgccgaggtggttcccacaacatttgctgccatgacttatgaatcagatttgcaagatgttccaagagaaagcacctctgatgattcagctccaaaagtggtatgttgccaacaaaagcttttggaaaacacaggagatgattctggtaaaatcgtagaggtggttcaagattcaggagatatattgtctgtgactccacatggtcttcagatggcacacaatctatacccccctgacaataaattgcataaaccagatttgaagaaggaagcttttgctgatcaatcttccgctcttgggaattgtttaaaagattttgttattccagagcagtcttacatctg

SEQ ID NO: 197097 - DNA, 524 bp, Zea Mays
cgacggtgatggacagggttggcagtcatatagacagcactgacattgtcacagaagacgattgtcgccgaagagatgggtgcatgaagctcctggagcagctgacgaagccaacaagtctcagccacagcgtgcgcaacggcacgatactcagcctccacgctcgaacgagaaaccgtagtctgtcgtttggaggaccatgagactaagttgtcgccgaggaagacacagtactctgaagtggagcgccgagagtctggacagcctgcccaatcagcgtcggagtaggcagacaaactcgtaatgctgccggtaccgatgtgaagtccagtggaaagggtacccttgacataccgcaggacccgcttgagcagtgccagatgaggctcgtgtgggtcgtgcatgaagaggcacacctgctgaacggcataggcgagatccggccgagtcagcgtgagatactgtagagctcctgcgaggctacggtattgggtggcatcggccaccggggcgccatccgtagc

SEQ ID NO: 197098 - DNA, 606 bp, Zea Mays
tttcatgctaaatttcatgcaactgtgaagcaaccaaacattgttatgatatacgtgtagaatttgtatattattatggtttcatctagctattttgcaggtttgaggctcacatggaagttcatgttggatcaattgatgaggaggaggatgagcaaggaattgcccatatgattgaacatgtcgcgtttcttggcagtaaaaaacgtgaaaaacttttggggacaggtgcgaggtctaatgcgtatacagacttccaccatacggtgttccatatccactctccaactaaaacaaaggtctttacttttctgtccttatttctttgtggaacttatcagtgtctatttccaatttggaaataagcttatgataatttgtatttggtgaagcccaaatttgttttcttgtttagttgtccttggaaaaaatcatacgtaaatggactgaatgtatttgttgactgtgaaactataatttttagaacttatgatcctagttagatgtgttccattgtgatatttaatgtttacatataagcttgtcttctatctgcaggaatatggtgaagacttactcccttctgtgctggatgcattgaatgag

SEQ ID NO: 197099 - DNA, 673 bp, Zea Mays
tctttattgaacttgtgacgctgcagaaaaaaatactaactgtcttactaggagcctagagtgtccgaatttttgccattgcttgtcctgacttgccaacctacaatgggatggggaaacactattaccagacgcctcaaggttttctctatggccctgtttatctacttcgactataaggtgtggttctattcctgttctcaatgatgtttgtccagagacagccccttccattctctcgaaacggattaacatcttcttgatgcacaagcaggctgttcagaagagagttcaatgggttagcactggtaaaaagagtgctatatggaagaaaacacatgagcgaaatgctcgccgtgtcctcaacctgatgatagagttagaaggtttatgggtgaaactgggccaatatttatccacaagagcagatgtacttcctgaaccctacataaatgtcctcaagcagttgcaggattcgcttcctccacgaccttttgaagaggtatgcatggttgtcctcgaatgaatggaaggattaaagattgataattcttgtctggtcctgacatagtattgtcttggaggtcatttaagcaattacttaacttagttcttgtctctgctatgcaggttcgtgaaacgatagagaaagaacttggagaacctatgagtg

SEQ ID NO: 197100 - DNA, 314 bp, Zea Mays
ggagacagctcggtctattgtccctgcaaagaatgagaagaaagaatcctcaggcattggcaagcgagaaactgggaaatctacaaaaaggactggtaattcaatctcttagccctgacacaacatatgcacattgtgtgacttggtgaaaacttatgcacaaaattttccagctcctatagacaaggctaagactgctaaagaggaggccagagagttgctcttgaaggaggaagcatctgtgcgtatgaaggttgggcaagtgcagaaggatctctccttaatgttggatgctcttggcaagttggctattg

SEQ ID NO: 197101 - DNA, 363 bp, Zea Mays
ctcgcccaccaccacgagtaggcgttgctcgccgcccgctgcagcatcttcttgacatgaatcgccccgagctccgcaatcgaccggatcggattcgaatcccctccttcgtcttccttccctgatccccgctgctgatattggttgacaagttctctttccaattagctgagatgagaaaggcagacggtgagatgggttctttccttcaccgcgtgcaaagcaaagctgtgggtgggtgggcggtggcggctgcgtctgtcagcagtcagcaccaggcaccagcagttgagctcttctcttcttcctcagatctccatctgcacgcgcacggcggggaagaggaattgaccttgactgccg

SEQ ID NO: 197102 - DNA, 581 bp, Zea Mays
gggggtcttgggatccctaacctgcagtttaagagctgcgcactgcaagcatagtggttatggctggaaaaaactgacccaaatagaccatggcagggtcttaacattcctgtgcagcaataggtcaaagacttacttgcaaaatctgtgatatctattattgggaatgggtcagcacgctgttctggactgacaattggttgcatggggccgcaatcagggacattgcaccagaagtagctgccaaggtgggcaaaagagctctgtcctctacaaccgtagctcaggcccttgataatttccgctgggtcagtgatattagagctcctctttctctgttgggccttcaacaatatttgctgctttgggattccttgagggaggttcatttatcacaggacccagatcaacatagatggagacgttatttcaggagttttctcttctaaatcatgttatcaaagcttgtttgctggttcaactccttttcaacccgtggaaaagactttggaaaaactgcgctccaccaaaatgcaaattctttctttggttggctatgaagaatagatgttggactgctc

SEQ ID NO: 197103 - DNA, 1058 bp, Zea Mays
cctcaatccgagccaccaaattgtcaccaaatcggacagtgcccagcacttttgtgtcaagattagtgaatacagccctggatccagacatatggtttgtggctccagtgtccaagatccaggttccctcctccagtttctcctcttcttcacgctgcagaaacaccttctccctgatctctagatgagaaccagacatcttgcagcatgattgaagttctaaggaggattttaccgggaacgttcttgcgacaagaagtgtagcctcctcttcttcttggacagcatgtgcttgctccttcttgtgctttgatggacactcgcgcgcccagtgtcccatcttaccacaccttctacactcatcactggtggcctttctagacggtggcccacctggtgagcgccctcctcggccacgataccctccaccacggtgccctgatcctccaccggaactgctgtcagggtggtgcccgacttccttcttgcgtcgggcattccactcttcttccgtgaggtagagtcgaccaatgtaatgcagtgatcctggggcctcctcaaaggcgtctcccaaccatgttagagatagagaaggttgacagatcgagcagagtggtgatggagaggacgatttgcttgaaccgcgacggaacgctgcgagcaatcttctccatgatcttctcttcaacgccagctccaagggtggagagttccgctgccatgccatttaggcgcagcgtgaaatcttcgatggaccaaccgtcgttgaacgtcgccaagtcaaacttcctctgaagtagcatggcaacagtcttcttcatgcgatcatcgccgacacgcaggtctgcaatggtcttccacgcctcctttgtcgtaagcttatcagcgatcgaagacaacatctctggtggcaccacgctgcagagagcgtcgagtgccatcatttcttcatgaatgtctgctcctctatgctcgatgacgtcccacagcatcctcgccctcagcttcaccttcatcaggagcgcccagtccgagtaattggtcttggtgagtgtggg

SEQ ID NO: 197104 - DNA, 400 bp, Zea Mays
tttgaatgacagttctactcctgtctatcctgaatttagcaattccttttatgcaagagatggaacagaagtttctaacaatgcagtagattcaaaaaataacgcagaacagcttgcttcttctaatcagggaaaagggaacatggaggaatgcaaagattctgacggaaacaatgcaagtgaattgagtgttgcccaaaagctagtgtctgttattgtgccccctgcttcagacgcaggcgatgtgagtaattttgtagaaaatgatgttgataaatctagcagagatcaggagaaggtagcaaagaaggaatatgaagattctgtcgtggcaaagaaggatcacgaagatgctatcctcagaagggcacggtatatagaggtatacctagtatctaat

SEQ ID NO: 197105 - DNA, 617 bp, Zea Mays
cctccttggaacagtcaacagccaaacccccaagaacacaccgtctcatcccagagtcccggcttccgatctcttcccttccccccgccgccggaaagatcccggctttttgggttccgcggcgagggataggccccaagaaggaggagggggcctcacggcggcggccttgcggtcgatgcgatcggttgacgcggcgggggcggagagctcggatcaccacaacctcaagaagccgcgcctggaacccaggaccaagatgccgctcgcggatgccgttgcggccggtgacagcggcgggggtgtggatgccgcggcggcgggcgccgacttctttggcatgacggtcgaggagatcgtgcagcacccgctgccgggatacggggcgccggcggttctcagcttcagccccgacgaccgccgggtcgcctacctatacagccccgacggcacgcttcaccgtaaggtgttcaccttcgataccgcgcggcgttgccaggagttgctcttcgggccccccgacggtggcgggctcgaggaggggaacctctccgccgaggagcgtctgcggcgcgagcgcgcacgggagcgcggcctcggggtcacccgctacgagt

SEQ ID NO: 197106 - DNA, 1015 bp, Zea Mays
tccctcaccgccctctacgcagctgcgctacaggacgccgcacccacgacccatgatgttgccgctcatcgcgccaagctcctggccccacacttcccgtacctgagtgcaggtcatggcactcccaccctgcccgggctcgcgaggggttcgacatcccacctcccgtctacaaccactcatcagtgctcaccacctctcaacgtccacgtactcttgacgtcatcgatgtcctcctcgccacctgtgcttgggagcaggaacgtgtggtcgtcgatgccctcgagcgccagcttgtcgatacccctcatccgcttgctagtatcccgggcgatgcctcctactcagtgcacgacgccgatgacgatgcccctgacacgtcgatcatcgtcagtctccatgctcaggcagcgggacttcccagcattcgggctctggtctccgtcgtccttccccctgactcggcccagtacacttgctggcatgatcaagtcctgctgaccctccaccgctacgccctcgacgaccacgtcctcaccgacgcggtggtgtcgacgcacgcctagtcctggatggacagtgttgtcctgacctggatcctcggcactctcaaggtcgagatgcaggacaacgtccgcgagcgggggggaccgctcgccaggcctgggttgctatcgaggccaagttcctcgacaaccactaggtccagattctccacctggacaccgctttccgccaacttgtccaggcagatctctccactgagtattgacggcggatgaagaccgtggcaaattccatcagtgacctcggctccccggtcagatgagacgctcattctcaaccaactgcacaggctcagtcccgctacgcgcaccagcgggccatcctcacgcggatcacctcattctcgtccttcgctcgagttcgcgatgatcttctgctcgaggaacttatgactacggcgccaccaccaccgatgccacgacatctctctacagtgcccaccccggag

SEQ ID NO: 197107 - DNA, 498 bp, Zea Mays
caactattttggttcagatgcaataagtggtaatggggatgcaatttatcctgccaaaagtaatgcacagcagcctagcagctgtgctcctgacatgagaaaacagccaaaagcaagcatcacagtttatcagcctgacataggtgtctatttaacttctgacatggtcagttcttgtgaggggtcatatgcttctgccagtgagccactgcaaaggagcttgtcatctggaagaactattgggaaagcaaacgcggtgaataagaggcctccatacccatcaagtaaggtggtttcagcacaaaagccacaggatagggtgtctacatcatatcaaaatgatggccatgagaagaatccttgcaacaaaaatgaccaaagttagtagtgttctgataaagtgggctagctttatcttatagtgctacttttatctcatataattactgcattattcaggatctacccccaaatgtgaatcaagtcaatcaacaagca

SEQ ID NO: 197108 - DNA, 337 bp, Zea Mays
caacagcaagtctctgctggcgcggaaccagaacggcgagttcgaccataatcggtggctcttcgagagctccggcacctacggctacggcaacgcgttctggcccaagggcggcatgtacgacgacgacctggacgacgagggcggccccggcggcggtggaggcgacggtatgctcccggagcagaagccgttcaagccgctgacccgcaagatacccatgccgacgtccatcatcagcccctaccggatcttcatcgtcatccggatgttcgtgctcatcttctacctcacgtggcgcgtccgcaaccccaacatggaggcgctctggctctgg

SEQ ID NO: 197109 - DNA, 325 bp, Zea Mays
cctgaacacaaccgaaaaactaaatagtaatctttaataaacctatccaagagtccctttacgcctttacccactgataacctggtcactccacactaatcttgcgagagcgagcaactagagcgagctcccctcccttcccctcgggcctcggctgcactcgcattccgtttcacctagctgcggtttacctctccctttctctcaccttcctcgcccacctcgatcgcctcctccttaagcaacgacgcggacgagcgacccgcgaccctagggagagagagagagagaccagtagttgggccgaccgcacgctcgcaggcgc

SEQ ID NO: 197110 - DNA, 1043 bp, Zea Mays
aatgtcattttcaatgctactgaaggtgttaaaaaggaatcacagtcagtgtccctcaacaaaagtttggatcctgaaggtaccatttatatgaaaaccaattgagagcaggaccagagtgttaaatctgcaaatatctgcaatttcgtgatgaatattttgctgaaaaaaccgatacggcatcgtgtttacacatgtttgttaaatatatcaaaggaagttcttcctactctagatgtctagagctctctgtctcccactctcagatgttttattttgtgtgcccttatgtattttataagcaagttcccagatagaatccttgtgcccttatatatcaacggattttttttcttttgaaaacatgcacattacatgtatttataataaaatgtaaaggggaataagaagaaatgatgtatttctatttttggagcaccacatgaagtaatcattttttttgtcttatataatactttccctgagcagatatcgttgtccagttcgtgattagctgtcctcggctcgtatctggatctactgtaagtaaactttatagatgtctttatcttttataaactatccttacctgtgttaatcagtaacttatttaatcaactcatacctacttgctgctgtcccccacgtccactggtaacaaacttaaggtcatcgtcactggaagtaaccctcaattaggaagatggcaaactcaagatggtctcaagctgagctatgttggagattccttgtggaaagcaagctgtgctttacggaagtctgagttccctataaaatatccttttgcaaatgattgttcccttaatcttttattggatgcgccacttttagctgttggccgatatcacgtccttaattttttttctgagaatgattgtccttaacatcttctccacatacaaatattgtcaaatcagtcaagcaggaaactctacattggagcttggcccaaacagggaggttaatgttgatttatcatcacccaagcaatccagatatattgtgttatctgatggtgctct

SEQ ID NO: 197111 - DNA, 490 bp, Zea Mays
gccaatgtttcttcttcggctacccaagtgatctcctgccatggacattgtgtataggagtaggaagcatcaggaacacctgcattactactctgtcacatgcaagataggtagaggtagcaagtggcgtcaaatcatagacaccccctcgccactagatggtggtttcgagatggctagcttagtctggcgctggataaataactaaaatagccctattgatcttagtcacgcatttgtgctagcaccatgggtcataggattatacatatggtcgacgacaacttcactacctgactatggacccttcctggtggcgatagaatcactcaatcctatcaacatacacgccaatgaccatcaccgtcttcttgggcttttagaggagcaaccatgatggcattcacatgagcttcaggattgcatccacattagtgttttcggtatgtatagaaaaaaccggattggatgcaagatattgaattgaaag

SEQ ID NO: 197112 - DNA, 892 bp, Zea Mays
cagaaattgtacatgtgggagaagaagcttcttgaggaagttaaggtatataatatactttacatatttggatttgttaggaatgttgtgatatgtgagattgcttttgggcatatgattctttctgcttacaccttcatgcttgtagatcttaattgagattgcacagtcaaaatcttgtatgtgaagcttccacattttatccattctctcatgttatcctggctttgttctatttataccttttggagttgccacttgtatatagaaattttagcttcagtttagttttgactttgtgacactaattacagatcaagtagctagtttaggttatgattatgaatgtgcctgctccaatacctagtttggagtgtctattcacatgctattagaaattaattgtgcttctaatatccttgcatttccccccttttcctttttgacaaatgttcgttcaagaaatgattgtgtctatgattttgtgctttcttttgcatggtctttatgttcccaaggcttcacgctgacaccagtgcttttactttgccagccaacttatgggtccatgttttttgaacaattgtgttgtttgtttgtattatgtcaggcctaataaaatccagtttggatttgttcattatttttttgtactgtgtaaactgatgtgacttttttggggattgacagacagaggagacaatgcgggtactgtatgacagaaaacgtgaggagctgaaaatgttagatgagaaaggtgccgaagctcataagcttgaggccactgaagtttacatcaggaagctatcaactaagattagcatagctatccaggttgtaaacactatttcagaaaagattagtaagttgagggatgaagagttgtggcctc

SEQ ID NO: 197113 - DNA, 1684 bp, Zea Mays
gtttcttctttatcatgaggtactacttggcccaacagtcatggaatttctgggatctttagtcaccaagatacaattcatggtcatgcggttgtttggggacaagcaaccatttgtgggggtggaaaggatatatggcaacacaggttaaagtcgtgttttaaaatggaaatgcatgctacagtcctgggtgtcaatgatgtattgcagcatatcagtgcttgttctctattcctgcagcttggtcgcagaaaactatatagggtggtgatgacttctgttctaaggcccagagatttgctgctgaagagctatacaacattcttgaccaagtcgatgaactattgttgcttcctgaccaaaagctcgggagaccatggtgtgacactgatctaatatgtgaaccgattctgtcttggagactcaatggtggcagcccaagcaaatgtttgttgcaactcaagacatacatagtcagacagtgggatccaggaatttctgggatctttagtcatcgagatacaattcaaggtcatgcggttgcttggggacaagcaacattttgtgagggtggaaatgtaacatccatgaatagcaacatgtccagggctttagctgacaagcgggccacccacccatgggacccaggtggaagaccagatgctgggtataagttccaagagtctgtatgggggaaggcaagaaagaaaatacaaaaaaatagtcgtcttcttcctcgtgaaggacggtctaggtgagattgtcctcttgtcgagatcctcacgtcccggtcctcaccacgggtggccacggggtgtgacatgatactaggagatgtaacggagcaaagaattctgagaggagccaaagatgaggataagggatactgaagatcctcgtcgagctggacaaggatctcaagtctgctctgtgcgatttggaagacgtcctggatgttattgaatatcgctgaatcgagaagaaagtcatcggtggtgacaaaaagttgatcagcactactatttgcatctgggcgctgcaagctattggcgattggatcacctactggaagcgtagctcgttcgggcaaaagctgttgcagtgcgcgcgcccagaaccagtatcagaagctcagggaccttggagagaagctgcagaagtgcgctcaggatctggatctgaagttttgggaccttgtagctaagctacagcagtgcgcccagaacctgaatcacatgttctgggactttcaagctaagttcttgcagtgcacccaaagcctgccactgtatatccatcagggagcagctgggcaaccaccaatgcggcaatgcctgattcacccgccgcaagatccactgcagaattcagggatgacattgaacaaggaccatcgacgcctgatgatgcaccctcgaatccaccgtcgcctaatgccctcccgaatgctgctggctccaccactggcaatcaacacggatcagctgaggaggcaccgacgcctgatgcaccctcgaattccctggtgcagatgatctgcgactgattggtctatgggtttacagcactccgttctttttatttggctgcgcgtcatcttcgggactggtcatatgaaccgattggcatcaaaggtacgcactgtctggtcgacatgaccgtaatttcccactgctatagctat

SEQ ID NO: 197114 - DNA, 398 bp, Zea Mays
gaaggaccagttcaggatgagcgatcttggattactgagtttctatctgggaatagaagttcaccaggcctagggaactataagtctgagccaagctgcatttgcatcacagattgttgagaaagctgggctggtggggtgtaacccatgtgctacacccatggagcctaggcttaagctgagctgaaatagcacagaaccactggtagatgaaactgcctataggagtcttgtggggagtctgaggtatttcgtaaacacaaggccagatcttggtttttgagttggatatgtgagtcgcttccttgaaaggcctactgaggaacaactgttggcagtgaaacggatcatcagatatgtagcaggaacactacaccatgggtgtcagtatggaaggg

SEQ ID NO: 197115 - DNA, 385 bp, Zea Mays
gacacggctggctcgcagggcgacgacgtcctcaatctatcgcgtggccaggttactgattttacataatgcttcctgccatatggagtggtttgtttggttaaaggtttaaatgtaaaacagtgatgtttgctacgtagttgaaagttgtagtgcaagtcgcagagcatttctaccttttaagatattgtgggggctaggcgatgctaacattctggtgtttgtaattctctaggcagttagtgctaggcaggtaaaaggggtgaagagggtttactgggagaggtgcaaaattgagtggagagttgaagagattttttccaatcttttgctcgggtgtacaaacatcacaggcttctaacattcctattcttgtgaaccgctg

SEQ ID NO: 197116 - DNA, 624 bp, Zea Mays
atattacggggattcagtttattatcctgcttattgcatgccaggcagcagcttgagccacacttccaactgttttgtataccaaaaacatctcctcttgctaggaacctatcaaacttaaagtactcgttcaaagcttgatctaccatgtcttggtactcacttcctccaaaggatgaatttatctttaaagaagcaagcacaccacaatcaggaatcctcacaacagaaactcgtaaatgcaacgcatatttaggcacttgagggcatggaagaaggtctaagtgaagagaaagatcacttccagaactggcagttgcatccatctcttcagctcgagaacagaacttgaaaggctgcccttctctttgaataagtagtttaaggcaagaaacaggcaatcccaagttgaatgccaaaagtgggctaacataaccaacatcttcatccatggatgtaaaaccagtagcagggaacgtgcgacaaggtaagaagcccattgcatgaccagagaccacttggtcagtatgttctgagcaggacttgtcaagggacgggttaccaaacaatactgctttgacaatcctcccaacattattgtcagtattcttgacaagcacctgc

SEQ ID NO: 197117 - DNA, 324 bp, Zea Mays
cgaaaatggcgtgctcaaggagaaggatcccctcgtgctgttcaatgagaagcttcagcactatgcgtgtatgagcaagatagattccagagagaccatgattgatactgcaggcttgactgaataaggtcagctttcagttggttctgccgccagaattcaattgtgcttatttgcagccaggtatatacagtttcctcttgaattatatttcgttctttgatgcctatcttttttcaattgttattgagcatttgagttgagtaattttacactgtctgtatctgtttacatgatgaacgacgtcacatttgataatacacc

SEQ ID NO: 197118 - DNA, 1122 bp, Zea Mays
gtgagctctctcatatctcctcagagtttgatagcgtaagtatcttgcagtagttcttgtagtttctctgttttacttatctgtgtccttgaaacttcagaccgtcattatttaccttgtgttagatgtttggtcatgtatgacgaccagaatatcatgctgtacattctaggaatgctgcttagttacgcagatctgctcatgttttcaagctgtaatacaattcctacacctgtaataatacttttggttctatatgtttgctgaatgctatacttgtttgctatgagcagatgtttttttttgcgttaatatatcgtgctcttaaactttttttttcactacgattgtcaggttgtccaagtagtattggaaagctatgagcctcgacaggtgcaaagtgacaatagtgccactgaaaatccaggttgtcagttggttgaagaggtccttaaacccgagggtcatgcctctccatcgacatttatattttctgtgataccttcttgggacagcatagttagtgactatggaggaattcaactgcttatgtaataacattctttgaacttaagtttgttatttcctcttgtttttttagttcttaactgaatcctgtcttgtagggatgatgccaaggatccttatttttggtcaagggtctgtgtgcataacatggccaagctgtccagggaagcaactacattccgccgtgttatggagtccctattttgccacttcgataatactaattcatggtcatccaaaaatggtcttgcactttgtgttctattggacatgcaaatgttcatggaaaagtcaggtgctctattcacattaactcaaagtaaacctttatcaacatgaccactttatttattagctacaagtctacaactggattttgcagggacaaacattaatttgatgatatcagtactagttaagcatctcgaacacaaggccatactgaaacaacctgagatgcaactcagcattgtcgaagtgataactgctcttgcagaacaatcaagagctcaggcttcagcagcaaccatagttgctataagtgaccttgtgaggcatatgaaaaagacactgcatttagctcttggcagcaac

SEQ ID NO: 197119 - DNA, 699 bp, Zea Mays
aagttttggaaagtgacaaggccatggttcgtgaaaacgtacttggttttattgttcaagtgccccctttgttaaggtaaatacttagtagtaccctaaatttcctcctaactgttggaatggctacaaaagtgttaccgatcaggctttgacattttcagtgccaacatggttctgattattagcacatcaaccttatttcatccccctgttatatgataatgattgtgctaaattagatatggagaattgctgttttgagtattctttgtttgtctttttgattgcaagtgaagcattaggtacaaaaatcttgacatatcgtttaactcatacttgtttggtcctgtctctttaggccttatgggttgactatttaatagaaatatcagttcaaatgtttttagacactatgatattgtaataccatcattaacatttctcttttgataaagttgaaagtctgccatcttgtggtggaaatgttataattttgtattgtcatttatggaaacattgttttaacgttttctggttatttgtagagcccagcttggagaaagtatcaaaacaattattcattctgattatcctgagcagtggccaagtctccttcactgggtttcacacaacatagacttacagaatcaaatttttggtgctttatatgtcctaagggttcttgccagaaaatatgag

SEQ ID NO: 197120 - DNA, 957 bp, Zea Mays
cttgatttgtacccccgtcgcaggtttccgagacgtgtgcggcttgtcacactcacaccccgatggttggttccctgccagtctccgactgctagttcctatttcgcctcatggcttgaaaatccttgccttgtctgtcgtcccatcacttctagcctgccgttttgtgggtcaagacatcgatagcatgtttgtcacacgccaccctgatatttccactcattattatgctaacctgcaaccatgcttccacataatttgtgtcgacgaatcactcagattcatcaccctgcacttttttttgttcttgtttctgttcctctggaattttactgaccgcgctgtttctgagaggtggcgggaagggcagagcagcacgtcgcgactctttttctttacacacagtgatgtgaagctgtgtccgtttccccatcgctgtcatcaatgagctcgcaccatgcctggtccttccgttcatattaatggcgtaactgtaccgagcatttcccgcacccgctaacgttcttctccgtcctcccgctccattcctccactgctgggcgttaatggcgtaaacagctgcctatagctcatcttcttggccgttttctatgcgaggtttaatgcccgtttggtcactacgacttccccccaggcccccattgaagaagcttgctacactctgctccgcaaagagagagacctgatcttcttggcgtcggtgtttaatttggattcttgcaagtgggtggcgtctcgcgttcttgcgggcttgtgcttctttaatgcgctgacgcttcttgtcctgaattgccgttgcgttttttggatacgaattgccggacgttcttgcgcgtttctgcggtaggatcaggaggctggtggtcgccggcgcagcgtctgcgaggcggcatccgaggccgagggtaccactgcacggattccccggtggccccg

SEQ ID NO: 197121 - DNA, 444 bp, Zea Mays
agtgtactttctacccatgagaggtatatctttcagccccatatcatttataaatctcctgaacctgccatcaaagatctgtttatgttggtattgtttttgttctcagagcagaagatctgattaaaatccccagcaacaacccaagggcctgcacacaattccctaacatctctcaattcttgaagaaaaaactgcttaagattgtcctgatgcgggccgtaaactccagtaaaccaccattgcaatccagattcctcctgaagctgaatggagactgagaaatcacgcacaataccgctggcggaggaaaaggctccatcccgccaggccaccaggatgccccccttgtcccatgagcaggacagaagacaaaattaccataaccaacacccaaaatagataggacatcaaaagcagagatggaactcagcttagtttctt

SEQ ID NO: 197122 - DNA, 1034 bp, Zea Mays
agaacaatcaacaacaattgatattctgcagaagctattccttccatcaagtggtccatggcatgtgaataacgagtttgtttctgctgctctcatgaagttgccagaaaatggtttgttctactctatattttctgttgtagaatagcttttatgcgtcattcaaagtatgctaaatttttccttaattttctcatgttctctagaacacagcaggcaattgcacaatgctaccagcgatgtgttatccaagcttcatgtggtgatgcgtacagtagataatcttcacttgaaacacaggcagttagcagcgaactatcaaaaacaaagagattcgagtgcctggaacagagctgaacagaaacgtctgaaaggtattttgtatttgttttgtggatggtatttttgagggtgctccatctttaatagtacttttgttcttaactgaaagtattttagcaatatttaaagttttgttctgtgccctagatcatcaaacaagtaaatactaatctccgttaaaatggtgaatgccttgtggcaataatattttcattatgttgtgaaactgtaaatcgattgtttcttgctgtggcactaccaacacatggtattaccaatactattctttattctattatgtgtacctagctgtcgtgtaatggtaaactaacccagtatttatgtacttctcaagaggagttgactagtgttgttgccaagttggaaggaagcaaacaaaaactggcagtactgaaagcacagggagacaataaacaagcaacaccgatcctggttcctacgctgggaaacaaaaatatgactgcagaaaaggtgagagataaacaaacagaactgcaagatcttgaagctactcacaaggagttaatggtaatgtcaagttcttgttttagagctccaaactattggctaggatgctagatgtgtatggacttttaagattgacacatacaaatatgagcaggaattgatttcaaagcgtctggaggaaattagaaggctgcatacagaga

SEQ ID NO: 197123 - DNA, 283 bp, Zea Mays
tcagttagttgtcggtattagccatccttcatggatttcattaccgttctttgtatttagctgcattggccttgtggattggtccttaacaagtaactttcttggccttttccggtaagctccttgattagcatactaattatactttttagtgttattgtttaattttatttcaatgttttgtgaagatggtggaggttacttgagatatactcggtgttcagtattcttctgctttatctctaccagttacctatgaaatttccctatattgcgttagcat

SEQ ID NO: 197124 - DNA, 482 bp, Zea Mays
acctgggaaatttgatgtgtgtgtgactagttttgaaatggcaatcaaagaaaaatctgcgttgaggcgcttcagctggcgctacataatcattgatgaagctcaccggataaaaaatgaaaattctcttctatcaaagactatgaggatttacaacactaattatcgtctcctcatcacaggcactccactccaggtaggcttctcttgccactatttgtttttatataatgcgtgcacctggaacaatgatttaggtaccacttcagtaaccgtgttgtgccatatttattttttggtttaatctgatcctagtctgatttgctgctacatggcagaataatctccatgagctctgggctctcctcaatttcttgctacctgaaatatttagctctgcggagacctttgatgaatggtttcaaatatctggggaaaatgatcaacaggaggtggtgcagcagcttcataaggttgggata

SEQ ID NO: 197125 - DNA, 321 bp, Zea Mays
caaagttacatccacacaacacatgtgtgatatagcaaccacgccggcaaatgctacaggatagatttggagatgtctttggcttatagcatatttcagaacccattttagcaagtaggtcacgtgcacgtcgctggaattttatcaaccgcacaaagcaggatttcacagaatactgggaacatggatgttccaacttgtccaaggatcttgggtcacagtttaacagcttttgggacagaagcatagcagaacgacaaagtagctcctcatgtgcaagcaatggagttctgttcagaagcgcgtagcgcttgctagcca

SEQ ID NO: 197126 - DNA, 410 bp, Zea Mays
tagtattagcgtgcaacagaagcttccttggtaacgtactagtcatgatgaccatggcacgcgcggcggtatgggcgtactgcccactgtctgattggataggcacgccgcctgtcgggtggcctggtcgtcgcctgccagcggagtggacggggcacattaaatgccgaggtggcacatcgcctgtcagcagggcggacaggcggcgcgtcttttctgcaataaatgtagagaccgtgtggcccagaggccttacgtcaggctccgccctgctggcttacgtcactggcaataggccacgtggcagcatcgggtctccgcgctgagcggggagtggaagcgcactggtctaacccctgacgagtatctgcaccggacccctatacgtccctgacctaggccagggtatt

SEQ ID NO: 197127 - DNA, 659 bp, Zea Mays
ggataacagagtagttcctacaacattctacattcataactttgtccatgaatttgcaagacatgttgcttgtgatgatattataattttcgatggtaccaaaatgcaaaagggctgtgcaaaaagacaaaccttccaatatgcactcttgacatgttaccgggtgcagtcaacattttcccactcaacgctgacaaggacaagggcattgcatatcatgaactctgaggcgataacatttcctcgtgaagcatttgaattactgaagcacttgcgtgttttgaatcttagtggatgttgcattgaagaattaccagcctctataggttgtctaaagcgtctaaaatatcttgatgtttctggtgtgcagatacaaacattgccattcccggtgagtaggttgacaaaccttgaggtactggatctatcaaaaacatgtatgaaggaattaccctctttcattggtaatttacagaacctaaaatatttaaacatgcaaggttgtgataaacttcaaaacctacctttatcccttggtcatctacaacgacttgagcaacttcgactgtcatgctgcagatgcattgctatgctaccagactctttgtgcaaccttatcaatcttcgaattttggatttatcaagatgcactatgctgc

SEQ ID NO: 197128 - DNA, 649 bp, Zea Mays
tccattgtttggatgatgtatttccgccaaggtacccacggattactttatggaaacagagcaaacttcagggctggggggattcctatgttaaatcaggtcctctaaaatctatggaacagtcaatttttgttgaggctgtcatctcaagaaggctatgctctggtccacctgcaacatgttttttgcttcatttgctggtggatgattcgtttgcttggtcaaccgtatccaccaaactgttagctgattctgggaaccatgctttaagtgattctgctaaaaatatcttgtgttgtttgactaaacctgtcaaacaagatggacataagggtagcatcagacaagtgtctgtccatccatatagctgcgaaatagagttagctgtctccatggattcaaacagaatgatatttttctggtctctgtcaactttctcaactctcataccgacaatgcatgcacctatgtatcctctatggaagctgttgtgcaaatttgatttgcgtaacatttctgaagatttcgagtactcatgtttgtgttgggcaccttctgttactcgtgataatagatttcttgttcttggatgggaaagtggagtcgattgtttcgtagttagaattcagaaagaagaggttctttcatg

SEQ ID NO: 197129 - DNA, 551 bp, Zea Mays
ccatgttggaatatgtgaaaccctaaccctaatcctgggttgggagtatattttatagaagagttaggtaggcaagcacattacaatagggtttagggtttagggtgcagatggtagcaggcttcatgacgggactaaacgtctcatcatagtcaacaccaggacgttgtgtaaaccatcgaagaacccagtgggctttgcaccaatccaaagagtcattgactttcccttataggtccagactcacttgccagtcaccacattgccgcctaggggaaggggcaccaaattctaggtttgattggcaaggagggcatggtactcttcctccataacacaacgtcaatgacgatcgacaagggcgctatggacgaaagacgacataggagagatcgaaggtgaggcagtcgtggagagtatgaggtgatcaacagggtgaaggaccccgtggtctggcgactcaccatcaagtgtatgtgccgagggttgcaatgaagaagggggtgatacaccgttagcttggcgcgaaagcagggcggtgtacccactcg

SEQ ID NO: 197130 - DNA, 557 bp, Zea Mays
tttgttgtagatacttgcatgattgaagaagtcagttatttgaagtctgcactagcacaaactattgagctgttaccagataattctcatgttggattcattacgttcgcgacatatgtgtaggtaaaagcccatagttttctttctaatgctccatatagttgttctttttgatatgtaattggttagtttagtaacatgtataccatctgcattttcatgttcatgaattgggttttggcttgttcattttcatgttcatgaattgggttttggcttgttgccaaaatcatatgtattcgaaggaacaaaggaggtcactaaggaacggatactggagcaaatgtgcttttttgtagggaagaaaatgactaccacaggcgtgatcgctggtaccagagatggcctttcatctgagagcatttctaggtttcttttgcctgcttttgaatgagagtttgtattgaacttagttaaggaccaattacattaattacaattaaaataggagatatcactgtatttcatatagcatagccttgtgttgaattttaata

SEQ ID NO: 197131 - DNA, 468 bp, Zea Mays
gggattaagaagtgaagaggaagtagcggatgtggaggaggctattgccagagaagctgtggtaaatggtgatcttcaacttgcccttgatatctgtttaaatttaacaaaaaagagtcatggtgcagtgtgggatttatgtgctgcaattgctagaggccctccacttgacaatttggatactggtacccgtgaaaagctattgggtttcgctctcagccattgtgatgacgattctgttggggaattgttgaatgcttggaaggagcttcatgctcagggtacttttgagaaattaatgattacaaccgcaacaaatcctcccaatttcttgattgatggatcttcaatcacaccacttcctgtacaaagtgtgcaagacatacttgacctgagagatgacaatggccatgatagacgtagcgaccttgtgggaattgttaaagacatgctgtcaaaagtttgctt

SEQ ID NO: 197132 - DNA, 636 bp, Zea Mays
cttgtcttctgacttgtaaatttgattaaaatcaccagccaccatccatggccccacacatgtattcctgatatcccttaattcctaaagaaaggcagatttcaaattgtcttgatgaggcccatacgcccccgtgaaccaccactgaagaccatcatcaccttgcaactgaaccgaaacagaattgtccttgattattgaggctgctgaaacaaaggaaccatcacgccaagcaactaaaatacctcctctggacccatgggcaggactaaaaacaaaattactgaatccggacccaagaatagaaagaatgttgaagtctgagatggagaccattttggtttcttgaagacatacaacagcaggtctgaggcttacaaccaacgacttttcagagtctctcttagcacgactgttgaggcccctaacattccaaaccaaaaaacatccaggctccatggagaaactaaagccatctaccaacacggggacagaaccagctcaggcctgcaccccagggggcacctcccagccaaacagggccgccagagcagcaacatgatcactggacagggcagcatcaaacaacctagcatacttcctggcatcttggaaagaaatattttcctgatcatc

SEQ ID NO: 197133 - DNA, 378 bp, Zea Mays
gctaaacttggtattttatcttggtaaggatttttttgtctcaatgatattcaagaacagtccacaacatattcactactgagtcgcatgtgagtctgttcgcatctttatttttattggctgattcgtttaaacctcactgtgtacagggcagaatcactgtccctgcatcgctggtctgccaagtattgccctcttttgccacctcctaggtcaactattgcagctgctttcagtccagatggaaaatcacttgcgtccacacagtaagtttattgattcactgtataacaaactgaaatgaaagacacgccaactaactcaatctgttttctcagtggtgaccatactgtgaaaataatggactgccatacaggg

SEQ ID NO: 197134 - DNA, 652 bp, Zea Mays
tgttttcagtgctgagtggtatgatgtattgtagcaatactcagcccaggctagccagtccacccaagccctaggtcgatcccccgtgatgcatctcaaatacatggcaatggttttgttgactacttcagactgaccatctgtttggggatgaaatgctgtactcatcttcaatttcacccctgcaagtttgaagagatctttccaaacgtttcctgtaaacaccggatcccgatcactgactatggaacttgggaagccgtgtagtcttactatgccctcaaagaaggctcgagctactgtggctgcggtgtatgggtgattcatggcaatgaagtgtgcatatttagaaaaccgatcaaccactgtcaatattaccgatttttcatggacctttggcagaccctcaatgaagtccattgcaatatctgcccatacttgtcgtggtacttctaaaggctgaagcaggcctgctggttgaagagcctcggttttattcttttggcagatgacacaggagcgcacccaatcctttactagtgccctgtctttgtgcatgaagaagtctgatctgagcttatgtagtgtcttttgtactccaccgtgtcctgcagaatgtgcggcctctagtattgctggaatgagtgtggag

SEQ ID NO: 197135 - DNA, 389 bp, Zea Mays
atcaaattatggactaattaggctcaaaagatgcgtctcgcaatttaatttacacgtaatctgtgtacttagttattattttcgtatacatacatttagtactccctatttgtgtccaaacattttgatgtgatgggtcagccccttatacgattgccttacgttatgaatgccaatataatattagaaacgacatcactagtggaagtcgttggtctttgtcgcactgtttctacatttcattgggcagatatctatgaactaaattattggccgcttaagtctatgtttgatttgagaaggtagccacgtgcgtacggaagaggaaccaaaaggatttccttgaaatttaaaattcgttataataactgctgccgacatgtttttcg

SEQ ID NO: 197136 - DNA, 389 bp, Zea Mays
cgatcactagccacggacccaggcagtgagttctaacagtcgtaagcccatgcaggaattcaattttttcagcaataccctggggagcatacacacaagacagccaccaggacgcgccatcagccagccgaaaattcaccgaaacacagtgaccatcaatccttgacccaagagaagttacatgactcctccaagcaaccagaatacctccacttgcgccattcgagggagagaaaacgaaattgccaaagtctgaacccaaacaacgacaaaccagccacctggtaacatccgacattttagtttcttgaatacagatcacatccgctttgacgttgtccactaaacatcgaaccacatcttgccgggccgaactattaaggccccgc

SEQ ID NO: 197137 - DNA, 786 bp, Zea Mays
tgtccgccgggttcttgagctggcttggggatctgtagctttgagagcttcatcggggaattcctgcggcttgggggggttcttgcggttgtgttgagtggcctttcttgtggaagtgcaggtattgagctcaggctgctgaattcatggtcctcatttacctcaaaattcttgaacctttttaattaaaattcttgattttttatgtgggtgctcggggaaaccatccccacttctcaacctgggctcataattcttgcttaatttcttgaattcagcgtttcttggtggtgcttgattattgccgtctgatattgcacagtcctgagtttctagttgcttcgtcagcaaccggtagaggtgtcttttttgcgggatgatagaattgagcttgattgcggtggagcccttttggatttgcagccgattcttgaatcttttcttttctctctctccttggatgcctgcatgaaagccatgctcttaaagcacggttccttttcttttcttcctatcagtttactcatttcttttctggaggtggctcttgtgttggattactcccttaattactctcttatatactttatatgacaaaaatcttagctccttttttttatccaatccgagttgagtcttattttcattgtctgtgaaaacaaagttttgcctaggacatttctcctgatctcacctctttcatatcattaaaaaactgaaagttacagctgcttcagtcatttgaacaagacatccccgtcttttctaggtaacttcgaactagag

SEQ ID NO: 197138 - DNA, 455 bp, Zea Mays
tgaaagttacagtggcacatgttgataccatagggactgcgttttgggaaaaccatccacacattcttcgagaaggttggtttgaatttattcagctgtcctttaaactacaaatcaatctacgtgtgtgcatatagtattaatttaattgatatattttgggaacaggaaaatttatgcacgggtttgtaaagaaatttggcatcaatcacatattttcaccttgtaattggatcattgttcgcatcattgcttgccaatttgaccagtgaggacccctcttctttttgtctatcaaaagcatgctggttctcgagaattagctcagttgccttattaacttggtttcttcattccctaccagattctcaacaattcattcatttgacaagccaaatgatgagactgcactaaggctgatgaatgaatctgcatctttgatgatggagcaatac

SEQ ID NO: 197139 - DNA, 285 bp, Zea Mays
gtgacttaaatgcttttaatttttgctagaagctccggtgagagaaccatgttaccatttaaacaaatagactgacagatgactgaacagggataggtggactgtattaaggcaaatactgtcacgtttcgtgatgaaggcaaacatacattttaaagtaagaatagaagacaagtagtatacaacaatagtacggctgtgagatcttagtgttttgggaatatgaatgtgtgattgtgtgttatcaaatgttgcaacccatacatctagcttctacagttttcg

SEQ ID NO: 197140 - DNA, 1115 bp, Zea Mays
gagccattccatgtctgtgtgtgtcaacaatagcagaagcattcacagcttttaacttcacagaggcattctttggaccctcaagatcaatttccagatctttgtgcataactttctcttgtagcagcttaaaaagccgaatctggtacatcctcatctgtttgacgtgtgacatcacttttttctttgctgaacgaatctgatcatatccagtagtagtgcgctgaatagtattcacagcgtccaagagagtagctgtcagctcatctcctggaacaatctcaacgtttccttctgcggtggttgttttgccctcaacactgagctccttgttgcccataaaatttctaactttcagtgggacattcgacgctttgagatctttagtgacatcactaacttcagatatcagcgcctcatctcctctatcttcactgcccacaatgtgcttctttgtcctctcaccatgagcaccagaataactaattagcatagcatttgtactgcatgacttcatgaagtcaaagattttctcttcaatcgtcaccatgattgcattggctgcagcaccctgtccacgtgccgggcacttctccctcaaaagtcgatgcactttgcagtacattatagagatcaaaagcttagggaagagggttggaccatatcacacgatagtccttgacaataggcaactcaaggtactacaaatgcagatcaagtgacttgggtagcttgaagattgcatcccttccagcatacttaccctcaagagccttgaagagcttcacgaatggtttgtagcaattatctatttcagactcagagcgactcatgttcagtgatctgaataccagtaaatccaactcaggcagcacaccaaggttttcttcaatgaaatcggtgtcaagaatcgataagccacaggtcttgctgaaatacaagggggtaatccagatctcagtagcttgtgaaccctatcatgagttaagaacgggaggtcatcgtcaatatcttcaatgaaacggttcctaggtgccctgtccagcaaagacacttccttgaaatactctgaaatgctgatcactctggtagaggataacttcagaggcccatgc

SEQ ID NO: 197141 - DNA, 922 bp, Zea Mays
ctgacttgccatgctcttttgcaggggtttcatggtagcgtgacctgtctcggcctagaaaatgtatataaagaaggcaagatgttctgccctgggtacaatttggtgatatttttctccccatgtaagcttgttggcttattggccatctgtctggttcaggtcgtaatcgaagggtttaagagctacaaggaggagatatcaacagagcccttcagtcccaaagttaacgtagttggtaaaccccctcttctgctccctcgctcacagatattactgtactcatagggttctgttctgcttcctaactgctgctcagataatttaacaccgcttgtgcggcaacctccgcctatatcaggcctgcaactgcaatagataaatccttacctagtgggtcaatcacaaagctttattagtgatcaagatccggtgcatcttcaaggttcagtttcctttatttgctaaattgggttatttgttttgttttggaaaattagcatagtcatagcttatgtatgcatgcattgtaccagaattcagaaaaccacgaccttgaaacagttacggttaagtccgtgtaactcttttgtgtgcttgctgtttgtttgctctagctctatagtgatcttctagtttttctgccaaactcactgcaagtactacagggcaattacaacttggatgcatacttttctgctcttaatgaactgacgattatttaattgtttgccacagttggtgcaaatggatctggcaaatcaaatttctttcatggtaatcttaaacatgtggtacagtactgctatattattatttgcatctgctcttatgcgagaacatcctcttgatttgcttatgcttattgctccagctatacgatttgtcctgagtgacatgtttcagaacctgcgaagtgaag

SEQ ID NO: 197142 - DNA, 327 bp, Zea Mays
tagaatgtgtattccttggatacagtccagaacacaaaggctatcgttgttatgatccttcgactcgtcgtattcgaatttctagagatgtgagtttcaatgaaaatcgccccttattttacaaccagcctactcactcctcatattatcccccacagaatctacttctttcatgtgtcttccttccattcctgcatctacaccatcatcttctacatccacatctaatgttctcattccaataacaccaccttccacctccacgtcatcctcttcttactcttccaaaccacctgtcatccaaacctacattcgtcgttcccgctc

SEQ ID NO: 197143 - DNA, 578 bp, Zea Mays
ctctcaagaatagcacaagggtctcaaattgctgatactaactccattgtgtcatcccagacagtttctgtaaaaggctcgtctctccaggttactatgatttaggttacaatggcctcctttataatatcttgtttattgttagttttacatgaagattttggattgcagtgtttggtgagtattctgaagtcattggctgtttgggagcaacttcgaagatattccttaaagcaagggagcattgttgaatctcatgaaggggatgcttcaaggagcgtgacaactgatgagatgaagagccaagaggatgttcggaatcagtttgagagagccaaagctcataagtcgacactggaggctgcaatctcagaggtgggatgcctgcagttttcttaatcaattcagaactgaaatatcacattgtttcttgattgttttagttcgtagctgacaccttcgccttaatcttttgcagtttaatcgtaaaccaactaaagggattgaatatttgttgtcaaataaattgatagaaaataaggcatcatctgtagctcagtttctcaagagcaacccgg

SEQ ID NO: 197144 - DNA, 789 bp, Zea Mays
cataaacacaagttaaccaccacggttgtccatcctgtctacagaactggaccgagacactatgactgtcaattctctggagtccagtatggccaatgttcctcttccaagccacaaggatgccaccactgtttcccatcgaaggcaagaacacaaactctgtgaactcaacaccaagcatggataacatatctcttctagaaataaattgcattttagtctctttacaacaaacgacatcaatcttagcagaatcgaccaaaactctcacaacatgttgtctgaccgaagagttaagtcctctcacattccagaaaagtattttagaaggatccattggataaaataacagggaatcaactgaacagatgaacacaagccctaggactttaagtgttctggtgtagaccacccaaaaagagcagctaaggcatcaacatgagactggataagtgggcgcttgaaaagcaaagcatactccattatagcttcagaactaatctcatcagaatcgttgattatatgcaaggccctcatagccttactggaagccttgctacgctaatcttgcatggaaaactcaacgccaattccagccacacgcctacttcatcgaggcatagccacggtcagatctttctgcctcttcagtctagtttcgggcgcaggaaggagatgtgaaggctttgtgctgatcatgttgatgaaggatgatggatctgtcaggggttctgaggtgccagtggacaagctgtttatcctagccgacgtgctctgggtgggttcctc

SEQ ID NO: 197145 - DNA, 309 bp, Zea Mays
gtggcagtactggaactaggttgggtaggaacaataaggttgtgggtcaaatcatggtttgtggcagcacttgaactgggctgtgtagaaacatttaggctatgggtagactcttggtttacttcaataactctttgtctagtgactctaactggtcattcctacacaggtgccataattcttttatttcctcttgttacttttgttgacatctattcaccatcattggagatgtgggtaatgacacccttacgagcttggaattcctaaatatatgtacaacacaataagcatattcatatcaaatta

SEQ ID NO: 197146 - DNA, 699 bp, Zea Mays
ggttttcagggccgatgtccccctttgttctcacattggggaagatatcaagagaattgtctggaaatgaagctgggaggatatcaagagaagtgtttaaggtggaaaaatgaagaactgtgaagagcacactttgcaatgagagaagttcacggagccattgcatggtttgttgcattcaaccaaccatcactttgaacgttcatttttttaaaaccaagatttttacgaggtatactttgcatctatagattatcctggatgtcccatctgtgggaggaagattaatgcttgtggacatggctggatctgaaaacatagaagctgcaggacaaacaggatttgaagccaaaatgcaggtgtgttatgcaaccgattcatgtatgtttgtagcatctatgttttccaaacttccaattgcactctgaacaattcttttaagaagttgctctgtgtgtttaatagacagtcagtttgacactgatcttgccacatgaatttgtaccactgtcaaaagccacatgtgcgatcaatagtgttgctacttttttcacagacagcaaaaatcaatcaagggaacactgctttgaagcgagtggttgagtctattgctaatggtgattcccatgttccattcagggacagcaaactcacaatgctactacaggtacactactacaaaaaagtacatttattgat

SEQ ID NO: 197147 - DNA, 274 bp, Zea Mays
ggaagtttgataaagaatccaggtggaactattgcgccttgtggtggttatgttgctgggaaggagcatttagtcgaagcagctgcagcccgtctatctgcacctggccttggggtggaatttgggtcaacacctggccatgttatgcgtgcgctgtttcaaggcctgtttcttggtccgcaaatggttggagaagcagtaaaagtaggtttgctaactgcaaatggttggagatacaatgcatgcacttgatgatataatatgatccacaggg

SEQ ID NO: 197148 - DNA, 713 bp, Zea Mays
ggaccttcgggttcgaatattttcagcatgtcttgtcgatggggttcgatatcacactattgaccgtgaaagaaatagaagaacacaaaatagtggagtcatgtgtgagggttgccatggtgacgaaaatatcgaattttatggtcaattgaaagaaataattgagttgcgttataactcagatatgtccaaatgtcgcacagtggttctatttcgttgtgactggtttgacacttatagcaagaaggttagaatgaaagatgatggatattttagaagcatcaaccatggtagttgttggtacaaggatgatccttttattctatcaacacaagcaacaaaagtattttacttggatgacactaaacactgtgaaagctggagaattgttcaaaagtttacacataggcacttatggaatgtcactgaaaatgaaaatgaggaaacacccatgggcttgggactatcataccaagatgaaatatgtgcaggttttcatgtacaagtgaatgaaggaaatttgaatgatgaagtaccggatagtgaagattgtcaccacgtcaatacaagtttagttgatgagtttcgtaaaccaaggcaagacaatgtgcaaggagacgggacaagcgatgatgaagatgaaactatatggcaatatgttagtgatgatgaaagtccaacaattcttgtcgaggatgatgatgatgatagcg

SEQ ID NO: 197149 - DNA, 1229 bp, Zea Mays
gtcgccgccgctgagctcctgccttatctccccgaagacgacgagccgtcgccgcgcactcgaacagccttaggtctgcacgccgccctccgcgcctgcactcgcaatagagccatgtgttcttccgcgggcctcctggctgccctcctcgcgtccgcagagaagctgttcgtcgaaatggatcagggtagcagatgggacgggacgccactgcttcaatgcattcagatgttgggtgggcactcgcttagtgtgaaagacctgcattcctggcttgatttggttagaaagtcacttggaacgagctgggccacaccacttatgctagcgcttgagaaggccatgggcagcatggaagcaaaaggtcctgctgtgacatttgagtttgacggggagagctctggtctgcttggcccaggtgacagcaggtggcccttcttaaatggatatgggtttgccacttggatatacatagaatcattctcggatacccttagcacagcaacagctgcggcagccattgctgctgctgcagcggcaacatctggaaaatcatcagcaatgtcagctgctgcggcagccagtgcccttgcaggagaaggaacaacacacatgcctcggcttttcagctttctctcttcagataaccagggtgtggaagcttactttcatggccagttcttggtggtggagagtgtgggtggtaggggtaagaaagcttctttgcacttcacatatgcgttcaagcctcagtgctggtattttgttgggttggagcacacaaacaagcatagtttgctcggaaaggatgacagcgaattgagtctgtatgttgatggaagcctgtatgagagccgtccttttgagtttccacgtatctctaaaccacttgcattttgctgcatcgggacaaatccaccaccaactattgccggcctgcagaggcgccggcggcaatgcccattatttgctgaaatggggcctgtctacatcttcaaagaaccaattgggccagacagaatgagacgtctagcatcccgaggaggagacacactgcccagttttggaaatggcgcaggcttgccatggaaggcaactaatgaccaagttaagagtatggctgaagagagcttttcactcaacaatgggatagggggaagcttgcatcttctttaccatcctagtcttctcactgggcggttttgtccagacgcctcaccttctggttc

SEQ ID NO: 197150 - DNA, 460 bp, Zea Mays
tttagaaaaaaaaactgaacaaacaaaagtaatttagatcgcgtgcgtgtgcagcaacggcggcgctcacttctccgattaaccttgccgcgtcccgacgccacgtcaacaaatacgcgggcgcgattcaaatcccgactgacgcctgcctgcctggcatggtttggcctgccctgccctgccaccaattcccctccctgcattcgtacaataataatgagcgtattttagtccatcccgttgatttggtcgagtatttattggctgccacatttttccacccacgccgtgtatggaactccacggatccgtatctcaacttggccaccctccaacaggcgccgtgttcgttacacggctagtcctctgcaacgaacaccattagtcctctgcaatgaacaccattattccatggaaacttgcctcacgaaaaatctctctatacacttgcattatccat

SEQ ID NO: 197151 - DNA, 463 bp, Zea Mays
aatccatacctttaggcacttccattggcaggttatgacattaccccctccaccaaaacttgcttgtcctcaagcatggtcaagaggaaaaagagtttgcacagcatagaaatcctttcgagtagagaactccggcaatatgcccgatccgtggaacaaaaccagaacaatagctgcattgccctttgttaccaatctgaggttcatgagttcccttggtgtgtcaccttcttgggtcttgtaaggaaatagaaaacaatatttcactgtcccaactattttccaatactgtgtatggcctaaaatactaaaagtcaccaagactttgcttgaggtcactgtaatgtgtgcagtgtctatgaaccctgaacaaatgttctttgatcacagaactgtccgcaacctgctgttgtatccaaatagccacccataattcctcactccctttgctcatagggactac

SEQ ID NO: 197152 - DNA, 275 bp, Zea Mays
ctcttgtcacatgcccatggcctgtacgtacgcaaacgtttctgttcgtttgcgaattgccatcgtcgcttcatctgaatacaagcgtatacaagggtatactggagtagagaacgatggcttccggtgtacaatttgctcgagtcactctgcatctcatctcactgtaacagcagactgaaaaacacaacaatttggtccaaggcacaatctgagccccaatagcaccttggctcacgcacacgcttgcacaacgccgccgcccaaggtcggac

SEQ ID NO: 197153 - DNA, 418 bp, Zea Mays
gtttgggcttattacatgaaacaacaacaatactagaaagcttagcaagcacgtcagggccaggatgaccaagacgttggtgccatagggacgcaggagtagtaacagcagcaaggccgtagtgtgtagtggctggaggagcacgcgcagtaggaagactgatggtgtacagggacccagagctgttgcacctaaggattgtgttcctagaactgagatccttcacagaaaggccaaacgggtcaaattccatggaacaattattatcagtcgtaaactgacggacagaaagaagatttttaatgatatcaggtgtaacaagaacattattaagataaaactggccagaaagcaccgtatctcctacagaggtgaccggcagactagacccgtttccaacaactatggatgaaggaat

SEQ ID NO: 197154 - DNA, 290 bp, Zea Mays
cacgagtgcgtcgtcttgatgttgtagatgctgtaggagagggctcccctgccgcctcagaggaggatgcgagcctgtaggcgtgaccagggcctggttggtggttggaccactggttccgtacgtctgtggctgcaattactgccggtccgcctatggtcataccaatcgtcgtgtctatccccacaactggctgacccgtgatcgtcgcacttaattggcactgttgggtcatgcgcgaggctgcctcgagtcgctgcactggttctgtagtcccgagaagacgccgc

SEQ ID NO: 197155 - DNA, 678 bp, Zea Mays
cggggaacactcggccctgacctgccctgttgccatctctcatggcgcccgtgcggataagaaaggtagctcctacggaaagttgatagcgggggtggcgtggaggaaagttgatctggtggatggaaagaggaacggacagggcagcggtggctgttgcggtgtgcatgacggtggccggtggtgcggtggtagtggggatgacgtggaggaaagttgatcttgtggagggcggcacgatggtggcagctagaaggacgggaacgtcgtcgcctcataccttggcatcccgtaggaagaaccttggtgcattgcactcataggggacacttgctagtgctctagtgacgacatgtaggtgcagagattggccagctacatagcaatgtccgccaaggccttcgtagacacttgttagtgctctagtgacgacatgtaggtgcagagattgaccagctacatagcaatgtccgccaaggccttcgcagtggtgttggcggttggtggtggtgggattagcggctgcttcatgaagttatcgtcacttgacatctatgataccagattgataggttctagaatgcgtaagttgtatggataggagtaagttgtatggataggagatcgaagactaggacgtgtaccttcgtcggcacacaggagccgtggtcacacaca

SEQ ID NO: 197156 - DNA, 505 bp, Zea Mays
gtcatgctgagaacttaattagttctattgatcttttttataactctcacattcttccactgcaactgtattttcagttatcttagtcctgccttataattgttctccttttcttcaacacttcaggtaaacaagtcagcagtataacttttttagcacccagatataatgatgctgatcccccaaaatacttcaaagctgctgatgggaggcctgccagttataaccaatttctttaccaaggtcagaatagttcagctggatggattgcacgaagtcctctggaaccttctgttatcaataattttgctagagttgaccgtccacatcattcgaatctgggtacatttactgtccccatctctattcctcaaatagacaatccttcaattgtctccccgatgggttcttgcacagcagacccaaggagcagcattgtcaacaatcctgctttaattccaagattcaatgggtcgtcaaccgtgaattcgtacgccagtcttag

SEQ ID NO: 197157 - DNA, 462 bp, Zea Mays
actcagcccgtccgttctaagttctgaggggaggtgtgaggacactggacacaacatctgcagttgtatgctgtgggagagaaagaacgtatgagatgtggagttatcaaactcccacccgtcatcacacacactcagaatgatgcgatcgaaccgagtcgacagccacacaaagaagtgagatagattggtgaaggtgtcactgtcagacttatagcagaggggaaaggctcataggtagtgagagaagtcgtcaaggatgattagatagtacttataaccgaagatgctagggattgaggatgtccaaaggtcatagtggacgaggtcgaagggggagtggtgcgagacattgaagaagggaagggtaagcgagtgtgatggccaagctgacaggcatggcaaagcaatgcatcagtgtcgtgggggctggtgatggccgaggtgcctaggagtctagag

SEQ ID NO: 197158 - DNA, 315 bp, Zea Mays
tcctcatggatgaggtgttcctggagcgccctgcatggctctaggcggactgcgttcgtgctgacatggatctacagcaccgtatccagcgacttgcagcagacgctcatgatctgccagcgccccgcgtgtgaggcatggagttatcttgaggacgagttccttggacaacaggaatctcgtgccctcctccttgagtcacaattctgcaaccttcgccaagactccctatcgatcaccgatttttgtcgtcgtcttgagacaatggcagcgtctctcgccgaattcggcgatccaatcggtgatcgccagatg

SEQ ID NO: 197159 - DNA, 664 bp, Zea Mays
ctcccataaaatgttttcaggctgacaacggggctgaattcatcaacattgccaccaccaaattcttcgttgctcaaggcactcacctccgctcctcctgtccctacacatcaccccagaatggcaaagccgaacgcttcatccgcacactcaacaattccattcgcaccatgcttctccatgcctccctacccccgcatattgggccgagggactcctaacggcctgctacctccataataggcgcccattttcctccattcagcatgacattccatacactcgtctgcataatcatccgtcaacctataaccatctgcatgtttttgggtgcctctgttaccccaacatgcaagcaacctccaaacataagctcgcccctcgctccacggcatgcgtcttcctcggatatccccctcgcacaaaggttaccgctacctcgacctatcgacacgtcgcatcatcatttgtcgccatgtcatattcgacgagacctctttcccctttgcagtcacctcagatgcctcctcccacgcctcccatgactttcttctcgatgacaatatggttttggtgccttgctctactgttgttgcaggtgggacttcctcctcgccacccatggtcactccatcccactcgggtgatgaccagccaccccccg

SEQ ID NO: 197160 - DNA, 369 bp, Zea Mays
gggagaatgacaaagtttctggaaaagatcaggcatcagcagagtttataattgatccttcaaatacggatgaacggagggagaatgatattgggcggcccgatgaatcagcaaaaggctgtgaaaggttaacttctgattctataaacacagttcactccaaatttggcaagtctagtaatgaagaggataagagaacacagaacaccaggtctacggatccaaaagatataaaggaatcattgggtagaattcgtgccgaaccatcaaacagggtacacacaaccagtgttgggtattactctcagcatgcagctcatgatccgatttcatcttgtaaggagatcaaagtgcctttgcgagacggtg

SEQ ID NO: 197161 - DNA, 319 bp, Zea Mays
ccactctaatacctcagaattattaaagcacaaatccacctcagatgagcatggcttattatcaacactggcttccgtagcgctctcaataagtgggaagattccacatctgctactcatattcatcaatgcatctattgatacaaattcatcacaaaatccagtataactaggcagaagatcaggtggactatcaagcaaataagagaaatcgtcatctggactataaatatccatcagtctgcaacactcattcaaaccccagttcgcctcatgatcactaaaacagaaattctggaatgaagaatctacaccatca

SEQ ID NO: 197162 - DNA, 562 bp, Zea Mays
atagcagacaacattctataaattcatatatggaggatgtgattatgtgaacaatattctcaatacaggggaaaatattaattggcacattatacaaatgtgtgtttgtacttgcaggtaccataattcgtatagctgtgtttgtacttgcaggtaccatctagtcagggttcgttgtgttctaagaaaaaaggtcgggcttgattattaattaattgtttaccaatgaaaggaatcttttggaacagcaatgggttcaaggatttgaaaaaacttagatacatttcggatctgaccaaagaacatggtctcaattttattgccctctctgaaacaggccgcaaatccttcccagatcatctactaaggaatttgtgtgctgggaaaaattttatctggcattgcaaagaacctcatggtagatctggggggatgttgttaggaattgacgctgatgtctttgatgttggtgccatcacggagggggatttctttattaagtttaatttgcttgataaagcagatggttttaaatgggctcttgtctcggtgtatggccctg

SEQ ID NO: 197163 - DNA, 480 bp, Zea Mays
gtcattgatgaaacggaagctgcggaacttgggccactcaaggaaccaagggaagatgacaatttgtttacttgtgtaaactcaaactcagcttcaattacaagtgacattgctcaaccaagagttgtcttgtgtttagctcacaacggcaaagtcgcttgggacatcaaatggaagcctcctttactaagtcaacctgaacagaaatcacgacttggttttcttgcagtattgttggggaatggcgctcttgaagtgtaagttgtgcaacccattgctatgctagaacctttatttaggaaatcatcagtcacatacttcattgtttgtacacaggtgggaagttccatcaccatgtatgatccagaaaatatattccccctctaaggtggagggttctgaccctcgttttctaaagctccaacctgtatttaggtgtgtcaaagtgaagtgcaggaacaggcaaaggtactgtggctt

SEQ ID NO: 197164 - DNA, 614 bp, Zea Mays
cccagccgtggtcattctagcttcgttctcactccagagtctccaggctccaggcaggctacgctccaaacagtgagccctgccctgcccccacagagcagcaggcagcagatagatcctcgccagtttctctctctcgctcgctcacatgatcacatcgcatctccctaaacatgctcttactcttgggtatcaggagccacaggagcgtgtataaaaaggtcctggccctctaaactctgaacctccaagcacgcgcgcgccctgtgctccccctcagtcctcgctggtcctttctccatcacaaacgctagtcttttcctaaaggtacgtgctagtgttactcaaacaaagcaaccttttttttcttcttccgtttgagctctactacctttgtggttgtgggattgggaacagagaaaactccttccgtgtgtaaccagatccgctagcatcggtggaacctcggcctcgtttagttcgtaaagctgagtccaattctttgagtaacctgagtcctgagctaggttttcagtcgtttctaactaacagttctttggcgacgtacgtacgtacagctcggagaccgccggaagcgagcgatggcgtgcaag

SEQ ID NO: 197165 - DNA, 427 bp, Zea Mays
ggcgatgactgacgagtacaaggcccttgttgacaatggcacctggtgtctcgttcctcacccacctcatgccaacatcatctccggcaagtgggtcttcaagcacaagtatcgtgctgacggctccctagctcgccataaagccaggtgggtcattcgtgggttctcccagcggcacggcatcgactacgacgagacgttcagcccgattgtcaagccgcctaccatccgagtcgtcctcagcatcgccgcttctcgctcctggccgatccatcagctggacgtgaagaacgcctttctccacggccacctgaacgagaccgtctactgtgagcagccgcccggcttcgtcgactcggccgcccccgatctcgtgtgcctcctgcaaaagtccttgtacggactcaagcaggcgcctcgggcttgg

SEQ ID NO: 197166 - DNA, 484 bp, Zea Mays
gttgcttcagtttactgtaaaattgtctgagcatcctactggcaaggtgagaggttttttgctatctacgattcttggaagctgtttttcttgtggtcccttctcatttctcttaattcaggcattgctttggaggatggggttcacaaggattcttagcaagttactacagaattgtagccgagcatctttcccgtatgataatcagacttttggaagggcgcactctaagaatgaccttatgctcaaatggaggatccctttgtttaaatctattgcatatatctttagtatcgacccatgtaataatgagaaggctgatgttgaagagtaaacacacaattacaccattatttgtttagaaacatatttcttatttacatagtacatactaaaactaatgatttttcattcaactaggtccctgaatgagaagtctgttcatgaatgctcttctgtcatgcatgacctcatgatgttctgc

SEQ ID NO: 197167 - DNA, 324 bp, Zea Mays
catgttctgtgtatggccgtggtggaggcacagtttgtcatgtcagggagcccagaagtgctgcttgctgttggcgaccgggtcattgcggttgacgaggatggcgtacaagtgcttggggaagagctggagattggacccgtgcagaagatggcagtttcacccaatggcaagctcctcgcagcatttgcacatgatggtcgccttctcgttattcccaccgatttctctaggatcatattcgagtatgagtgcgaagtaagttatttagctctactgcactgtgctgtcaatgtctgagcttactcggtgcttttgttgagc

SEQ ID NO: 197168 - DNA, 656 bp, Zea Mays
gtcttcaggtttaatctcagtgaatgatgccttctatgttgaagggacacttcctagtggtgtcagtacatctctgccgaagaaaagtctggagggaaatgccttcagcaatcaacataggattactgacactcaggaaggtttgaaaactgctgagatcaaggaaaatgttgatcatgatcttggcactaagctacctgatgattcgaacactctgtttgatgtaccatcctttgagcatcttcaagaaccccctaagccataccaaagcaacaacatggatacaaaagtgggtggccatgctatttatccagaagagttgacattatattatctggatccccaaggaggtgtgcagggtccatttctgggtgctgacataatctcttggtatgaagatggatacttcggtttggagttacctgtacgtctgtctcagttttcagatgatgttccttttcgcccacttgttgaagtcatgccccaccttgtgcaaaagccgcaatcgcgtatacctgtaccttgtgatggaaattctgaatctcttgaatcatctcaaagtaaatttgaatccagtgtccgttctgcttcctctgtgaggggtgaccaattgtctaactgggatactgaaagcaatgctgttgatcctaaaagag

SEQ ID NO: 197169 - DNA, 524 bp, Zea Mays
cctcttgatgaagctggtctcctatctttttcagggaaatcaatgcttttcattaaatcaacaatgccaccagaagttgttcttctaggtgaaagtcctctcgatgaggacaggttggaaacaggtccaattaatctctcggatgactttgtagtagtctgtgatgcggcattagacacacttgataatgatgcacttggtgaaatgctgggtgatgaaactggcgagagtgtactgttatctttttcagtaagatccatgcttcctgataaggttctagtgccatctgatgcagctgttgttattggtgacacccttcttgatattgccaaggatgagagtttgagatctttacgaacaccgacctttttggacacatcatctgcaccgttacaaggtgactttcttggtgatcccccttgtgatgacattgacgaagagaccagccgatcaattttatcatctgttgttactggtgacacccttcttgatattgccaaggatgagagtttgagatctttacg

SEQ ID NO: 197170 - DNA, 282 bp, Zea Mays
catgccaaagccaattgttttcaaccctaattcttcgtcagacccctggatggatgttgccccaagttccccaagcaaccggcaccagaggaagatgatattgagcatctcaacactcatcgcaattgtgggtggagcagttattgttatcggtgtggtcaccataacagtgctcaacctccgtgcccatgcaacagcttcccgctctgcacttcccacttcattgtcagatgattatcatagccaatcagctgaatctccagaaaatgaggccaagtctgg

SEQ ID NO: 197171 - DNA, 363 bp, Zea Mays
attttcttcagatacggccagaagtacgttttagaggacactaggaagtatttaaagaaggtgaaaaatgctcaagaagcccacgaagcaattaggcccaccagtataaggaggttgccatgtaatgactctccctgtgtttttgttgatttattgcatttttctcaattatagctgctaaccatctcctagcaaacaattctgagcaagtacattcatattgtcccatggaggttaggttatagttctacaatctcatattcatgaaccaccaaaatgttagttcttcacaggatatgctatgtattgtttggtttcttggtatccatatttcatgtatatggttgtacgattcatgcttca

SEQ ID NO: 197172 - DNA, 464 bp, Zea Mays
caggccaagacgtgaaaagaggcccaactcaaggttgagtgggctggaatggacccactagggtgtgtgcgttctgtttgccagtgagattggagaggggattaaaaagagaacaggggaaccttgagcgtgtgtggaggattttggagaacccttggccggctgcgtccggatggtgggctaatcagccctgtaatctccaccatactctatatttctgagatcttcgtgagaggagaagtgtgccgggagcggtgcacatcccaccccaatttagtgttctcacaactggtatcagattcatctgtccgatcctggcggaaccaccaagctacgtgctgcgtccgcagtacaaaacccgcgcccagaagcaatccgacgccatggagcaaggcatcgctgaattatccaagctacttcaagcgatgcagtcccagaatgaatcaatcaagacagctctggaa

SEQ ID NO: 197173 - DNA, 301 bp, Zea Mays
ataatgcacacagaaatggagcttttggaccatctgtggtatcctcagtttctcatcagaatggatccattgtaacaggtgggtctaacatagcacaggcgcagccagctcagagtattttccatccagacccatccaccgtttctgtgacgtcaggatcattttgtccatcttctctaggtaaacaccaccttcagatgtttccggaaagatctggaaacatgagtggtgtcaaggcagcaaaattgtcttcttttaaaccacaagcttacatgaacctctacaatcatggcaatattgc

SEQ ID NO: 197174 - DNA, 611 bp, Zea Mays
atgagagggaacaatgcttgtgatcaagttttggtgcaatggtcgttcatgccagctgaattggccacttgggaggatgtgcatgaattgaagcaacaatttccaaaggccgctgtttgggggcaatcagcgttttcagcaagggggactgttagcggtactacatcttctgctactgggaccattgtggcgcaacgggttagcaggccgaccaagaaatctacaaaggtgtatggaccggattgggtgaatgggctgcagctgtgctcgctttgcgaataagtagaacgagagttgcctgatgaagggcatgtaagaattattcactacaacttcttctccaagttctgctgctcgtccgccgccactcttcttcctccttaccttctgctactcctaatcgtcctctgctactcttaattgctgttctcttctactactaccttgtatccataccgagttgttaacaggcctcgatctcgttggtgatgggcggcgacactagcgccggggacaacgacgctccagcttcagttggtcactttcgctttcggaaccccccgacagagagagtgcatgcgatgcgcgctgtcgattattgacagaccggc

SEQ ID NO: 197175 - DNA, 1415 bp, Zea Mays
gtcaggtctcctgactcccctgcccacctctcctgcgccctcgtggggcccttgggtggctggtgggacacacagtctcttgatgggtccttcagcacgatgactctcgctctgcccacctcggtctcggactaggtggctgactccgatgcttcctaccacaccacccctgacgccggtactttatctgccactcatcctcctcatccctctctcccttcatcgtcatcggatgagtcggtcaaccacgtcacctcaataggtgatacggtccttcccggctcctttcgcctcaacaacgttcttgttgcccccaacatcattcagactcctttctattcgtcaatttactactgataactcttgttctatggagtttgatctcttttgcttgtatgtgaaggatcttgctaccaggacacttcccgcgcgttgtgacaactccgggccgctctacacccttcgcctgcctgcctgcctcctcttcatcgacctccaccccgcatgctttgaccgctgctgcctccatcacttggcaccgccaccttagccatctcgggcgtgatgtgatgtcgaagttgtctagcagttctatcatctcttgtagtcggggttcttttgatcacttgtgtcatgcctgtcagctaggtagacatgtcaatttcctttttcttcctcttctagggcagcaagcaattttgatctagtccactgtgatgtctggacatcccctgtactcagtgtttctggcaataaatattatctgctcattttggatgaccactcccattacttgtggacttttcccttgcgcttgaagtctgatacgttccccaccctttatcacttcttcgcttgggtctccactcagtttggacgcatcgtccgagcggtccaatgtgacaccgggagggagtttgacaactccacctcccgttccttcttcctctcccacggcactcaactgaggatgtcgtgcccctacacctcttctcagaacagtcgagttgaacgcatgatccgcaccacgaacaacgtcatgtgttccctgctgttccagaccttccttcccccgctactaggccaaggggctggccgccgctacctatctgctcaaccgcctccccaccaaggcggttcctcaccccaccccttactttgctctctttggcacctctccctcctacgatcaccttcgtttttttggtgcacctgctatcctagtctctccgccactgcccctcataagcttgtgccccgttccactcattgtgtcttccttgggtactcccctaatcacaaggggtaccggtgtatggacctctccactcaccgcgtccttgtctctcgtcacgttgtcttcgacgtgtttgacttccccttctttgtatctccctccgctgcctccccctctg

SEQ ID NO: 197176 - DNA, 958 bp, Zea Mays
gcaatcaatcacaggtgtggggtgcgacaaggagacccactatccccctaccttttcattttagcgatgggtccattacaccggatgattgagaaagccgctggcgagggattgcttggacaggttttacctagaggggctaagttgcggtgctctctctacgcggatgacgtgggtgtgttcattaaagctgacaggtcagacttggaggtgctcaaagggattctcaacgtgttcgaggggtgctctgggctaaggatcaactatgacaaaacagaaatctacccaattcgttacccgacaccattatggcatgcgcttatggaggtgtttctaggcaaatactctagcctccccgggaagtacctcgggttaccccttcatttcaaaaaagttagaagaaatgaccttcaacctttaatagaaaaaatcaacaacaggttggcaggctggaaaggcaaattgctgtcaaaggccggtagagaaactcttgttaaagcggtgctatccgcacaaccaatctaccatttaacggtttttccacctcaaaaatggctgctgcaaacaattgacaaaatgcgtagaaatttcctgtggaaagggggcaatccagaagcctgcagcggggggcactgcctcgtcaactggcccctaacctgcctcccaaaggacaagggaggacttggtgtgctggaccttgatcgttttgcgagggggctaagattaagatggtcgtggctacgttggaacagcaaagatagggcgtgggctgccttgaagcttccttgtgacaaaactgacgaagatctcttcaacgcttccacaactgtcacggtaggcaatggaaagatggctgaattctggaagtctagttggattcaaggccaggcccctaagaacattgcgccatcattgttcaagaagacaaaaaggaagaacatcacagtggccaaagcgc

SEQ ID NO: 197177 - DNA, 1847 bp, Zea Mays
ctaccattagctgtcacactgacgtaagcatggtttgtgtgttattttctgccagccctttcgtcccttgccactcaacatactttatttttgtcaggcttgctttctcaatgcgcaaaatgatgaaggacaaggctctggtatgttcccaactttctataccttggttttgtcatactacttgatccgacattgaatgctttgcacgctcacttcctatggaatgtaggtcaggaggctttctgcatgtgaaacgatgggttctgccacaacaatctgcagtgacaagactggcaccttaactttaaatcaggtgcaatggtgtttattcactttatacatactgacatacatgtttcagataattctgtttgttgaatctgattggccctgatttttaaattctcttcttcctggttgattttaagatgactgttgttgaggcatattttggtggaaagaagatggactcaccagataatgcacaaatgttatctgctgatgtcacatcactgattgttgaaggaattgcacagaacacttctggaagcatatttgagcccgaggttagtcatctccattcgtggagaaagaaaaagcatatgtggttgcatatgcatttgagatttcaggttttagtaaagatatagcttcgtagtgatccctatgcgccatcactcagtggttagataaaatgtgcacccttacaatttttttattggaatttattgcacatgcatgcctgtgtagtgatcttcagaggaaattttatgtttggttctcaagttcaattgattttttctggcttgacaattatcaggagagcatgaacagacatgtactttcttggggccatgaattctgacttatgttctacagggtggtcaagaaccggaggtgactggatcacctacagaaaaggctatattgtcttgggggctaaaggtgcaaaaagatcctttatagtagtcacagagatccttctataggttaatctcttgctattgctaatcatggtcggcacatttttacagctgggtatgaaattcaatgaaacaagattgaagtcatctattcttcatgtatttcctttcaactcagagaaaaagcgaggtggggttgcagtgcacctggtaatttgaattatctgcaaccctgaagatgttgtgtgatatctcttgaagacctaagtcataacgttgtgctagatcctctcttttttaccctaccacagatgggttgaaagggtgcatgcatgttggcccattggtatctgatatgcctttaacggctttaatttttcaaaatcttcgtactgtttgaaagatagcatttcagtttccacctatttagggttcctttttttaaaacaggttaattatgtttgaattattaactacattacacctaatccttcaaatcttgtattcagcaatcatggatactctcctgctagttctaggaaaaatatgaaaacaaaataatgatcagaagcagatactttcttccttgatcagtgtctcctttggttaagctggcaatttgtattttgaatatttcaatgtctaatcacttccccttttttttttgaaggatggccctgaagtccatatacactggaaaggagcagctgaaatcattttggattcatgcacaagctggcttgacactgatggttcgaagcactcaatgactcctgaaaaagtatatattttttaagggaacttcatgttcgttcttttcatttgtacagtatcttagtttattaatatttcagattgctgaattcaagaaattcattgaagatatggctgtggctagcctccgctgtgttgcctttgcctata

SEQ ID NO: 197178 - DNA, 805 bp, Zea Mays
cctacggcagcgaagcagcagcaacagcaccttccgatccagcgtgcggtggacaatccggtagcctataggtgagagaactgacttacaggtacacgagcttctcagtatatagcctctcagtatttcatcaaattacatacaaaaaggcaggacaaagcaagaagggaaacaaaaatacccgttcttcttcattggacatgtgttgggatacaaacgtctagattgctctagtataggatgcaagttccctccgaatagcatcatcattctgcacatccctgaaaagtgcatatgcctctgagaaccggccatccctgcagaggccatcaacaagagcactaagcgtgaccacatcaggcagcacaccagacctgaccataccctcgtacagagtgaacgcctcctcgatctgcttcatcttacaacactccccaatgagtgcagtgtgtgtgaccacactcggctccactccatccgccttcatcctctctgctacctcccatgcagcatcagcatcaccggagtggcaaaacctggcaaccagggtattgtaccccaccacatcaagcgccagcccttgtgtagtcatcctctccaccatcaccaatgttgcggccatgtcctagactttacagtagccgtcaatgagagcattccatcccaccacacccaagccatcaattcctcggcctcggaccagcgtctccgccaatgccgcggcctcgccgataagtttggtcctgcacagccccatgagcgttgtgctcatggtgactccgtcccagggcacgccgtgcttgca

SEQ ID NO: 197179 - DNA, 408 bp, Zea Mays
gcggagcagcaggtacggtgagaaatcgcccgcacaccggtcgatcgtgcgccaagttgacggcatcagaagttccacttacgcaggcgacctgaccggacagctcgccgaggctaaatcatcggcagagcggtgttgccagcggaggttgaccgcggcggcgacactccttgctttctctgtgcgctctcgacggatacgaaacggcacatggtgggcagcaggaagggcgcatggctcgacatttatacccgactgcagagtccgaccccgagagctccggctgaggatgccccagtctggcggcggatatcgcgcggcggcggacagccaacggacacacgggttcggatcggctcgaatccagggagtagttccgccatgcgcgggattgaaggtgacggcggc

SEQ ID NO: 197180 - DNA, 300 bp, Zea Mays
cttgcacctctagagactatcaggtagtcactactttaccttaacctttacactcgtccagtttattttatatacgcattaccattgtagatgaaatcctaccgctactttgcttggttttcactgcttattcgaggttgcatgcacttcagagatgcaatatcccaccaaccagataattactcatagcatatttagctttttgcatgatgctgtgttttgaaatatgacatatgccgatggttcacaaattgcttaatttctccagagcactaccttagtggcacgctacagattttt

SEQ ID NO: 197181 - DNA, 545 bp, Zea Mays
ggaggttctcatgcttagagttgatcactggttggtacgagaggttatgaaaactgacgttggggtcaatgtgaagatgcagttcttcagatgggctgcaaagcggaggaattatgagcatgacacatccacttacatggcattgatacattgtttggaagtagtggagcagtatggtgagatgtggaagatgatccaagaaatggtacggaatcccatttgtgttgttaccccaacagaactttcagatgtagttcgaatgctggggaatgctaagatggtcagacaggcaattacaatcttctaccagatcaaaacgcggaagtgtcagccaattgcacaggcatataacagcatgataataatgttgatgcatgagggccaatatgagaaagtccatcaactatacaatgagatgagcactgagggtcattgcttcccagacactgtgacatatagtgcattgatttccgccttttgcaaattaggtcgacgtgattcagcaattcagttgttgaatgagatgaaggagatcggtatgcagc

SEQ ID NO: 197182 - DNA, 323 bp, Zea Mays
cagatgggagaaatccgtcaaggagatagctgtgtctgattgctctgctttttggaaattcatcgcgacaaactggagccaaaacacccagaaacttctttctggctgtgccaaagttcctgtatgtactgacggaaagatcattttgacaaagaaggaggacgtgttcattcctgacgatctactactcacggacctgttcagcaagctaacccagcattcatttttcatctggtatcctgcttctatcctcccttccatgtctcgagctagacttaaccacatctatgacaccatcggtgtccaaagaatctccaaagcag

SEQ ID NO: 197183 - DNA, 386 bp, Zea Mays
gtggatgactcgttttcgaggttggtgggaccatttgatgcgccagctctccctgatgcttcggttgtagagctggtggcgtctgggactacctcgtttcctgctgagggattgtcagctgttgtgccaacactccctgtggcctcgggggcagggtcggatgttggtctggattctgcggattattcacgtttggaatgttcggccatgatgaattgctcccgcatggggtctgctgcgccattggttcggcctgatatctttcctggaccctcttgccctcgatactgcaagcccattctggtttattctaggagggaccagagtctgcaacatgatcttgattcattggctgataagtctgcccctaccagtggtaatgtcaa

SEQ ID NO: 197184 - DNA, 508 bp, Zea Mays
gcatgcaccaatgttgttagtaccagacgtactaggtagagggctccaaccatgcgtcaacgtctgaaggaactagcagagaaggcctccacgatgattgcgatgcacagaagaatggcgaggaagaaggtatcgatgccgcccgcggttgttggagtggactaagtagacgaggacgagaggatggcattgcagatgaggttgtgctggacaaagtcgaagtatttgggtgacatatcgaggctcctggagtgtcagggctggggcgagagagctgcaccgcacaagcaaagccgcgatggtgctggagtgtcacgacatcgttgctcaaagaaggcgatgaagagcgcgaatagtcggggtagaccatgtgctagaggcgcacaacgatgaagtcgacaatgatgtagggccaacaatgaggatgacaacgggcggtgatggtgcaaacccgatcaccaatcagttagaataaaaggactcacaacaacaacaaatttggctgcgg

SEQ ID NO: 197185 - DNA, 560 bp, Zea Mays
tatcattattcttgtcttcaaccttgtatatgagattaaaatctcccacaattacccacggctcagagcagatgcttctgatatgccttaactcttgaagaaaaaggatcttttcagaattactttgaggtccatagacacaagtcagccaccaagactgcccattagttctctggaattgcaaggagatactataagaatccactctgttcagccctgtcacctttatatgctttttccaggaaatcagaattccccccctagcaccctcggacggcagcattatatactgatcaaaatctgttcccaaaatagccagcacctttcctctgttaatttcctgcattttagtttcctgaagacagataacgtctgcgccacaagcatcaatgcaagttctaacagaacattgcctagatgtagaattgagaccccttacattccagctcaagattttttttggatccattacaaaactcttacatcagcgacctctacatgacaactcaacaggcactaatgccaacactaatgctgcccaccttgagatcatctggtac

SEQ ID NO: 197186 - DNA, 446 bp, Zea Mays
gcccaatcacagcgcgtcaaaatcgtgacaggttcccgtcgaggccgcaaggcccgcaactgccatcgtcctctgctcgtcgcgtcgttctcctctcgaccgcatcgcgcccgtggcggggaacgagccatcgacgccgcgtcgcgtgcctttcttcttcgtcccccccctgcctgcctagctgtctcaggctgccgcccgcccagccccaaaacattcggcagccgagtcaaccgagaacacgagccatccacccaccctgtcccttccccggctttcccccgtcctcggctccaccaattgctctcgcgtcagtggaaggaaaaaccaagggcgagggagggaggagcgcatctccgccccgcccgcgttcccgtaccccgatccgccacatgatctgacaccgcattgccgccgaggtgacccctcccgcccccagaatggag

SEQ ID NO: 197187 - DNA, 689 bp, Zea Mays
cactgacacatggccgatcgagtccaaacagtgggagaacgggaatgctttaatgcttaacaacacggtgtattagagcaacaatgttttttttccagcgtcccccatcagggtacagtgcgggggtatttataggtaagcaggggacagtctcaccttggtaaatacaattatgcccctggttacctacgttattcctggaatattcctccctcaagggttattactgtagagaattggtttaggggaaagcaccgcacactcaatcaggtgcgtgacttctcatatatatagccaagtggcttggtgtacaaggatacaatctcctaaactaggaaggctgtcacctatacaaggtaaggctaaactaggaaggctgtcatctatacagggtaggacagccggctgtagatatatgcctaatacccgcccgcagtcgcagcgggagagtcacggacgcaaagactggacctaaactcagtaaacaactggacaggtaagcctttggtcatgatgtccgcgaattgatgagtagaggggacatggagcacccgaacttgccccagtgccactttttcgcgaacaaaatggatgtcgatctcaatgtgcttcgtgcggcgatgatgaacgggattagctgccatgtagacagcgctcacgttgtcgcagaagacgaccgttgcagaggc

SEQ ID NO: 197188 - DNA, 703 bp, Zea Mays
caccgttgcccttcggcttcgataaacacccctcaacccccattgctttctagccccagatccccaatccccaagaccccaacgcctcacgcacccctcaaccctaccgcagctgcgcaggcacacgacctccgtgtgcagcgcatcgccgccatgacgggtcccttacactccagctccggccacaacgccgccgccggcggcgggggcaagaccatcgaggaaatgtaccagaagaagacgcagctggagcacatcctgctgcgccctgacacctacattggctcggtggagaagcatacccagacgctctgggtctacgaggacggcgccatggtgaaccgctccgtcacctacgtccctggactctacaagatcttcgacgagatcctcgtcaacgccgccgacaacaagcagcgggatcccaagatggacgcgctccgcgtcgagatcgacgtcgacggctgctccatctccgtatacaacaacggcgacgggatacccgtcgaggtccaccaggaggagggcgtctacgtgccagagatgattttcggccacctcctcaccagtagcaactacaacgacaacgagaagaagacaaccggcgggaggaacggatacggcgccaaactcactaacatcttctccacggagttcgtcatcgagaccgctgatggacgtcgccaaaagaagtacaagcagg

SEQ ID NO: 197189 - DNA, 339 bp, Zea Mays
gaagcaagatggtccttctctggctcagtcgcgaccagttggaagcaaagcaagtgaagatgcacctttgtttatcttgtcgcggccaattgggagcaatccaaagttaaggggcactccggtgcaagatagttggcccagtaaagagagtttagctgccgcaacagagttcagtgaggcggggagcatctcaagaacaggcgaggtggatgtcgccttgcggaaacccaccgtgcaccagagtcaggatgatgatctgaagtccaagctcaaaattaagccaaatgttaacctgaaaatgaggaaagatatgaatgaggacttaaggaacatttctct

SEQ ID NO: 197190 - DNA, 1167 bp, Zea Mays
gagcaggctctgaatttgaggaaatgtaagatctcttgtaaggtgctatctggcattacaatttttttgtgtttattggaagttatttggaaccttactctaccaaattgcaattgtctttactgggtcagaaaataatcgatcgtagatgtgtgcaatctgaatttattctattctgtaacacaattgaaaagttaatagaatggtaatgtcttagcattcatgacaaacttaagtccagctggcatttaatatcccgctattaacatttattgtaccctgctatcaaaattttctaatttaacatttttaactatgacttcatctcttctcaggtttgttggtgttggtgctcggagagtgaggtcattgtttcaagctgcaaagaagaaggtatgccattctgctgtcaacctgtatttttgtaaccgtagctccttcaaacttttctctgtgtctatggtttgtggatcagagatagttactttgccgagctttcagatactctttctttgactactctatatatttggaatagaggttatacgatttagattaagtcgatgagtaaattggtttctttccataagggtaaatgttgatctttttttatttgctgccattgcaaaagtaatagttccatccagaaaaaatatcttatttaggatgttactggtcatattttctactttgaccatgaatatgtacaaaaactgttaacccattttgttttgcaaggaaacaaaaatagttgatttggtaacatgaataattgtatttgtatcagtatatatgttatgataagttattctgaaatgcaatattttatgttttactgacttaataccatgaaaactaaaggtcaaagtaatatattttaacaatctttctctttacaggcgccatgcattgtcttcattgatgaaatagatgctgtgggttcaactagaaaacagtgggaagggcacacaaagaagacgttgcatcaacttcttgttgagatggacgggtttgaacaaaatgaggtatgctagtctatcacattatcaaatagagcaatatattcagaactttacctgactcttgcttccaattgatcttttatcttacagggaataattgtgatggctgcaacaaacttggcagacattcttgatcctgcactca

SEQ ID NO: 197191 - DNA, 425 bp, Zea Mays
gcgcctgtgaggtagaaccttggatgggagatgaccccggcgccaactgatcatcctcctgattaagaggcataagggtcgtttgcgtggtcaacgacgacgcctcttagccagatgaaccgcaccaataatattcagagctccatctgaagatgccaggaacaccagaacactagggtcgatatgttgcgaagcataacagacaggagttgttctccaaactgggatccttggctcaggccttctcttaggcaccatcactgcagtagacgaagacctcggcaaggtgatccttgcatccatggagtctgaccaagcatgatgcgacatcctcttgcccagccgatcccaaaccgacttcttggacacagacacaaacataggctcaagcctacaccaaactgaccttcttggctctatacgct

SEQ ID NO: 197192 - DNA, 381 bp, Zea Mays
ctcgtcctcgccgtcggcgcgagcggcgctcaggtcctgcgactgccggtacctttccttcaccctggccagcttcagcagcgtggaacgggcgagcggcctccccgacgacgagaacctccccgggaggcacatgatggtctcggcggcgaggagctggcaccgagggaagtcggcgttcttcaggcactggatgaggcagtccagggcttcctcgcggtacatgctgatcttcctcggctccaccaggagatcaagctggaggagcagccccgccacgacagggctgtgctccggcggcgccgactgaaggtacaccagcagcgtgtgcatcatgctgaacgagccaccctccttgattgtgcgaagaagacgctccgc

SEQ ID NO: 197193 - DNA, 584 bp, Zea Mays
ctcgacaccaaatggctcgatgcgttggggcccattgtctgggaccttgccaactggcgcatgtccttccaacgtgggggccgcaccatctcatgggcgggcctatccacgatgtcgagcccggcggtgtgcgccttgtccgctgaagaatcgcttttggatgctctcctcggagcgtttgcaagggtcttcgccacaccaacgggactgcccccaagcgcgcacatgatcaccgcatcctgctgaagcccgatgcacagccggtcgccgtgcgcccctatcggtaccctgctgcccgcaaagatgagttagagcggaagtgtgcatccatgatggaacaagggatcgtccgacgcagcgactccccgtttttgtcgccggtcctccttgtcaagaaggccgatggatcctggcgcttctgcgtcgactaccgggccctgaacgccatgacggtcaaggacgccttcccgatcccggtggtggacgagctattggatgagctcaacgacgccaaatttttctccaagctcaacctacggtcgggataccaccaggtccgcatgcgacccgaggacatccacaag

SEQ ID NO: 197194 - DNA, 551 bp, Zea Mays
cgatgataaagctgttgaaatgcaagacggttttaatgcacaattatctgatgtttctgaggatcttgaaggcaaagactcgggtggcgaagatgaggataccttggataatcagatgggtgatactggtgatgcaagtgaagtggttggcaagaaatcatgggataaggatgaagatgatgatcctaagacatctattgagaaatatgagtcaggctcatcagccaagggaacacaacaggatgatagggaaatgagagctaaggatgatggttctattgaggaggaagatccgatggaaatggattctgaggaaggaaagaataataatcttgaacatgatcctagtacccatgatgaaaccgaactgaatactgatgaagtcatggacaaagctgatgcatatgatgaccggactggacctgaactccctgaaccagagaatgattccattgatgttgacatggtggaacaagaacaaacggatgaaataaatgctgacaatgaagatataggtacagaagaagctgaacaagcagatcagaggttag

SEQ ID NO: 197195 - DNA, 1213 bp, Zea Mays
cttgcatatagtctctttgctgaatggaacttttgatgaagcagttggggagcaattggttcttaatgtccttcggacactgactgctctacttgctgaaaatgatgagtcaaaggtaacaaaatatttcgctatagttcatgcatgtgctacataaactgtactaagcaagtactttcaagcctgctgttaccattttggttgttcctggaaaggcacctgtatcttgttttcatggatgtcctcctgggttaccgttggcaacttaatccctgcagtgttgcataccactgtaccagcaacattagtgctgcaccattaccgtttgcgtgttggcactattcattggtacttaatctggcacatacatgtggtaaagttcataggcctacacacatggcacagcactaggtggaaattagactattagataggtctaattatggccttatgggtgtgagcacagcccacccaatccacctgttacacccaaccaaatcatgaaacaaagtgatgcatggattgggtaaaaacgggttggaaactaattggacccagggtcacctcactgtgctgccatccctgcatttgttggcctctctgatgttgcacttctttcctccttgtgattcagttcacagctcctatccccagtaggctgatgcatatataggaaggatggctgaaactgaaagcattcatttgcagccacagcggtaagtagtagaagcgaacaggccagcacatacaagcaagcaccccgctgagctgggtttcttttacaagggggtagttagtctaagtattggtctgtccagctctttactcgtgctgttatttgcttgatgtgattttaaattctggtttgccttatccaggctgccttcagattgctggtcggtgcaggttatcaaacactgcaaagcttgctattggacttctgtaagtggattccaagtcctaaactcctggatgccctacttgacatgcttgtcgatgggacatttgacataaatgaaaaagcaacaataaaggtgagaaatgacatgtttttggaagcaacgacatccttgtatatatacttgatttgcttcactaaattgtacccccttctattacattctgctacctgatatttgttacgtgattctgctgtccttttcatcagaatgaagatgtgattatgctattaataaatgttctgcaaaaggtc

SEQ ID NO: 197196 - DNA, 394 bp, Zea Mays
ctaacttctggaatcttaaaatatcgaagttggaccttagccataacaatttccaagggagcatacctgttcaatttagtaacttagaactcatctggctaaatctttcatcaaacaaatttagtggtgaaattcctggaactttaggacaacttgaacaaatacagaccattcaaatggaccaaaacattcttactggaaacattccgcccatatttagtcgactatatagcttgaacttgctcaatctttcccataacaatttatctggccccatgccaacttttctaagtggtctaaatcttagtaaactagatctatcctacaacaattttcaaggacaaataccaagaactggtgtattcaataatcccacaattgtttcactagatgg

SEQ ID NO: 197197 - DNA, 327 bp, Zea Mays
cagtaagccaccataagcacttgttgtctatatcgtacacgcgccaacatacaaatgatgaaattccagctggtagttcaacacctttacgtaaaaaggcaactttgcaaggatgcagtagagaaacagcagatgcttcgtcctggtggaaagagtagaagatctcgtttggggcagcgctgagttgtatatccttgttaagcttcacgtcggtaggtctataaagccaactaacacgtaatttgggatgtgcttcttcctttttctcaatccaacgtatcaatccaatgaacggaggagcaccgacagcccgaaaaagagcacaat

SEQ ID NO: 197198 - DNA, 285 bp, Zea Mays
gccgctgccgaggtggaggacgtggcgacggagttccttgctggcgcgcggaagaagactaagactgctggtcgccgtggcaaagcggaagctgcaggtactgccggaggaactgtccgcgcggcggtggcggagatgaagtgccaagtgcctggctgtgaggcggacatacgggagctgaaagggtaccatcgccggcaccgtgtgtgtctgcgctgcgcgcacgctgctactgtcatgctcgatggtgtccagaagcgctactgccagcagtgcggcaagtaa

SEQ ID NO: 197199 - DNA, 526 bp, Zea Mays
tctatgtcctcgccactgcatctgcctccacttggcaccgtcatcttggccaccccggccacgacgtcctctctagactcttgggcacctcgaccatcccctgcccccacggcgacattgcctcgccttaccatgcttgtcagcttgggcgccacactcgcttacccttctcctcttccatgtcctaaaccgctcaccgctttgatcttgtccactgcgacttttggacaacccaaatatcgagcatttctagttaccaataatatctagtcatcctggatgacttctctcactactttcggaccattcccctccaccgtaagtctgacaccttcaccaccctatctcacttcttcgcatgggtgttcactcagttcggttgcaccatccggggtgttcagtgtgacaatgagcgggagttcgataactccacgtctcgtgccttctttgtctcgcgcggcgtgcgactacggatgtcgtcaccttagatctctcctcagaacagcgataccgagcgcaagattcg

SEQ ID NO: 197200 - DNA, 1314 bp, Zea Mays
ttcttagcctctacgtttccccaaaatacgaactctgaaatccattaaataatgttcactacttctctcagtttaggtggcttctatataagaaggcctcacaagtgctatatctacattttgcattgaagagacgtgcatttcttgaagaattccatgagaaacaagaacaggttggttacataatctatgattattttgagccatgcttgaatatacctattctttctggttaaccactaaacacactggttacatcacaatgcaaatatatgtcgttgtggaagaacttttgcgcctttttttttcttgacaaaatcacaaaactatttagtttataaccatcatctgcatctaggaggtgcttctcattacattttgcatttcactgtattttctgtcattttcacttgcttgggccaacacatgcatattactttgagatctgtttgggggttctataccctaatgtagctgcacaatgcaagtatgccttctaagtgagtgattttgctgatcaacctgattctatccctttatttgactgtcaactcttcttgacacagtatatttgttttgtgcggaagcttcatttccagtcatgtagaactgaactaatctcctttgtttaattaaaggtcaaagaatggcttcaaaatttggggataggggagcatgtgccagttgtacatgatgatgatgaagccgatgatgtgcatgttccttcacagcatgacgaaaactctgtcaaaaacaggtaaagtggtggtttattaacaatgttcaccttattgaagtaaaagaataatggaaacttcagcaacaaaatcttgaaacaattttgatgcacttagcaattggcttcccacatatccatgtgcatgtatagtaataaacatacttaaactttggatgcaggaatgtcccttcaagtgctgttttacctgttattcgacctgcccttggccgtcagcaatcaatttctgatcgtgcaaaggctgccatgcaagaatacttgaaccatttcttgggaaacttggatattgtcaactcaagagaggtagcaaaaacacttttccgtaaaacaagtcatgttagttttgatgactgtgtaaatatatacaaagtgtattgttcatgtgtccgttagagtggatcatcatgtttctcattttcttttatacagtaacatctgttaaaatgcaggtctgcaagtttttggaagtttcactgttatcatttctgccagaatatgggcctaagctaaaggaagattatgttacagcaaggcacttgccgaaaattgagatggac

SEQ ID NO: 197201 - DNA, 481 bp, Zea Mays
cttgtgaccgtccctgtcgttgcgtcgcctcttcgagcagcagcgtcgtcgttcgtcgacccccgccgttgcatctacatcattgtcgactctgtcagtttatgtctcctgcgcacggtctgtgagttgttcgacacctgcgagctatgtcggcacacccatcgctggtctacaccacgttcgtcttcgagttcttcgctgacttcaagcaccgttgtcgcgctacagtggcattgtcgaggaccttctacctatgtgttgtggctctcccgtcgcgacaacttatggatcctcgatgcgtcgccacgcctacctcttcgctttcttccagcacaaccttgttgccagcgtcgccatctcatcctcaactacgctctgacaaccgtgagttgttacggcactcccgccataccgcaccacaaccatcgtggaggtcttctctgctcgtcccttcagacgctgacacttggttggggctttt

SEQ ID NO: 197202 - DNA, 368 bp, Zea Mays
ctggaccgtaggatcaaaatccagcgatcaggggcgtaccgagtcgtgggggtatctgagtcgtagatctaagtggctacggttcagatcaatgagggggaaacatttcactattttaaatctaggccatcgatttgagatccgatgacgcgaattagtgcgtggtgtgggtaatatgggggccatagatctatgatccatgggccacggtcgctcgttgtctcatttaagcgctgatgtaatccaaaccataggatctgatctgaacgaccctcatcagcggatacccctttgggtttgggtttttcacatatgagcccctggttcttgtcgaaataaaccctcagtcccttggagttcaatgaaca

SEQ ID NO: 197203 - DNA, 385 bp, Zea Mays
gttccttgtactatgactgttttgtattaatgagctaaggtaatgtagaaaggtataactttcagcacataagatatgtattgagattagatgcatgattaaaatattggaaacgattaatttctgcaatgttgtaaactcacctgcgtcttatttggggcatccattgagatattgcacttctttttgggtggctcaaagtcatcatcatcatccacattaggcatagcaatgtttttagcagcagctgcaacacttgtctttctatgctgcggaggatcaccatcagaaggcgtatttgtagggtctgccatgtcagtcgagcatggaatgtcaacactgaaacattcttgacttgactcaatgattaaacacttcgaattgg

SEQ ID NO: 197204 - DNA, 883 bp, Zea Mays
tgtaagtacctcggtttgcctttgtctcccaagaaactcacaagggaccaggtctaggccgttgttgatagggtggccagccttctgccaggatggaaagctgagctcatgaccaaggctggtagagctattcatgtgcagttcgtcatgacggcaaagatgatttatgcagctttggcacttgaccttcctgtctgggccatcaaagcaattgataaacagaggaagggcttcctctggagggacaggaaagagttctgtggtggtcattgcctcctggcttggcctaaggttacccgtcccaaggagctgggtggtctactggtcttgggattagtgatttaaagaacctcggttgggttttgggggctcgttggccatggctgcagaaaacagatcccagtaggccttggacggacttccccacacgtctgtaaggtggtacaaaatctgattgttgtagtcgttactactaagctcagtgatggagccaatacccttttttggaaggacagatggttggatgggagatgtattagggacatagctcctgcaatgtttgacatggtgcccatgcgtcttgccaacaaacggttggtcaaagatgctctccctaatctccattggatctccgatataaaaggggcaatttcactcagaatcattgctgaattcctagaactttgtgaaatgcttgaggcagttgttcttcagcatggagtaagggatcgacaaatatggaaattcagtgcttcaggagattatacagctaattctgcttataaagctctcttccatggttcagttcagtttgaaccagcagaacgagtgtggaaatcttgggctcctaggaagtgcaagttctttatttggcttgtggagc

SEQ ID NO: 197205 - DNA, 321 bp, Zea Mays
aaacaactctatgaggcagggcgaccaagcaaccctgcgaggcggagagaccaccaagtcccagccaagcatcaaccatgtcccggtcgagcaactttgcgaggcagggcaaccaagcaatcctgcaaggcggagcgaccgattaagtccctaccgagcactgaccagatcctcgtcgagcaactcgacaagacggaagtcctagttcagtactcctgacccacgtcagcaaggacaagacacatcacccctagaccgcaaacgaacatacgtgcatcagacctatgatgcgccaggaggtctctataaacacgattgtac

SEQ ID NO: 197206 - DNA, 461 bp, Zea Mays
ggaactgcagaatccttggatgttgtcacaactgttaagcacagggaaccacatatgccctctgttgatgaattttcggcactaatagaccactcaagttcaggtgttgagctcgttcaatttcgtcagggtcaatcgaaaactgcatcagatatacaacctggaaaaagtacaaatccatatagtctaaaattagaatcctctcatgcacctttagtcagtagttcacacccactggagtcaacaagtttagcttcgtcttcccacgttacttctgataatgggttttcgttgcataccaaaagcagcaacagagcaactgcaaatggtcatggtagagagtgtgcacagcccttgggtatcagttctgagcgtgcacatcaagctttagcacttgagcaccttgagaatatgtggacaaagggaaagaactacaaaccagaaaatgtagaacatgtcgc

SEQ ID NO: 197207 - DNA, 278 bp, Zea Mays
gaaacggcgctgcatgagcatcgtaagaactccccttaccgaactcgccatcgtgtcaatttcattttgcgatcatcggaactagtggctgtgcaccgtggggcgagatgggtgtttcgattacggcgtccccgccgcggcatcactataggttgccggtgttggaccgggaggggggaagacgtggcctggccattgatctgctgccgaacgaccctgattagataggaaataccccttcgcgtgattgaatatgggtcgtggatctgagatcatgc

SEQ ID NO: 197208 - DNA, 688 bp, Zea Mays
gggatagatttgaaccgcaggtgcagctcgccttggagcgtggactgcctgcaatgatcggagcgcttgttgcccacaggctaccgtatccatcgaggtccttcgacatggtgcactgtgcggactgccgtgtcccatggactgctcatggtaggacatgcaagacgtcatgctattcctgattaaacatacttccttcctgatgcatcatctattcatttattatttcactgattactaattgttcaaaataaagtgattttcctattggcaaatgttggagtcggtgaacactgaacagaacaggacaccctcctcatatgtcgatgtcaaaactaaagtacagtttgtttgtttttttagtcgagtgctcttgttctcattcacctatagctgattccagatgggctctacatgctggaaatcgaccgtcttctccaacctggtggctattgggttttctctaagccacccgtcaactggaaatctacatacaacatttcgaatcaagggaccatagacaagcaggacaatcaagtagctatggatgacatgtcgaaaaggcttcgttggacgaaggtgtctgaagagggcacaatttctgtttggagaaagccttcttgtaatctccattgcgaccaagaagcaaatgcaaagcttgctggattgccaccactctgcacaggag

SEQ ID NO: 197209 - DNA, 761 bp, Zea Mays
ccggactacaatggttacacaatgatcaaacagaactatctcgacctacaaacatgttgccacgcaagagcgcagaaatttaaggacacggtaaatgttgtggtcgttggaggcaaggctgtgaggaagcgattggtgagagacccatcaaccaaagtacagcctcgtactatgagaccactgcatttgctctagggccccaacatccgagcaccccgcagagaacctgcgggtatttcgaagctaaaaagagagcttcccccaagtggcatgggacccttaattagatatattaattaacaacagaaagatcaaaaacagagcaaccaaagaccacagcttcgcattttggttagacttgcattaacactgatagaggcgcgtccatcccgacatctaagcacttgcatgatagagctgtattcgacctgacagctatatatttccaccatcgtacactgatgggttagcatccaaccagagatgtaaactgacatccaacaatcaagacgccacacattcaaacgagtgaggtgagcaaggcatcctacctcagtcagagtcagacactgctggggtacatgggctcacggaccttacggagacgggtcagatcagatgcttgcttacaccggcgggaggcggcgtaggaacgtagcaggcttggtgtaacggccgcatggctaatatttcgctggccctgccgtcccttcgccatactcgccgtcgcccagagtgccgggcgactaggttgagttagg

SEQ ID NO: 197210 - DNA, 333 bp, Zea Mays
cggccttgacatagaaccactcactttgccaaccggttggccacttggtgcgatagctaagcaccggggccttcatatccttgcgatatgcgaagttataacagccaaagttctcatgcagtccgtcttctctggccttcgtctggtaatgaagctcatgcagtcggcaaaaagcttcagcattcgagtccattccttggctttgtagggcccagatgaagacgctgagcctaacaatagcattaggggtcagctgatgaagatagatttcgtaattatccaaaacttccccaatcatctcgttcaagggaaaccgcaatcccgctctgaaga

SEQ ID NO: 197211 - DNA, 488 bp, Zea Mays
gggcgactcaagcgacgttccgagagctacccgccacggccaaccacttcaattccagaatgtgcgtctgtacattcacctgccccggtgagggtgccaaagtcaacaaaggacgacacgagcacggtctaatctacctttaccacccacgacgatgcatagggcacgaatacggggcactgttcccccactccggccactgtttgaaccactccgaacgtgactacatgtaacgtctggtcaaggcctcgagctcgggagaaatctccgcctcacacgagctcggcctcggcaatctaccccagcagcgcgcattaaatgccacctactcttccgcgaatctcgcagaggaccatgccaagcactgtgacaactactccaactcgacattcgtgcccatgtacaggttgggctcgggcacatgcccatgctcccaagcccggcctcggctctctactctgtcagaagaacatgctacaagactcgga

SEQ ID NO: 197212 - DNA, 435 bp, Zea Mays
ttgtgatctgggctctgcaggagaatttggttccttgggggaatctgtgaagaagcagctaatttgctttctttggagtattcccatttgatttgtgtatgttaatttcctagaaaatattcaggttagtttattggaattgcagagattactctgtgggtgtgattctgccgcttctttctacaaatggtacactgctactttttggactcaatgagtattttcgagatattagctttattatttcataaaggaggaaacgtgagattagagatggtttggatgttaggtagtagaacaacgaattgtcattaggtgctttgtctgatagactagattttgcgatggtctagctaggttgcagataaaaaatgtcaaaactgttttgttgttaatctgcatagtcttcatatgcttgtttactcttggaaggtg

SEQ ID NO: 197213 - DNA, 306 bp, Zea Mays
tgaccgcggtgatgtgagttttgcggtggcggaaacccggattggggagaaaccaaaattcaagctctcggaggcacggttgctaacgattgttggtggctgggtgggtgatgatgttacgcagccaggggagggctcaatttataggcggagcgagcggtggctgcgaattttggatgagacacacggcggtcggaagtgaggaagaatgctggtgcagtgaacaagtgttcaccgccgtggtagtaactccggtggtcgacggggagtttagagggagtcacggcgatgcgatggcgcggttag

SEQ ID NO: 197214 - DNA, 495 bp, Zea Mays
ttgccatatgtagtttggagcctgagaactcaacccagccgagctctgcatggaaatacccccttctttatggtttatggttcggaggcagtgttacctgccgatctcaagttcggggcaccaaggctaatctttgacaacatagcagaagctgaagctactaggctggaagacgttgatgtactcgaagaagaatgactgaatacggtgattcaatcagcacgataccagcaaactctaaggcgctatcatgataaggccatacggcatcgatcctttgcagtgggagatctcgtcctccaccgaattctaacgggggagggacgacataaattgtcacctctatgggaaggaccattcatagtaacagaagtcactcgatcgggatcatatcgcctcactcagatggacggaacagaaattgggaactcatggaacatagaacatctcaggaagttttacccctagctacatctcagaagctattgggacgac

SEQ ID NO: 197215 - DNA, 3970 bp, Zea Mays
ctgctctgcagttgatgccctcaaggctattaggggcagcttgatagatccacacggaaatcttagcagctggaaccgaggagatccatgcatgggaaattggtcccatgttatctgttacaatgcaacaggcagtgatggatacttccatgtaaaagaattgtatgagcataagcgatctctttgtcaatcaagtgcttgttatattccacactacaccttaacatttggttatgagttacttttggtgatgagtgactaaacctgaacttagttttgttataaatttgtttactgccttagtaggccaaaagtttgcacctggatcttttttccaacatttttgggaagataaaaattgattacctattaactgctatcacacattctctctccaaagcagaaatatgttggagcattcattatactcttcctgatttgcattgttggaaaatagacaatattttgtttggaacataatgtgttaatactattctgttatgactgaagttagctatttttacaatcagatgtaattactgtgattctgtgcacttgtttcacttgaccacatcttccatccaccagtttcctctcaaaagcataggagagcaacatgtcatttcaataaagaagagaataatttacaaccgcaaaaaagcccaccccaccccacccgccagttaattccatagctattaaagcatttacgtgtataacacaaatttgattgcagacagctcctaagtttgaatctatctggaattttggctcctgagcttggtcagctttctcaaatgaaaattatgtgagtggatttaatttcagctggcaattgattgattgctgagctaagtttagcttgtcatttgaactgcccacttatttaatcgtacatgcacaaagatgctgagtatttatttcttttgaagggattttatgtggaattcgattggcgggaccatacctaaggaggtcggaaatatcacttctctggagttaatgtaagtcgaaatctgcagcacgtcttagaaatttggtcaacaacattgtctgaccggctcctctaaaaaacctagtttcttctcccttcttactgtcctagcttaactttgttggtcttgtttctgcttgtacagcttgtgcagttctcttagttgtagacttgtagctccctggctcctattttcccctctccctctttgtgcagtggtgttcttttcatttgttaataaaatccttaccgtggggatctcccctgctgtatttaaagttcaaaaaaaacattgtttgatgttttggttgcacatggggcatgtcatggctgtaagtttttttaacttgatcactgggagaggagatacttcccatgccatttttttaattgaaggttgaggtgtactaaaccctgtctggccaggaaacatgctgaaaccaatttctcagggaggtattgacaaattggtgagccccgagtttgactccgggtgtctatcctaccaaatttaggcaataaccaaccaaattactgtttggttcttcagagctattaatttaatttagtattcattagactgaatctaagattcacccaaaaacatggtatttctattttccttcataataatttaaaggtgtttctctggtacaagtttttggcatgtgtgccattgttgtacatcctatgtagcatgggatgacctttgcaatttttttttttatttctttcacgcaattgtttctgctctataacaaggtgcccccattgtgcatttgcaggctcctgaatggaaaccaattgaatggctctttaccagaggagattggcttccttcctaatctgaatcggattcagattgatcagaaccatatatctggacttatacctaaatcatttgctaacctgaataaaaccaagcacttgtgagtataatatggtttgtatctctgttatcaaggaatacgtaccctaatgaattttctatcttcatccagtcacatgaacaacaactcattgagcggtcaaatcccacctgagttatccagattaccttcacttgttcacctgtaagtttctgacattgcatatttgcatcattagtctttatactttattgagaacacaattaatttgcagattattggataacaataacttgtcaggctacattcctccagaactatcaaagttgccaaatgtgctcatcatgtatgtaagcttctattgcgataccttgagacatactgttttgttaatttggttgtcttggctgcctatcattctttggtcagaaattgtataaattttgcttggcatgaagcacacatctcccatgcagtagtaactctatatgggttatctcatagcttcattgaactttaactggcgaacgggtctgtagcctagtggttacatgtgccttggtagcacctcaggtcctagatttgactccttgtgggagcaaaaacaaccctcgtcggctctgtccctgagctatgcatgtgaaccacctgcagcgagatgcccatggccacatgcatgtgtcttgggcgttcgcctttggggtgtttctcggcctaagtttcttcttaatgcaatgctgtggggtggtttctctcctcgcaggtagagtttttttaaataactagagtgaacaacacaacatattaacgtctgtaggagtgtgtgtgtgtgtgtttttttttgtaaaatagctgcttacttgtgataacgtcttttattttctcaatgagtctgctgtagataaagttgtagtcttggtttagatctggttttatccttatcagtaatgcacttttttctcaataaacactaattatgtgaccagtagctcaagttgacctgctgcttaaatatttttcactctattttttttggggggggggggctttttactactatttcaagatcagtaacgaatcaagagtagtcgaacatatcacactactatgaaaagacatccctgcaggaaaaatggaagtgtcacagatagtgcaccattgctggatcataacataagctagagaaacacctgaaatgttatcaatggacatggatggcttgatgactatacgtgccagttcatgttaccaaggggcatggataccttcataactatctgtgcctttcgtattatgaatcgccatggaaccttagcgtccctgttggttgatattacaatcccacaccgatagtttcctgtttcagaaattcataacttctttatagactctgatggaggcaagctttatatgattttttaggttctgacaatatatattaatttctagccatttagatggccaaataatttattaaagatttaaagaactaggtcgaaggggaaaagattctattgctatggatgatcaatgttagttgaatggcaaggaggttacccatcgtgggtttgactcccacgaacaccaagtgtgagaaaatgtgtaaccctgctgcaaaaaggtgacctgggatgggggttgttggagtgacttttttctttacaattgtttttggggccaaaaggtacctgttggttgacattttttactgttgtgggttacaaactggcatggatagggcattttgtagacttgtagtagtgttggtttagtgtacaaaaattactgcgcactaagctttttgttttcttcaattattgtaatatgcatttgcaatttcactttggaattgcattgcatccattgtccattttatttctaactacatctttttaaattgatttttagacaactggacaataataatttctctggaagtacaattccttcatcttatggcaacatctcaacacttctaaaattgtaagtttgctttatctcctttgcattctgtattcttatattagttctcacacaaatttgagtatcagtaatgggaatccatgttgtttgacaaccctcgtcattatctgccaaatacaatggc

SEQ ID NO: 197216 - DNA, 738 bp, Zea Mays
aggtttaatgaagtctcagaaagtatgtctgctgataaacgtgaggtaattttccttctgtaaccttcattaattgagctctctgattccatttcctaccctttttgagtaactatggttcgtagaagatgctggtggtttctgaagtgctggaagaagcagaaaagatcgataaaaataatctctttatctcaggcctcatcatattgaactatgcttttatattgttatgttttgtgatatgtcaagcacattgtgtgtacaagtttcccgtcctgttgttacatgctcctggaaaatcacacgtctttagatctcatgaggtcatctttagtggaaacatatcatatattactctagtagaagctagaagacttttgggcattataatttgtgttacaatttgattatgtcctatgaagttccttgtacgatggcatgtaagagtggccactctttgttctaatgttgttttatatgaactttcaattatatattcaggtccaatctctttctgcaaaatatgatgagagatgcaagaaggttggagatgtggcatcaaagctaacaatggatgaggctactttccgtgagatccaggtatatttgtgattctattataaagctggcaacttcatcctcgagatctggctgtgagcatattattattattatgtttgcaggagaagaagttggaaatttataacgccatagttaagctgcaaaaaggggatgata

SEQ ID NO: 197217 - DNA, 458 bp, Zea Mays
gtgatgaaccatatgtgtggggccataagtgccaacatttgttctatcttgaggtcgctgactacacccgaggacgtgggcaccgaggtggccctagatgatggccctgacgccccagtcatctccctccacgccatcaccagcatatgcatcaaggacaccatgcacctccacacctgcatctacggtcaccagctccttgccctcctggacaacaactcgatccacaatttcatcaatgctggggtcatgcaccgcatcagattagcaacgacgaacaaccccaccacgtgagtcatggtgtccaatggtgaccgtgttccctgtgagggtatggcacgcaatgtcaccgtgcaaatcgatcaggaggagttcaccatcaattgcttcaacatcgacctaggtgggttcaaccttgtcttcggcatcgactacctctgaaccatgggacccattct

SEQ ID NO: 197218 - DNA, 400 bp, Zea Mays
tcgactcaagctggagacaccaatagcctttgtgttccgaggaatagccgagaaaaacgcataaggaggagcggggggcaagtttgtgaggtgctgtggaggacatgttaggataacaggcactcccaaaaactttaagatgatcataggagggttgggaggaaaagagggcactatatggtgtggagaaagcaagggttttagtggggagccgattcacaagatatgtcgcagtgtgaagggcttcaacccaataagccggaggtatactggcctgaaacaaaagagaacgcagaatgtcatttatggtgcgaagagaacgttctgctttcccattttgctgagaagtttaggggcacgacatgcgtaagacaatgccgtgggagagaaaaaatgtgcg

SEQ ID NO: 197219 - DNA, 1484 bp, Zea Mays
gccgagcccacgcgcagtggcagcagatcgagccccagttccagcagagtcccactccgccacgggaaaaactcgctttcgaaatctctcctctcctgtccaaacccaacgaaatctgcgcgattcataacgaatcgccatagttaatcgaagcattaaactggggaaaaacagagggagaagagaagataggggagagagggagagggagagggagagggagggaggaggccatcgcatccgccggctggtcctgatcccggtcccgggtcgtatttgggcgccgccgcacgcagcaggaggaagacatcagcgcggggcgaagcgtcgagcccatctccgccgcgggaaccactggtgagcgatttgttcttggtggttttgccgattttcttcttcttctgctggcctagattcgattcctgcttacccggccgccgctggtaatttttttgaggcatctggtgggttggagtgcgcggatttccctcacccgcgtgaacactggattgatggattttggagtagtcaactagcaattctgacacagtatttcgacatccatgtgtgtggacttcgttataacttttttcccctttgggagcggcgtgcgaaactgtgaataggcatctccagactccagttctccacaagagctggtccctgtcactccgcgacgggaaatctgatattagtgtagaattatgtgctttcgtttgatttgctgtcgcttttaagattccgccatcgctcttgtgtgattctctcagaaaagtgggatgtgtgctcagtggggggtccttttagtttagcaaagtacatgcagttggttgttaggtggctttatggctgcatattagattgagacactagtttgtttcatgctgttcgttacccgttttagctgccatgttttggtgtttttttagtagaagtgaacatctaaggttctgtggatggcaggagttttatatgattggaattaggtgacccaaagcggacattgatagaatggcttacaatttgcttgttggatagatgctataactggaacatgaacgtgaccttggaagtttttcgtgctactacttcatgtttcctattgttgtgtgactaacaaataatgactaccatctgctctctcgatcacaccactgaaatagcaatctccgtgcttgcatgattaccaggcatttaggatggtggacaagaatgatgggtcagagggtattaaattcaacacatcaaacctcattcaaacaaccgaagaggttgcaagagcgtttatcgctgcggcctcggctgccactgcacagtctgcacggacatctgtagtgtattcatccaaagatgagagtggcagcccaatgcagaagcttcagcagcatttttcgaaaatcatgaaagggttttcgtccgcaccagacctgtcaggaacttacaatccggaagtccttacaacgcaaaagcggcagtggtcgagg

SEQ ID NO: 197220 - DNA, 2911 bp, Zea Mays
cgttcttgtccatagcggtggtgttcatggtggacattattatgctttcatacgacctaccctttctgatcaatggtaggcttgcttcattctagaaacatcatgcacatacttttttttatgactagttcatttgttcacttcaagtatttactggagcgaaaaattcccaggttcaagtttgatgatgagcgtgtgacaaaagaagatgcaaagagggcactggaagaacaatatggtggtgaggaggaggtatgtttcaatttctaaggctacagttattgtctttggtatcttataaacactgaacttaccaattccattttgcagctacctcagacaaatcctggcttgaacaacactcccttcaagtttactaaatattcaaatgcatacatgcttgtgtacattcgtgaaagcgacaaggacaaaattatttgtaatgtggatgagaaagatatagcagagcatcttcgggtaagctgtcccctaagatttgagtttcatgtgatcttcttttgtcggttctaatatttaaatctactctcagattagattggaaaaggaccgtgaagagaaggaacgtcggaagaaggaaaaagctgaggcacacctctataccataatcaaggtgtcttagtcaaccttctgtgcgtagaacatccttttgtttttgttttgttatcttatgctctgttatataggttgcaagggatgatgacttaaaaactcagatagggaaagacatatattttgatcttgttgaccatgataaagtcccaagcttccgtatccaaaagcagatggcctttgctcaattcaaggtaattacatgatgtgagggtgtatcttagcatgtcctgtcaaaggaatatgatatatcttcaatctggtgtctgttactcaaggactcaagtatgtttactagtgtcacattttgctgttgaaacttgaaagcacatttgagtttatctcaggcagaccaactgctgttcatagtttactaaaagaatttaagtgccaataagatgtaaatggtggtgcaataatagattacttaagaaatgtgttttgttgtctcttttcacaccttaaggaatcatttgatggttgatctaataatattttttcatttcttataggatatagggtagaatttcgtagttggcatactgattattcatccatgatgtgctttacaggaggaggtagcaaaagagtttggtattcccacacagttccaacgattttggctgtgggccaagcgacaaaaccatacttaccgacctaacaggccattgtgtcctcaagacgaagcgcatactgtaagatgattttgttacacattgagttggacaaaacacaaaaggatgccttggcagtttttaggccattttttaattcttggaaagctgcatgatgcacactagtttttacaaatgtgtatttgaatcatcattttctctaagtttgtcttcatagaagttgcttcttttggatgttaaggtcctgattttcttagtttgttttttacttgttgagcaattgtatcgtgcgtgcagctttatttcttatatcttgtttagtcagttactatggttgaaacacctcactcaagtagtgtgctactatactacagggagggaagcatgcagaactttttttttcagtcagctaatttgcaagctgatttcatagctggttttgtacttgttgatcaatttcatcgtgcatgtagctctgtttcctgtatcttcttgagcagttattatggttgaaacacctcaatcgagtagttttctactatactgctgtggtgggtaaggcatgtagaacttttttgagtcagctaagttgcattatagcttgtccaacttcctaacacccatcagtatatgaattagttcaaccatttaagatccatattgtaaaatctttactaccatgactaacattaataattcacatcacaatgagatactttggtgctgttctagccattgcaaaatccgtatgctttttcttgaactcaattaactgtgggggtttattgttgagctgctacttctatgccttctcttgtctgtaaaggaataggccagttctaaaggagagcattttatataggttggacagctaaaggaattggtgaacaaggcccacaacgctgaattgaaattgttcttggaagttgaacttggactggtaataacttctttcctgtgagcctttatttatttaaggtgcagagggtgttcagctgcaagccaaaatttgccactcctctgttaggcaactttgatcatagtagtaaggtgtttgcttttgctaatcataaattaggcatgcttcacttgtttccagcttggctttacatgtaataggtacaaagaattgtggcgcaattttttctgcactgttggcaacttaagcaggaaataaatgtttgccttacttgagcatcattagatacgaaccaaaagggcctacattttcgcacttttgatttcaccaacccattaatatgatttgaagttgataggatctgttctcattattttgtgggcaatttaggaccttaaacctcttcctcttccagacaagactagagaagatatatttcttctcttcaaactctatgaacctgaaaaggaacagctacggtacttttcatacattccaactcaccactatttgtcatacactcaatacttgattttttgttggatatttactcctctactggatggatttttcaggtatgttggtaggctctttgtaaaggcttcaggaagaccacaggacattctgccgaagctaaagatgttggcaggtttttcacaagatgatgatattgaactttatgaggttagtctagtttttttggaaagcatacattgccaatgcttat

SEQ ID NO: 197221 - DNA, 382 bp, Zea Mays
ttctttttctgtaattggtaagtccagatcctccaaattatgagagggcagccccaggtagttaagattaatagtgacagttctatccgatcttgttcccaacaggcttctgtagaaattatccaccagcatggctttgtcagcatgatcagtaaacacattatctccaaagaccaattttgccataaagttctttctatatctggcgtgcatatggaatagcttggtgttagcatctccctctttgagccagttgattcttgatctagaacgtgcaatggtgcgcttaaatgaggcaagggctaaggagtgctttttcagtccacatctcagccaatcctccaaaggggacaaaagcctgaaatcttgggctacttcaagc

SEQ ID NO: 197222 - DNA, 822 bp, Zea Mays
taaatttaaatttatcttgtgcttttacttggaagtctagaacttctaaaaatcattttatttgtaacattgcaggaaaaaatatccatacttcaggaaaatgaaacattactcaaggacaatgaacgactcaatgctgaaaatgattccttgatgaagagcagggaaggagctaatagtcaggttgccgctttaaggaagtctttggaagctgcacacaaggatataaaagacaaggaaaaaatggtaatattctcttagaatcatccagatgatcaacaatttttctgaatcattctaaccttcatttgttcaaagattcaagacttgaggcagtcactggatgtccagaggaaggagctgaatgactgcagagctgaaatcacagccctgaagatgtacatcgaagggactcaatcaatcaaacaattgtttgttggaactagtgatggtgtaaagtcgcattcctttgctaattctgtgggagcatcatcattgaataatgaagatgaagattcaaaaggatctgaagccataacaaataagctagcatcagcagtaaatattactgatgatacgcagaaagatcgccaagttctagaaagtagcgctgaaggttcctcagtttcagaaactccagtgtctttcacagctgttgagaatgacagctatggtacatcaaaagaagataaatctgtgtcaaatatctcatcgaataatgtatgttttcagagtaatctgcatggagcttccatgactggtaaaagccaggggagttcagatggcatatccatgtatttatctattgagaaactagagagc

SEQ ID NO: 197223 - DNA, 590 bp, Zea Mays
ctgggatgctcatctacttagcaatggcaattgatctcccaacttatatcacaaaagcaatcgataaaatccgaagaggctttctttggagaggtcgcaaagagataaatggggggcattgccttgtttcttggagcaaagtttgtcggtctcttgatttgggtggtcttggtatttcaagcattaaggagctgagttgggcgctgcggatgcgttggttatggctgcaaaaaacggagcctaaccgaccttggtcatccttgactatccaagttccggacaaggtccagaccttcagtatggcgatgcaaacggaagttgggaatggtgctaatactcttttttggaaggatcgatggattcaaggacagagggtggcagatattgcgccaagacttcttcaagttgttccgaaaagaaaaatcaatacaaggacagtgcaagaagctataactggaagagcatggatgtcggatattcaaggggccctatctgtgggggcaattgttgattatcttcacctctggaacttactgttaactgctgaattaaggccgaatgttgaagataagcacatttttaggctggct

SEQ ID NO: 197224 - DNA, 416 bp, Zea Mays
cactgatgcttcttgtcaaaaaggcaaacggatcctagcacttttgcatcaactatcgggcgttgaatgacaaaacatccaaggataagttctcgattcctgcaatggacaagcacttggatgagcttcatggcgccaagttcttcaccaacctgaatttacggtccaactaccaccagatccgaatgcacatgtggaatgttaaaaagatgacgttttgcatgcaccataggcactttgggttcctcatcgtgccaacgacattccagacgctcatgaacgacatcctcttgcccttcctccacaagtttgtgcttgtattcttagacgacatcctgatctacaactcgcgtggtccaagcacttgcaacacatgtctcatcttcaacaccctacgcacccacagcctcttcctc

SEQ ID NO: 197225 - DNA, 488 bp, Zea Mays
ctttcctctctcaagcgcaccatggctaggctcagatctagaatctcctggttaaaggagggagatgctaatacaaaactgtttcaccttcatgctcgtcatcgcaagaggaagaattttgtggctaggctggtggatggggactataccctaacaagtcatgttgaaaaggctgcttgtgtggatcgcttctataccaaccttattggaaaatgtgttgatcgtgatagggtgattgatctcgaagccctgggattgccttcttttgagctgtctgagcttgatgcccccttttctgagcaagaagtggaggatatcattaaaaggatccctgctgacgaggcccctgggcctgatggttctactggtcgcttttacaaggtatgctggcctattataaaagttgatatgatggctgcaatctccgctatttggggtaggaagtttgataattttgggcgccttaattctgcatatataaccatgat

SEQ ID NO: 197226 - DNA, 483 bp, Zea Mays
ataaaacaaaacttaaccctaactgggccctgctctcgatttcagcccacttctccaccttcgccgatcggcccacttgaattcgatcctgcgcggcccgaccaaccgtgcccttgtgcggctgcctcttgggacctacctgtcattccgcgtgtcccaggtgcccaccctgccgtttccagctgagatatgggcccgcatgccagggtccctctcagttgaagcgcgcgcacgggttttctcgctgacatctggggcccactgtcaggcccatcttcaacaccgtaagcctcggaacgaactcgtgcgcgcggactccgtccgtcctccctgtcaaccacatcccgagcatggcgggccacgtcccgggatcttctccacgcgtgatctccgactgattcgctggggatttcatcgcatgccgttaggatccggaccttggccttgggtatcaccttgggtatttatttgcgaacaccaggg

SEQ ID NO: 197227 - DNA, 420 bp, Zea Mays
ctcgtccacggccacaggctagccggccttgagcgcctgtgacggcgcaggttctggggttgcaacacgcccctccgcccttccggcgcatctgctgaattccactctcctcttgcccgccggcgtcgcctcttttctttgctatcgtcggcctcggaccccaaagacgacaacagcaggagggcagcgcacctgtgaaagcggcgcctctcttgccgttaaatttccgcgtcgcctggcttctcttccgcactctgctttcaagcccctctgccatgaccgtgcccaccaaagacgacagccaaaggtagctcgcctcctccaccacgaaccgccccgacatctccaaaccctcacctcttcttcctttttttttgcttcgtgcagcggcacggtggccgacacagtgccattaccgac

SEQ ID NO: 197228 - DNA, 479 bp, Zea Mays
ggattgctgacataaaggggctctctcagtgggtgtgttgattgattacctccagctatgggagatgctttcagccattgagttgcagcctggaatggaagacagacatattttcagtattgccccagatggaaagtactctgcaaaatctgcttataatggactgttcatgggtttagtttcttgtgggcactacacaagggtttggaaaacttgggctccaccaaagtgtcggttttttatttggcttgctgcccataatagatgctggacagcagatcgattagctaaaagaggcctaaaccaccctgagaaatgtcttctatgtgaccaagctgaagaaactctagatcatcttctgttggcttgctccttctcgagaatcttttggtaccatcttttccggaaatttgggctacactcccttaccccccagccggcggtcacctccttcttgaattggtgggaggaggtttcag

SEQ ID NO: 197229 - DNA, 282 bp, Zea Mays
gcattactgaaaagttcagatgtagttgttttctgcaaagttatagaccacacgtgtgcatttaataatcaactagggataaatgattaacggaaagccttgtatgaacaacagcaaacgtcttcacagcggtttgtgtcaatttatgttatgtacctggcctgcaccaatgcatgtgcttgcatgctgcggtaacgtattctattgtcgttacactgtcaaaaatatatgatcaatgtacgtattcaatagtttatctggctaacatagcttgatttttgt

SEQ ID NO: 197230 - DNA, 395 bp, Zea Mays
ccaatatgtcattgagttgcttggcacattgctactgaggaaaaagaccaggtcaaccacttagcctagctttagctccaccaatgcttacacaatttttttgtaactaaaaatataattatacaaggttcgccacaccatcatcaagtgccacgatatgaacagaaaaataatatacaatggataaaagcaccaaacgttatggtcaaatgaacttaagcaaaagcaggcataagtgtttggatgcaaagagaaggattagagaaatggtatatcctatttttctgatattccgatactctcgaaaaggttgaatatccaaacttcccacttgcttttactatttcgtgattattgcaaattaaggctgccaaacttaaagaacttctgatctc

SEQ ID NO: 197231 - DNA, 413 bp, Zea Mays
gttttgtgtatgttgtctggacatagccgccgggtaaaggacagtgttgcggtataccaagcgagttagcgcttggccctataatcacatcgggcgagcctgcaaggctacagccatgcactgggcacttccttatagaaccatgaaaagggcaggctaggttgcgagaaaagagaagcagagttgtggcactcagactctgttcaacggtgtgcactcccctatccctgttgccgtttagggggtccaaatccctacaacggtgccccctttgaactcctctacacgctacagttttagtggaggctacaggaaaccaacagatatgggggtgcggtagtgagccccctgccctcggtttacgtgtgtggcagtgtttgttagttgggaaaaattgataatagatggtgaat

SEQ ID NO: 197232 - DNA, 354 bp, Zea Mays
cgcttcctacccacgccacgcgtgtgttcttggcagccacccaatccccgcctcgcgaaatcagacgccaaatccccttatcttatcatcaaatcgatcgccaacgggcatgatctgatggctccctcatcatagcctctgctgctgcaccgcagcaaaatggccctggtttagtttagtcctcaagatcccgcctttctggtgctctgtttggctagtgtcgtgccgccgcgcgaggacccggagattcgattccggtccggtgtatctctaggctgcttggtttgggttaggatttagtgggcagggttgtgcagctggtgtctcgtggaggaagaatttcgtgggaggatt

SEQ ID NO: 197233 - DNA, 433 bp, Zea Mays
gaatatgttgtcctacaaactgcactaaacactacacaaaagatgctgtcctctagtcaaaagaactacaacaatgcactgctgttctttacccaagatgctgtccttaaagcagtcaaaactgcagtaaggaaaggtgctgccctgcctgctgttgtgttgctctgcctgctgtcctatgcctccacaaaagcagatgctgtcctcgagcaaagaccaaaaaggactgctgctgtccactgcagcaaagaccaacaaggacttctgctgtccttcccacagaccatgagacttattccaataattctcccccaaagtcttgtgcgtcgttttgttggatagttgggccatcctggacctggagcaaagctcaaggaatttgatcctcccaaggggcttggtgagtaggtccgtaagctaatccttggtgttg

SEQ ID NO: 197234 - DNA, 1402 bp, Zea Mays
gagaggactagcgcgtatgttggtcaatatgatctccacaatgccgagatgaccgtaagagagacactggatttctccaggcggtgcctaggcattggtgccagatatgagatgatcgccgaacttgctagaagggagcgggatgcaggcatcaagccagatcccgagattgatgctttcatgaaagctactgcagtacaaggacaggagactaatattataactgatctcactctcaaggtatgattctgatttttactgataggctggaaaaaaaacgtacttatcgagtttagtaaaacctctctcaggtgcttgggctggacatttgtgctgacgttattattggcgatgagatgatcagaggaatttctggcgggcaaaagaaacgtgtgacaactggtatgcatgcaaagtctgcaaaccatgtgcccttacgcagacctgtgatcaaatcaccaatttatagttggaaccctaattcattgcaaattatctcaggatttgtctattcttttttcccttttgtgcaggggagatgctaacggggccagcaagggctttatttatggacgaaatatccactggtctggatagctcgagcacatttgagattgtaaagtttatgaggcagttggtccatgtaatgagtgaaaccgtcatgatctctctgctccagccaccgccagagacatacaatctttttgatgacataatcctgctatcagaaggatacatagtgtaccatgggccgcgcgagaatatcctagaattctttgagtctgccggtttccggtgccctgacaggaaaggtgtcgcagactttcttcaagaggttacttccaagaaagaccaacaacaatactggtatcttgatcaggagcagtatcattatgtatctgtacccgactttgcagaacgtttcaaatcattccatgcatgccagcagatgcagaaggagttgcaaataccttttgaaaagtccaaaactcatcctgctgcgttgaccaccagaaaatatgggctttccagctgggaatcactcaaggcagtgatgtcaagagagcagctattgatgaagcgcaactctttcatctatattttcaaggtcacccagttgatcatccttgcactcatgtccatgactgtgtttctcagaataaagatgccccatgggcagattgctgatggcaccaaattctttggggctctgacttttggtttaataacaatcatgttcaatgggttcgctgagctacaattaaccataaagaagcttccagttttctacaaacatagggatttcttattcttccccgcttggaccttaggagtggcaaacataatcttaaaagttcctgtctcgttcgtggaatcagcagtatgggttgttctcacgtac

SEQ ID NO: 197235 - DNA, 335 bp, Zea Mays
gtctgaagcaagctccgcgtgtctggtacagtcgatttgcatctcatgtgaagtctctgggttttgttgaagccaaaggtgatacttctctgttcatctttcaccatggcacgaaaacagtctacttgttactttatgttgatgatatcatcctcaccgtcaccagcatggtcctcttacaacgagtgattgcagctcttcagaattattttcctatgaaggatctggggcctcttcatcatttccttggcattgcagtagagcgcagatcggatggtctttttctttagcagcgtacttatgctctggatatcattgaccgtacgggtatgacc

SEQ ID NO: 197236 - DNA, 720 bp, Zea Mays
gccgagggacactagtggctccattcagatggactgactcaagggactgccggcacagactcgcatcacgcttttcgttaccattgtctaagttatcattcttggaattacctggccttttagcatgatggagaaaaccctcaatctcactgctcagccgctctgtgattgaggttttcccggacgaatattccctcatattagtcttttgcatctgcattcgctcgtcaagccatgcttctgaaatatgaactacagacttgtcaaacttaagttcatactcctttacgtgtttttgctttaacaacctgacttcctcctcgtagtttctgattcctctcgcaaactcatcacaaaggtcttccaacaggcaggttgtcttcttctctttctccagagccttcacagccttgcaaaatgctgatttcatctcggatagctctttgcctagcttcctatggagagtctcagaatgtttccttagacgtctctcatcttcaagctcctcttgcagggaacgaagggctgctctcatcttctcttggtccttgctccttcgagccattttgtcttcggtggcttgcctggctagtgaatcaatttcctgatgatactgctgcctctcttgcataagttcttgaatgcatgcctgggcatgatgcaactctcgtttcagtcccttcattgctgacacatcagctgcatgctgttcttccaagc

SEQ ID NO: 197237 - DNA, 1339 bp, Zea Mays
gctcaaacaatccagacatcaccatcatggcctagcctagcgctattgttgctgctgtccatgaggagcagggctaggccacatggtgatgttgcccatccatgggttgtagaagattgcattgcccgaccatgccctttcttcttgccagatgctgaggtgagagtgggttgcctttaattttcggaggagcgtgccaaagtagaggaagaagttggggcaaatggcatgagggtgatcggtgaaggagtggcgatgaaggtcgtcggagcaacaacagggcagtggcaatcatgttgagctcctctagaacaagatcatctgggtcgaccttgaggaaggacgggaagggagagtagcgtcggatgatagccctgatgtgctcaaacttcttatttaggccttgaggacaaggatctagtcgttgacagagtgcccaggtcaaccaaggagtcagtcgtccccttcaacttgcaacagtagtcatcgacgggtaggtcaccctggacgaggtgcagaaggtagcgtcgaactagagggtgcgagtctcatgattctcgactgattctcaaaaacgagtcagaggtggcgtgtcatgccattgcagctccctagcaattcagcggagatggtgccgaagatccagcagatgacgatgttgtccattcgatcccagaatgaaccgttgtctgagggacaaataagatgtggtcgacaaggcgtacagcttgagcacaagcaacacttgatcacaccaacaggagtaattgtcagaggacgcgagaacgaccatcaccaacgatacgaagtcgggaccaacagctgcctagacatggttggcgacgatggcaacctcataagatgcagtagggtcgtcctgtggggaatgccctagggtgggggccgacggctgtggagtgctatagcccaaaccctaccaggcagcgacggccttctcctgttcgagaagggtggctgtctggagatgaggatgtgtgttggtagcctccttgttcgtagcttgagccatggtgagcatgtcgtcaatcttcttgcgaaaggccacaacctcctcgatgtggccacgctccacggcagtcgatgaggtacctgccatggtaaaggagatgtgtgcgttgttgcggcaacgcagcacaagggaggtggtggccctagattggcggcaaccagggaaggagcaaaagtgagattacactcgtgataccttgttagagaaggcattaccacttagaaattccttaaatctcatactagaggtggacattgacatctttagcatgacaggcatcatggttcttaaggcgtcgcctaggcgtcc

SEQ ID NO: 197238 - DNA, 3145 bp, Zea Mays
gaaaaaagcacgcgacgacgcgacggtgaaggggaagtgtgaagggaagcagaagcgagacaaatccccacccggctccaaaccctagccacctcccccgtcccccccttttcgtcccccagatctcgctggcgtctgctccgcctcgcttcgatgtgaccccaccctagggtttgagacggtgttgcggtgtgtgcgtgtgtcgcggcgattcgcgacgcgagtaggattcgaggtgtcggcggcggtgcgagcgcaaatgaaggacccggcgcaccgcacgaaggtggtgctccggcggctgccgccggcgatcgcgcagcaggccgtcgtggaccaggtcgatgcgcgcttcgctgggcggtacgactgggcctgcttccgtcccggcaatgccaggtccgcgctctctgtgcttcaagtgcttgtggcgttgctgtgggagggtggtactatcctgtttaacctatgaaccgtggtaggaagctattattacgttccgtttgctagttgttgtgtacccacatcgcaagcaattagccagttcatccgtgtattatggaggtagagccgtgagattagttaccgagttgtccaattttacctttctctgattgtggtgacctaattattttctctgtcttgcaatggcctgggagagattctgagttatctgaattacaattaaagtctgttcaaagtctaaatttatttgctttagcattgattgctactgaagtgttaactagaacatagaactagtggattgccttcttagctgtttctctctgttgattgtattgcacaatctgtatctgacctacctgtgcttttgatagagtttaaaagagctaaaatcattggttaaggcagcagatttattgattatggcagattcattttttcattctatctttgttgcttctggagtctggactcatgttttcatctttagttgtagagaaagttgctgagaagaattaaatccatctgatagtttagaactacctttacacattcaactttctttgctttgcagtaattgattactggttagtgattttctctggccgttttatatattagtttaatgttacagggacttgtatctgagttttttgctattataatattgattttgtggggcttctctcctttagtactctcaatttgatcttctctgtaatagtatttataagttgattcatccttcaaaatagtactccaaccgcttttaatcattttcttttttatttctcaccgttgaccatattgtatctctctattttcttctctcctagctccccatcgttggctcgactcctctctcttctcacatacagcatcgcaccgacggcacaaaaaaacattgcagcagcacgccggcgctgctggatggtgaccgttcggccaactgccaccccttgctacggtctgaaccaccagacagaagatagcagtgttgctcatcgtcttgcactcctgcgtctctgcctggattatttgtgtttctgttatttgtatagctgcgagggtaatgatagggtcaacttatgttctgagaaataaaaaaaagaaaataaaaatgattgaaaatggttagaatactattttgaaggatgaatcaacttgtagatactattacagagaagactaaaatgagagtactaaaagagagaagcctattgaaatcagtactataatagcaaataattcgtatctgagttttttgctattataatattgattttgtggggcttctctccttgtatctacattagcaaaattttgtaggaattccttcttgagtgattcatgtttttaactgatttgctatccaattgcttagtgcttattttgatttgttttggcacttccgtttccctcttttcatagtgttttatgcagtatatttccgttttgctttcttttttatttatgaacaataaatcacaatcaaattttctgtcagtgacatgtcctgcatgtttagttgaatatttttttcttttgtattataattgcggactgtttacttcgtgtaaactgtaaagcaattctctttgcttgagcatgttagtacattgcttaattttgaagctacatgattgtgacattctttttttttcatctttttatccagccaaaagaatcataggtattctcgactttacctaaatttcaagcacccagaggatgttgttgagtttgctgaggtcttcaatggacacatatttgtgaatgaaaagggtattttcttccatattgttgaattttgttcatgataatctatatttaggatgtgcagcttttatacattttaatttgatcatattgtgccaacttcagcagttacaagcactgactctttagtctctttaatagcaaaaactatttgtccttagtgccatacccatttcattgttcagacttcctgtgatctaagtttattatgggtgcacgccttatcatttactatgtagcatcacaaacacaaattgatgttatatcttgatgctggattattcacatagccattaaactgaaagttgtatatgactgggtctagttatagtttgcttcctattggttgggcctaagttatagtcagctttctagaatattgtctacttgacctgatggtgtataggattctgttttcccttggtgagtgtggaagaagagatcaatagaaacacactagtaaaaacttgttatgaagtaaattttgaaatcgaattggatgtacttacataaggtcacaacattgatagcacgtgaactatgtcatactgacattaatattgtccttgacgttatcgtgcttgttgatccaacttaggtcagcgctagaggtggtggctggaagcaagaacaccatatgttggcttgataatatttcttgtacagtgtgttatattgttatgctgaaacagaaattaactacttagtgtctgaatgtttggtgttttttgcaactgtagaccacatgtctgaagttttttttgggggagtgccatctatgtttgctttgtgtaaattgggtctcatggatgttatttatggttgtcaggtgctcaatttaaagctttcgtggaatatgcaccatcacaacaggttcccaagtcaaatgtcaagaaggatg

SEQ ID NO: 197239 - DNA, 325 bp, Zea Mays
gataggggcatggtgcatgcgcaagttacctactatggaagggggccgcctactatggaagctccacctgtggcacactaacgatgtgtaaggattgaaggtcgcctccatctatggaaggagacgctgaggttggaaggaggcgtgcttcggaggctgggtccatatgatgttgagggagtgagatataagcgagggcatggcaggggttgggtgcatgcacaggtgagatttgtgggcgtgggcggtggggctgggtccatgcgcgggcatgggcggtggggctgagtccatgtgcagttgagggagtgagacaaatgagggg

SEQ ID NO: 197240 - DNA, 281 bp, Zea Mays
ttcatggctgaaactttcagaactcacgcgtatggaagttgtaccagcagctcccaatacaagaacctggcatatgtgctctctttcctgccatactactggcgagcaatgcaggtagattgatattgaacgaatctagcagatctatctgctcatcagactaactaaaatggtctactgctgcatgctagtgtctgagaaggtacttggaagaaggccacgacatgaaccagcttgctaacaccggcaagtacgtatcagcgatggtgtttaaaccagaa

SEQ ID NO: 197241 - DNA, 732 bp, Zea Mays
ttgtcacaaagatgttgagtgtcacaagagagaccaagatcagctaataatcatcttagccagataatctctgcagtagtagtagtagcatgaggccacgggctcgaaatttggcctctgttctagatcgagatacaacaacttgcttggatttccatgcagtaggtgagaaaccatgaaaaatacaataaccagggatggagcgacgatcagtatgatcactcactcaagtggatttacttcatgaacactgctctgaattggttttccactgtaccccaataatgttttggggtcagctaattaactactcacaaagtatccctactgacttttctactttgaaacgggtacctgatagtgttttgaggctagcaaattaacttaaatggtatgccattatagtccattttaacgagttcggagtcgacctagtgaccagaaacaagtggaactagcatccttacaagtggatttatttcatggaaatcctagtgacaggagagacgggtagccaaaaattaggaaaccctaaccctaaccttgctcttttaccatgtcactaacttggcgatgagaggataattaggaatcagttgccaagatggtggaatatacaagctgatattatgggccttacaaccatattggaggtagaaaactaaaattacaattcattgagtgagggttacaaatatataggcacctgcctagggttctaccctagcctaa

SEQ ID NO: 197242 - DNA, 516 bp, Zea Mays
taatattcatttatgcaattttattagagagaaggggtgcattgacttttttgcccttgccttatcttcatcctcctggtgatgtagagtcgtggtgacacatccctctctcaatcatctctcgtctattcgaagcacagatgcgtcttgcctcacagcagcagagcaagacctgtcgtgccattgctctcttactccatcaacacctatggtaacacctgccaagcctgcgtacgcactgctctccaggttccctgtgtccatcatagtgctctccttcaccaccatcactgttatcggtacaattgcaccacagtcgtctggctcgagctcgacagtgctgagctcctccgctccacccccaccccaatgtcatctgatggacctcccgcaaggaggtcacatgctattctacgctgcttcggtccctgcccgatagcgtgctttctgtcatgctcaagaacctcgtccacaacctatgcactacgtcagtgtgccccttgagttccatggccc

SEQ ID NO: 197243 - DNA, 466 bp, Zea Mays
tgggtgatagccaatatggctttcatgctgttcaggaaaggatgtctgggtttcatgcctctcagtgtggcttctgcactcctggaatgtgcatgtctattttcacttcccttatcaaagctgacaaatccaagaggcctgaaccaccaaagggcttctcaaaactaaaagtatcagaagcaggaaaggctttctctggcaacttgtgcagatgcactggttatcgtccaattgttgatgcctgcaaaagttttgcatcagatgttgacttggaggatttgggccttaatatattctggaagaaaggtgataggaacccagatgttagtgaattgccaagttacacccttggtggtggagtctgcaccttcccagactttctaaaaactgagttaaaatcctcgcttgatcatctgaataatccttgtattgcagcctccggggagggttggtatcatccgaaaag

SEQ ID NO: 197244 - DNA, 416 bp, Zea Mays
gcttgactggccatggcaaccgcccgtgctgagtgcgcgcatctctcgcgccgctacccctccaaaccctccgttgtcgtagccatgcccaatgccttgctcctcctcctcccgtgtcgccacctgccgtgtcataccatccatccacccacccaatcatcatgcactcgcattctttacgaatcatatcgatggactactcttccggttgatcggaatcaagagcggtggtgggagcattgatcagagaaggagagagacgtaggtgatcccttgtttgtcacacgcgcgggtgcccaagatgctcggttcgtcggcgtccaggcgggagagcaaaaccagcaacctcttctgggccgccgccatggccttccgggacgccgccaacaagaccactgccatcgagccggccaagg

SEQ ID NO: 197245 - DNA, 1589 bp, Zea Mays
ttctttcgattatagctttcctgttaatgaattctatatatattttgtgattttaagatttaagagtagttttgagccctcagaaatggagaacctcttaaagatggcatgggtgtacaataaattatctctgctatgtacttgcagatgacgagtcctcagaaatggagaatcttttaaagagggcaatgccatggcttggtgaggagatatgcataaaggatccacagacgcagaacaccataatgcctggtctgagcttggttcagtggatgaacatgaatatgcagcagaactcatttgcaaactcggctatgcagtccgagtacctacgatcgctaagcaaccccaacatgcaaaatcttggcgtggctgatctctcaaggcagttaaaccttcagaaccagattctgcaacagaacagcattcagtttagttctcctaaactgcctcaacaaatgcagctggccaatgagttgtcaaaggcatctcttccactgaatcagattggtgtgggcaccaaacctcaagaacagactcaagacccaaacaatctgcagaggcaacaacagtccatgaaccaactacttccattgagccaatctcaaaccaatcttgtccaggctcaggtccttatccagaatcaaatgcagcagcaaaagcaaccaacatccatggctcaaaatcagcagccagctgccagccagtcactgatcctgccccagcagcagcaacaacagcaacaacatcaacaacaaaagttggtacatcaacagcagcagattttactgcagcagcaacaattgcagcaacagcaacaattgcagcaacagcaacaaaatcagcaacagctaaataagatggctgcacaaatgccaaatctggcatcacatcagccgcaactgtctgatcagcagcttcaactgcaactgttacaaaaactgcaacagcagcagcagtcgttgctatcacaaccagctgttactcttgcacaattacccctaatccaagagcagcaaaagttgattattgatatgcagcagcagttgtcaaattctcaaccactttcccagcaacaaacaatgccccaacaaagtattcaagttccatcacgggcaacaccaccaccaacaacaaccgtgcaacaagagtcacagcaaaagcttccacaaaagcatgttgggttcactgacacatcacataccaccattcctccgactacatcagtcaacaccatttcagttgtaggaagtcctctgatggcaactggtgccacacattctgtagttactgatgaaattccttcctgctcaacatcaccttcaacagctaatggcaaccatattgtgcaaccagtcctcggaaggaaccaactatgcagcatgatcaactatgagaaggtgcctcagtctactcctatgtcgatcccaagctccctggaagctgtcacagcaacgccaagatcaatcaaggaattgcctaagttgaattctaatgtcaagcaaagtgtaatggcttcaaagctaccaaatgcagggcatgtagctcaaaatttgactaacaatgcacccccgacggactatccggaa

SEQ ID NO: 197246 - DNA, 439 bp, Zea Mays
tctagattatgttgaactttttgtctagcaacgcagatacacaaaaatgtgtatttcttcacatcaaacaacaacatactgctagatgagttgtctccatcatgtagtgtaacaagatcttcagtgccctatttcttatagatcacaatgtcttaggctatctccagcagatccactatcctcaggggcgatgccgggttcacgtaccctggtgcactggcaacagggtaaaaacgagaaatgctactagctagatacaaattcactataaatatttgctaaatcatttattttcttaagttgtgcactagggtatgtttggagctggcttcgcccctgcctatcacatcacctatcacattttctatttcaaactacactctgcaaacagtgtcatctacctttgttgtcccaattatttttcttttgattgatttac

SEQ ID NO: 197247 - DNA, 458 bp, Zea Mays
ctcacatatttgagagaaatggggacacctttgatgggaactgcagtttgcaagatatcctcaagcctggtttatggctctcaccggagaccctccgccggttttggcgtgtctctgagctgaagcctaaggattttcttgacattttgaatggttttggactcagtgccgtaaaagtgagaaatgcaagatttctatggaatttgtacaggtggacatcgcggcagagcaaagagttccaacatctgccaaggtcaaatgagacaatggtatccatacttgcagatgctcatatgctcagtcaagcagaatcactactgctttcattgattgatcatatgactccagctgtttctagtgaactattcagtcagattatccaggtgtattcagaagcaggcaaccttgggaaatcagttgcactttatgattatgcaaggggcaagcatttgattcct

SEQ ID NO: 197248 - DNA, 365 bp, Zea Mays
caaaaagggtcagaagggcaacacaaccagaaaacgcacacactgacacacaaaaaaaagaagaaaagaaaaaacaacccgaacccctgcacgaatcgtgtctcgagcctcttcgacgaagttttaaataaccccgttctacttagggttgaggatttcttcccctggtctgctcgccctcgagagatcgccgggtgaggagaggataggagtcaaggttgccgaactgcccgaggcctccgcgtgggagtttgcgtcgcgggatctgcgctgtcgtgtgatttccggaggccgttttggctgacgcgccgctggatctgcgccgtcgtgtgaatttccggaggtcgttttggctggcgggcgga

SEQ ID NO: 197249 - DNA, 444 bp, Zea Mays
tccagcacatagaaaagaggttaacaagggaaatggggtcaaatcgctgttggtagcatcaggggccaacaacaacaacaataaacagccacttctttcctcccttacaaaaagggagcgaggtagctaggaagagcacaacgtacagctgccctgcaaaaacccaggaactgaactgtgctgagggaaaggaaaggaaaggcaaggcaagaggatgaacaccgacgacctgggctcgccgagggaactcaccggcctgcagcggaggagggcgctgtaccaaccggagctgcctccatgtcttcttcaggtttatttgcgttttttgcctgccagcatcttcttagtttctccttcacctgctgcatctgccgtccaagcatgcatgcatgcatcctgcacctttggtttctcgatttgtgtcgtgtcgtggatgtttccaag

SEQ ID NO: 197250 - DNA, 354 bp, Zea Mays
ggtgtgtgtgtgtgagagagagaggaggctccctgccctctcgcggtgacttggcgaggagggggagggactgggaaagcgaatggttttcgggaaggcgctgtgatttggcctggaaaggaggaacctttccttcctcttcccgtcctttgccggctcttgtaccgccctcagatcggcgacccggttgtttcttcggcaacgggcggaaatgaggctctcgtcgtcgtccggcagcgtcctgccggctcagccgggctcgccggaaggtactcctttgcctgctctgctgcgccgacttcgatttctctcgctgttgtcttgttcattaatgcacttccttccccgttcgtt

SEQ ID NO: 197251 - DNA, 416 bp, Zea Mays
aaaggaacaccttagaaatcagttaatggggcagcgagagagcaaaggccttttgcctcagttgtttccccaacgacttctcatcagcagatgccaagattgacgatagacatggagtccttccattgaagacacatttatttcgatgattccatattgtccaagcgcctaggatgataagggaatcaagaccttctttagtaaggccagaaatcacatctgaaacctcttcccaccaactccagaaggaggtgacagccgactgaggggcaagggagtgcaacccaaattttctcagaagctgataccagaaaattcatgaaaaagaacaagtcacaaggagatggtccaaagtttctgcctcttggtcacataaaggacatttctcagggtggtttatccctctcttagataat

SEQ ID NO: 197252 - DNA, 284 bp, Zea Mays
ccatgttgcactagcaccagggaagctcaacatagctttgcccctatgctcggtgaagagctgcctactcccctcagctccctcaaagtggatgtactcaacggtgaagtcatcgacgttggagtcgagtcgtcgtccaccgccttataccatgcccatcctcgcccttcatcaaacaccacgtcgtgtgcacacgctgtgttcctaggtcaacgatgtgataggcctttgagccctccacatagccaatgaacccccctgaggtgctcctatcgtcgattttg

SEQ ID NO: 197253 - DNA, 312 bp, Zea Mays
caaacctctcatgccaccgccaggctacttcatcttcgcgcccacgcactgctaggcacacagactgttgtatcttcaaatgaaggaggtacaacctgttttcagctcgcactattcttgccagtaatcttccatcaggttccctaatatgcatcaccccatcatcaacatgaatcttgtactttgcttcatcaagttgcccaatactgatgatatttgttgtcaggcgaggaataaaataaggcccaacaaacgaccgggtctcgccattcttgcacataaacttgatggttcctcgtccctcaatctgag

SEQ ID NO: 197254 - DNA, 340 bp, Zea Mays
tttttttttgttccaatggtattataagcttctgtgagggaattccagcgttctttgttagttagcaatttgtaggaaccaccgagatagaaatcaatccctttgtatagtttggcaagccattcatactataagcaaaataaagcgaaacatggaagacggtagtagtttgttactctttttctgatagtacagtgttcgacttgtaactcttagctttagaataagatccatgcaaatcctgcttggaaaggaaatgttgtacatgaaggtatagacacgtggactggttcctgatccctccttatagttgtaacgatatagattttttcaagtgcca

SEQ ID NO: 197255 - DNA, 375 bp, Zea Mays
tcaagaatggccagatagtatttatgaccagacacactagtgattggtgaagtccaaagatcacaatgtattaattgaaaatttcgagtggcatgtgatgaagaagaatggaaaggtagacgaacgtgacgtcctagctggcaggcatgacataagggggtatttttattcggggtacaagggatggcagaagactgagctagctgagtgaggactgtagatcctggatgtccaagtcgttgatgccacaatgaagaggtggtagcatgaagggaagatgttgtgctcttgagtgggtagagtgggccggagctatcacaccgaaggatcacgcgccgagtgggaagatccttcacagagcagccaagagggtca

SEQ ID NO: 197256 - DNA, 709 bp, Zea Mays
atcccaatttttgggttcatgtcactcgtattgctggcctactttttactcctagagaagaggacgtcaagaagagaatctagattagagctatcatattgtgagcattttgagacagttacttataacgacttagctcaagcaacacgggacttctcagaatccaacctaattgggagaggaagctatggttcggtgtaccgagggaagctaaaggaaagcaaaatcgaagtggcagtaaaggtttttgaccttaagatgagaggagcagaaagaagcttcttgtcagaatgtgaagcattgagaagcattcaacaccgaaatcttcttcccatcataactgcttgctcaacagtagataatgtaggaaatgttttcaaagctttaatttatgagttcatgcctaatgggagcctggacgcatggctacatcacaaaggagatgaggagaccgcaaaatgtcttggcttgactcagagaataagcatagctatcaatatagctgacgcattggattatttgcaccatgattgtggacgaccaactgtccattgcgacttgaaacccagcaatatccttctagatgatgacatgaatgctcttttgggagattttggaatttcgcgcttctatcatgattctcagtcaaaatgggcaggttcaattagttcaattggtgtaaagggaacaattggatatattcctccag

SEQ ID NO: 197257 - DNA, 593 bp, Zea Mays
cttactcaaggaggagcgataggtccattcaagttgccaacacacagaaggcagaggctgagaagaagaaggctgagattgagatgaagaatgctgaagttgaggaggctgagaagagaaaggctgaagccgaacaagctgataagaagaaggcagaagaagctaagaataagagaaaggctgaggtcgaagtagctgagatcaagagaaaggctgcagctgaagaagctgagaagaagaaggaagaagaagctgaggataagagaaaggctgaggccgaagaagctgagattaagagaaaggctgaggccgaagaagctgagattaagagaaaggctgaggccgaagaagctgagattaagagaaaggttgaggccgaagaagctgagattaagagaaaggctgcagctgaagaagttgtgaagaagaaggctgatgccgagaagaaggttgaagcggaggagaaaaggatacatgttgcaatccagaaacagctgaaggacaacatcaaagctttgaaaaagccggtgcccgctgccaagttaaagaagatgttccagttacaaatgtcaaaagaatatgctgagcagcgc

SEQ ID NO: 197258 - DNA, 291 bp, Zea Mays
agcgaggagacagtacagcttgtcgtggacagataaagtctgaggattgatctcgaggccggacatggcagtcgatgcctcgatggaatccggtaccaaattgttacacggtcttctccttggggagcgcagaggagaacggagcgcagagcgtatggagggtggtggtgatcggccagattgccgatcagatcgcccaaagttaatcacccaaacagggagactttattcctttgataaaaccctaatacaaactaccagagcctttatactcaggctccttatttccat

SEQ ID NO: 197259 - DNA, 451 bp, Zea Mays
ttagaccctatcgctatcctccatctttgaaagacgaaattgagaaacaagtgagtgatatgatgcagcaaggactcatcaggcctagttcatcttcatttagctcaccggtgctgttagtccgaaaaaaggatggaacgtatcgattttgtgtggactaccgctacctcaatgccttaactgtgaagagcaaattccctataccggtgttcgatcaactgatcgatgagttggccggggccagttggttttcaaccttggacttgatatcgggttaccatcaggtgaggttgaggcaaggtgaggaattgaagacggcatttcaaacgcacagtgggcactttgaatttgtagtgatgccttttgggctttctggagctccaggtaccttccaaggggctatgaataccaccctttcatcccttttaaggaaatgtgttttagttttttt

SEQ ID NO: 197260 - DNA, 425 bp, Zea Mays
tttctcctagatatcatcagcaatgaatatggaatatcgtcctatccttaattcagaaagatagataccaaatatttattgttaccttcccattattacttctgaggttgccactgatatttcaagaaaggctgtgagatttgtgcctaaattgatttcaaagaacatgattgcttgaactgctgtgttgtcaacttggcataccttcctgtccatggttgtagtttgcatgtatataagatcggggaaaatatctttccaatcatgggttttgccagtggtggcttgaagcatgaatatagtgctggaaagttcgaggacctgatggctagtgaaattattggccacactaaagcatggcatcatacaatgtagtcttggtaactgttacctacaaagataaaccacctccatttcctctaaat

SEQ ID NO: 197261 - DNA, 285 bp, Zea Mays
gtccttggtaagtttcttgatggcaagaagtagacccaagtatttgcagggaaattgtgagatctcacaaggcagcaagctttgcagtaaggtcaagtcttgttccccgcatctaattgggcatacattgcttttctggatattagttcgcaacctggaagcctccccaaagatatgaagaatgtccagtacagtcctgatatccccgactgttggttggataaatataaccacatcatcaacataaatagagaatctgtgatggagagttcttgtagcaagggg

SEQ ID NO: 197262 - DNA, 437 bp, Zea Mays
aattgttattgtgtgcaactatgttgaaacgtcaaacacgtgagttctcacttctataccatcttccttgccattcctatcttgtaactgacctgaccctgtttggtggagcttcggccgtctttagctccgtctccttcattcactgaagcaaggagtcattttattatctctcttctcaacatgagctaggagctggtgaagctactatttttggcttcactagctcaaactcctccgtgcactgtagcaaggagcatgggagaaagctcgctatatgggagtttattgcattgaactatgatccttgaaatactagctgaactgcatttctctgctgatatttttatctcattttattaacttaggcctctaatgcctttctaattacaatatattttagtcacagacatgtatcattcttttggctcaggtac

SEQ ID NO: 197263 - DNA, 533 bp, Zea Mays
aaagcggcagtccttgtccttttgctctctctgcccctcctgctaatcacaaatcgtctccttgggaaacaccgatgcgagcactgaagtcaggtggcaggcaccggcatgacactgaccagccgaacactgatgagtggcaagttgggggatgaggagtgaggatatcagccgttgcggtgaaggtcgtgggaaatgagcctcacttagtcacttagaagggtggcttgtgcaggcctgctgcctgcagccggtgtgttgcatatgtaagtccaaccatccaaacaaaggccacctgcactacggtgctgtggatagatcctttatgaaccaccaatcagcccggtcatgtatttgtgttacaccatcgtaacgtgatcttcgcagtagttatcaatctttgatcatttagttcagctgtacactttgcaaagcttatctcatttctgatgcaaaccttcagttgtgtaccaaactatcccctgtgtattcaagaaaaagctagtatactcattacaaaactaccagtggat

SEQ ID NO: 197264 - DNA, 2508 bp, Zea Mays
gtctgagagagcttcctggttcttggtagctttatgctgcagatctgctgaaggtcgtagaagggttgtttctgaaattgtaaaggcacttaaccaattcattggttcagcaagcaacacctccagaggatctttaatacctgacagaaaagttttggctttctctgagcttgtgaattccatattgtcaaggaatagtcagagcaatttgcctgttcttggctgctcacctgatattgcaaaacctatggtagatggtggaatggtgcaatctctttctgttttgctgaaagtaattgatcttgaccacccagatgctgtaagggttgtcaacctgatattgaaggctttggatagcctcactaggactgcttacaccaccgatcaagtcctcaattcagatcgatttaccaagaacagattaccagggtcacatgaacaaacacatgaagctgatgacattgtaatccctgaacaaactacatacgattcacatcatcatactaatgacatcgaatctgcaagtcagcaagctcaagaactgtctcatgttggtggaaataataacgaaaaccttgaccaacctgctgaacaagaaatgggagttgatctagcagacaatagtacttctaatggcaatcctccaacaagagctgtgcagttcatgcgggaagaacctattgaaggtaatgtaatggctcctagtactgatattggtttggctttctcaatgcaacatcaagttgatggaatgggtgtggaagacgaggatcttggggaggaaagtgaggacgaagaagatgaggaaatagcagctgagggagctggtttgatgtccatagctgacacagatatcgaggaccaggagaacaatgcaattggtgatgattacaatgatgaccttatggatgaagaagatgacgactttcttgagaaccatgttatagaagtaagatggagggagagcttaactcgaatggattatgatcatcatctgagattttccaggggtcgtgcagactccagtggttttattgatatatcttctgagtcatttcatggtgtggggacagttgattcatttaatctgcatcgttcgtttggtcttgaacggcggcgccaaatcggaagtaggtcgcttcttgatcgaccaaggaccgatgtgaatgcctttcttcatccactgcttgtcaggccagcacagtctagggagggaactaattcagcgtggccctctggaggaacttcctcaagagattttcacatgctgtcttttgacatcccctcgtacatgttagatgctggcttttcaccagaaactgctcccccagtgtttggtgaacgtgttgtcagtactgctccaccacctttgatagatttctcacttggtatggattcccttagaattaggcggggccctggagataatttgtggaccgatgatggtcaaccacaggcaggtaatcatgcagctgctattgcccaggcagtggaggatcattttgtgtcacagttaactgtggctaataattcaaatagtgctcctcaggtgcggcctgaacagactggcaacggtgcgaatgcgcactcagagttaccagatacaggaaatgctgaacctgttacaaccgatccactttctcaacctgttggtcggcatcagctagtttgtactgttaaccaaggacctgtccctgctaatgatgtcctctgtcctacagatgtgcacgtaaatcagcaccttgttgattccatttatgatagccgcgttgtagaaccggtgcagcaaacagcagccggtgatcctaacactatacctcagagtgatgaaatgatgtgtattgctggtacacagcttggtggtcatcctgaaagagattccttgtctggtaatggaagttatggtaatattatgcaaaatgagattgaagcacctcaacaagttcacttgggtaatgatcctagggaacccccatctgatctggagtcaagttgccatgcacttgtcacttctgcaagtgctgctcctgagctgagtgatgctcatgtagattcttcagcagtcaatgctgatgttgacatgaacatcgttgatattgctgaaaatgaagttgggaactcagctcctgcttctgatggcaatgatttgtcttctaggagatatgaagatgctcttcaagagcctcagacagtgcaaactaatgctattaatgaggcctccagcgctaatgaaattgatcccacatttcttgaagcattgcctgaggatcttcgggcagaagtccttgcttctcagcagaaccgttctgccccagctgcttcctatactcccccagctgcagaagaaatagatcctgagtttttggctgctcttccaccagacatacaggctgaggttctagcccagcagcgagcacagaggattgcccactctcaaccagctggacagccagtagatatggataatgcttcaattatagcaactttccctcctgatttacgtgaaga

SEQ ID NO: 197265 - DNA, 625 bp, Zea Mays
taactatactgctgaagaacgaagggctctgcttgaattaattggttacataaagagtattggattgatgatgcagcattgtgatactttagtgtctgaagctttgtgggaaacgatacacatggaggtccaagattttgtacaggataaacttgatactatgcttcgtacaacatttagaaagaagaaggacctttcccggtaaataattctgtctcttgcaaccatcctgttatttacttcacagtggacattgtatatgtgctatccaaagttccaatgggttcagacatttctgattctctgttttattgattttgtgaatggtaatcgttgaactggttcttgtgtgacaatgtactcctattttgggaatggatttggaaaactaaaaagttttgctcattttcctttgcattctttcaggattctctctgatatgcggaccctctcagcagattggatggccagcactagtaaagcagacccagagcagcactcgctacaccaagaaactgaggaaatgagacaaaacacattttacccaagaccagttgcaccaacagctgcacaggtttcattcatgtttttgaattttgagtatgcaatgatctatcaatttaag

SEQ ID NO: 197266 - DNA, 456 bp, Zea Mays
ccccccccccccacttttagactaaggttgtctctactgccacttatttgaaattcagccttcctcggctcttcagggtggcattccttccgagcgcctttgtggcaagatgctgattactccagccttcgtctttttgcttgtgttatgtgcctcttgtggatcgcgagcgctctaagttgaatgcacagtctactaagtgcatcttccttgggtacagtgttgagcataagggttatgttgttgggattcggttgctcgtcggaagaggatttctcggaatgttgtctttattgagattcgtcctttctatcctagtccgtctacatgtctgatctttggttgatcctctgtcttccctttcctgtctatgaacgactctgctacagcattgtgtctgtctcccacctaccactattgtgccttctcctcaatgtgccctcgtctgttgcgcct

SEQ ID NO: 197267 - DNA, 411 bp, Zea Mays
caagattttaacagaacttgaggaaggtaattacctgccaaaggaattagcaaaggcaatgtcagtggtgaacttatatcagaagcagaagctgaaaaatgtgagtatttcacaatcagagtttttcccctttgcaaaagaaactatttctttgcagaatgatatcctgaatgccctttggtcacttccaaatctcaagcatgcgaagctgaaattgctgcacaccatactggatcatgattctaaatttgaaaggaagcacttagcaactttgaggaactacttgacagaatgtttgtttggatgtgatgatggtctaccagatgtggccctccaagccatagcctctataaatcagatttctagatgtcagcatgttgtgttaacggaagagagggaggatgctgaggt

SEQ ID NO: 197268 - DNA, 366 bp, Zea Mays
gaagtagtagtaaatgggagacgagtatggcgacctagcagacaagcatgacagagagcctcataatgtcccatactacatgaaatgtctaaactgctggtgagcttggtcatgacgtcgggtcctggatggccgagaggacgatgtcaagtggtggagaccaggacggttggggaggacgcgccagtggaggaggaaggccggagcatgtagaggagccccgagctgtcacagcgggcaagaggggtcctggtggccagatccttcacaaagaaaccaaacgggtcaaacttaatggaacaagaattgtcggggtgaatcgacgaacggaaagaaagtttgagtaatatgtagagctacgagaac

SEQ ID NO: 197269 - DNA, 689 bp, Zea Mays
taacttcctcaagaatcgtcttgaaagcatacgtgatgaagctaggtctgctttagctgcttctgttaaggaactggggattgggtatttgcagtttgtggtcaagatattaagagctatacttaaaagaggttttgagttacatgttctgggctacacacttcattatttgttgtcaaaaaacattactgctgatatgtatggtaggcttgactactgtttagaagatttgttggcagtggttgacagtgatttacttggagatgttgcagaacaaaaggaagttgaaaaacttgcctccaaaatgaaagagacaaagaagagaatgtcgtttgagactcttaagctgattgctcaaagtattacattcaagaccgatttactgaagaagataatctcacctgtttctttacatcttcagaagcaacttactccaaagttgaaaaccagacttgagatgatgctacacaacatagccttagggattgagtgcaactcatctactgaaacatcaaacttgtttatcttcgtatattgtcttattgaggatactattacaggaagcagatctgaatgcaaagagaatacacaatctagtcctgatcaagacagtactgtaagaaagaccttcctgggactaggtgagagtggatcacagaattcttatatacttaccaagtttgcacttg

SEQ ID NO: 197270 - DNA, 557 bp, Zea Mays
aatgggcgcattaattggtatactttaaagagtagtatccgcgtacacttgacttggaagccgagttgcaaatggagggtacgctgtacgcagtacagacggggttttgaattgaacgggattaaccagcgcgtggaactgtcagtgtgaaacggtggggaaagggggatttggtttcggtctttatagtgcctgatattaatgcgagtgggtggggggaattgaatcggaggccgcccgcacctaaccggggcatcgcaggtcaatgccggtgggcccgagtggtttagtggcaggcagccccccctcagagcccaccatggggcaagggcagagaaggggtggtggtggtggcgttgttgcgcctatgcgtggtgtcttttctcgatacggtccggtcagatcaggtcagccatgggggctgagagtgctgggagccggcttgctaccagaagtgcgccttcctagtgctttgtttgctatccagcgtctgggatttggctggcttccgtggattgatgagacagtgtgagtgtggctgctggtgctagtgcggg

SEQ ID NO: 197271 - DNA, 376 bp, Zea Mays
gtgtgttgacattcgacaggaattgggagtccagtttgccgtatgccgaattctcatataacaacagccatcaggccagcatcaaaatgtcatcgttcgaagcattgtatggaagaaagtgccagacccccctaatgtggtccaatgtaggggaaaggacactagaaggacccgactttgttaaagaagccgaagagaaagttgccctgatccacaagaggttacttgaagctcagagtcgacagaaaagctatgcagacaacaggcggagagaactcagatttgaggaaggagatttcgtatacctcaaggtctccccgatgcatggtgtcaaaaggttccaaatgaaaggaaagctagcattgcgtttcgtcgg

SEQ ID NO: 197272 - DNA, 564 bp, Zea Mays
ggctgttcttggtgctttctgtttgattcaaggttttttgcctggcttggtcatggaggaagacatgtctgttctcagactgaaggtctggtgccggtcacctgtgctgctgccggcggtggtggatctccttgctgaagagccgatggtctgtggagaggatgggagctgggttcctagcacgttggtgttccctgtttctgtggtggtgcttcattctgatgggagttcagcttccggtgtggatcctcctgcgccatccccttcgggctttgtcgacgaagatagtgatcatgagcatcatttggaacggccggggcgccctgcgtcctctgttcgggttccaattcacttgcgtctgggtcagcgcagtcgttctgggctggtggatgatatgtctgttgtggctgttcatcaggatttggtggaggggggatcagttgatgctccggctctcccgattgtttcggttgaggagcgggaggcgcctggtcaccctccagttttgggatcagttgatgccctggctctcccggaagtttcggttgcagagctggaggcgcc

SEQ ID NO: 197273 - DNA, 423 bp, Zea Mays
gactattctaaaattttatgtacacaatatctatactactaattaagaacgcaaggggtaggctgccccattcctggttctgtcattcccattcccaactcctgtgtgtttgcttcattcccgactgtccattcccaactcctgtgtgtttgcttcattcccaactgtgtcccgcgtccgcgcatgtgatccgtttcccattctcaagcgtctcacgcatgtgatccgtttcccattcccaaacgtcccgcgaaccgcgaccaaatttttaccaaaaaaagctagcagcgtgggttaaagctcacagccaaccaagactacacattctctgggacacactagcccttataaacaagtgtttgcacagttcagtgaaccatgtggtactattcttaacttgtatttgttgacaacgcaggaggc

SEQ ID NO: 197274 - DNA, 602 bp, Zea Mays
aagaaagaatgttacaggagcttgttccatgacaggagcgcggtcaacatagagaggtataaggtgtcaaagaagactgcaaagcgagttgtgagtgaggcaaagcgtcgagcctgtgatgacatttaccgaagactaagtacaaaggaaggggagaaggatgtctataagatggctaggattcaggaaaggaagacgagggacctcaaccaagttaaatgcattaaggatgagatggatcaactctaggtgaaaggacaagatatcaaacagaggtggcagaggtattttgacaatcttttcaatggtgagaatgagactggacacccaattggatgactcctctgatgatttaaatagatgctttgtacgcaggatccaagaatcagaggtcaaagaatatttaaagaggatgaaagggggcaaggcgatgggcccagatggtatcccaatagaggtgtggaaatgcgttggggatattgctattgtttggctaaccaagttgttcaaccatatttttttgatcaaacaagatgcccgatgagtggagtacattattaccaaccttcaagaacaagggagatattcaaagttgtaccaac

SEQ ID NO: 197275 - DNA, 485 bp, Zea Mays
tgcgaaaactgaaacaacattgtctcgtcctaacttctttacaaaggacaatcgcccaattaaggtctcggatccaatatttgaaggaaggggatgcaaatacaagatttttccatatgcaggcttgctttagaaaaaagagaaactttatttctcatttggaggatgagggcaggactgtgactaaccatgaccagatgcaggagctgttggatagtttcttttcagatcttttggggactgaaatccagagacctttcactcttaatttgctaaattgccacaaggatccagttgacctaagcgatttagaatctcctttctccgaaagggaggttcaggatacgattgcaagccttcccaatgataaagcacctggccctatggtttcacaggaagattttacaaatatgcttggcacatcattaagacagatattatggctgcgctggaatatcttcgttttggaaatgcccacagtttgg

SEQ ID NO: 197276 - DNA, 1793 bp, Zea Mays
ctgtcccatgcttcattcaagcagtttgaatcagctaatctccaggtggaagatatggctcttccgcttgcttccgctggcattcctaataaatctcatgatggaactgagtcttctagaaatggtacagtcgaggatatatgtgctgatgaatcagccaatcatagtggtcacagtttggaaatgcagaaggataggaacagtaaatcccatgaaaacgagtcatgtaaacgagaacaaggcaataatatattgtcaatatgttttgttgatgagaccagtataatgaaagatgatcaagtaggcagagagaatgttgcagcttccaaaaagggtgaagatgcgacatatgatttacctgcagaaaaggatgataccaaactaccagtcactagagctgatgcaatgaccaggaccaatcaagagcatacagatgagagcaaacagcatgggaaaataaagcaaataacagataaagactacaatgatgctggatatgagttcttgatcaagtgggttggaaaatcaaatatccacaacacctgggtttctgaatccgaggtaaaaatattagcaaaaaggaaactagaaaactacaaaacgaagtatggaacgagtttgataaacatttgcaaggaacagtggtgccagccacaacgagttattgctcttcgagcatctgtagatgaagtggaagaggctttaatcaaatggtgtggtctttcttatgatgaatgcacttgggaaagattagatgaacctacactgatgaaatatagccacttggtcactcagttcaagaattttgagtgccaggctttggataaagatgtggtaaaagattatgcaaacacaaggaaccgacatgagcttaatgtgttagctgatcagccaaaagaacttaagggcggcatgctcttccctcatcaactagaagcattgaactggctacgtaaatgctggcacaagtccaaaaatgttatccttgctgatgagatgggtcttggaaagacagtgtcagcttgtgcttttctatcatccttatgttgtgaatttaaaattaatttgccatgtcttgtcttggttcctctttctacaatgcccaattggatggctgaatttgcatcttgggctcctcatttaaatgttgtggaatatcatggttctgcaaggtcaagatctatcattcgccagtatgagtggcatgcgggcgattcaagccagattggcaaaacaaagagatcgtacaagttaaatgttttgcttaccacttacgaaatggtgcttgttgatgctgcatatcttcgttctgtctcatgggaagttcttgtagttgatgagggacatcgccttaagaattctagcagcaaactctttagtttacttaattcgttatcatttcagcacagagttttgttgactggaactcctttacagaacaacattggtgaaatgtacaacttattgaacttcttacagcctacttctttcccttctctgtcatcatttgaggagaaatttaatgaccttacaacagcagaaaaagtagaggagctgaagaaacttgtagctcctcacatgcttcggaggttgaaaaaagatgcaatgcaaaacatccctccaaagacagagcgaatggtacctgttgaactgacatcaatccaggctgaatactaccgtgctatgcttacaaagaactatcaagtactgcgcaacattggaaaaggtggcgctcaccagtctttattgaacatagtaatgcagcttcggaaagtctgcaaccatccttatct

SEQ ID NO: 197277 - DNA, 366 bp, Zea Mays
ccgcctctgccatcgtcaaccacgaccgtcgcggctttgacgacgccatcgctactggccctcatgtgcaccccggcagcctcacattcggcagatgtgccgatccaccaggtgaccttcctgcggtcgtcgtcgcaagttccagcatgtgcgctgggatccgcaccgccgttggtatactccacgacgccaatcaccacgacagtaccgtagccgccggcgagcactactacactggagccttttggaggcgtgtcggccccaggcctcttgtacagggggtggatgggaccctactcccctctccgctgggcgcctcctccggtcggtccacacacgaggcgttccaggaccagtccggctccg

SEQ ID NO: 197278 - DNA, 274 bp, Zea Mays
cttgagttctcctatgcttcgtgtgtgtttcaccggtgtgaggggagagattggtgagcgatccgccgccataaaggctctgattcaccgtcgttgcggcgtccggtttgggccggagatcttcgtccggttccaggggcctattccatggcgtcgcgagggtgcatgtgacgatagggatgctgggattgctcgtcggtgtcaagaaccctcgcggagccgccaaaccccgtcgtcggccctcagcaccgatctatcaccggtatagtacccc

SEQ ID NO: 197279 - DNA, 430 bp, Zea Mays
ttaagcatgtttgaatggctctctggtaagttgctcctacgttcttgaggccgaatggcatggaggtatagcagaaagctccaaacggggtgataaaagcagtcttctctccatcttcttttgccaagctgatctgatggtacccggaataacagtttaggaaggacaacatagaacaaccagcggtcgaatcaaccacctgatctattctagggagcccgaagggatccttcggacaatgcttgttgagatcagtatagtcgacgcacatgcgccaatccactttattctttttgagtacaagaacaggatttgctagccactcaggatgcaacacttctctaatgaaccctacaaccactaagcgagctaactcggcgtgaatagcttctctcttgtcaggcgtgaaacgatgcagcttctatcgaat

SEQ ID NO: 197280 - DNA, 521 bp, Zea Mays
cctcggtcctcatgcgcacttgatggtacccggagcgtaaatcgagcttggtaaagaaccgggcaccatggagctcatcgagtagctcgtcgacgacagggatggggtacgcatccttcaccgtgatggcgttcagttcgcggtaatcgacgcagaaccgccacgatccatcctgcttcttgacgaggaggaccggggaggagaacgcggagtcgctgcgcctgacgatgccttgagcgatcatggcgtggcactgcctctccaactcatctttgtgcgctgcagggtagcggtatggccggaccgccactggggttgcgtcgggcttgaggacgatgcggtgcgtccggccccgctccggaggcaggccacttggctcggcgaagacgtcgtggaattcccccaggagtgcgtcgaggaatggttccctggcctcgacagagtggagacgaccaggggtcttgggagcgaggccctgccagcacacagatctgcccgcatactggaatgccatagtgcca

SEQ ID NO: 197281 - DNA, 298 bp, Zea Mays
ggcttagcattttttgtgtccttaattctccaactttcttttgtcgtgtgcagattaccacattcaatattttcttacttgtccttgaatctggacaccgggcacagagctgatcgagagccatgggacatggaccagctagcgaggacgacgacgatagagatgatggatcggcaagcaaagcaagccacacacagctgatgaggtgctcttgctctgctctggccatgcatgtatttctccactcctcagtgcagtacgtacctgctatgcccggtcggccggcggccctatctaa

SEQ ID NO: 197282 - DNA, 278 bp, Zea Mays
tgaaaatcaattacgagtcgatggaaatctgggatgtgatagacccgggtaccaacgtccgacgctcacaggatcgacaggctatgggtgcgttgatgagatccgtacctaaggagatgtggggaactctcggtgcaaaacagacagtgaaggaagcctgggagacagtgatggtgatgaggattggagctgatcgggtgaaagaggtaaatgcacagaaactcttgaaagaatttgagaacatcgagttcaaagaaggggagagtgtagaagatttt

SEQ ID NO: 197283 - DNA, 447 bp, Zea Mays
ccattcaaccagtatgaatactgtgaaacagtcctcttcctcttgctagagctagctgcattctcggatacatttgagttacttttcatgtatttatcatgtaatcgttttgatatacgtttcactggttcatttttggaaacatttgatggttcactttcatggatctttgatggttcattctttgacagatccgttgggttcttcctgggccggccacgcttaccctttttgccaattttcgttttgcatttcagaactatctgattcctcctggtctcaatcttgcgtgattgtttcttttgtttcttctgcttctttttgggagacagcttctttggtgcagtctttttctgaggagactccacctttagaaccttctcatctaagcacttattacaaacataaacagcatttgtagcacctctagggaccttgaaatgtttt

SEQ ID NO: 197284 - DNA, 317 bp, Zea Mays
tgatcatcaactacgtaggtgcaatccaacgcataaaagagactcgcagtcctgttcatgtagattagcgcagttaagcattgtggatttcagagacggtaaacgcaggtaaaaacaatcatcatccgctccatctgtgaatgacgaaggtgaatcactcgacgtagcaggctataggctagcagccgtgctaatattttgtggcaccccttgatccattccaaagcgaactctgttgggagttttctatcgttttgccactgcctacaactgtgcggcgctttgcccaaaagcttgcgatgcgttccttggggacc

SEQ ID NO: 197285 - DNA, 421 bp, Zea Mays
ctccgcctcactctcaccaccgcggaggcttctgaggtcatgaaggcgctcgcccccgacacctctctcgcgctcagcttcttccgcttcgccgccacctccctccccggcttccggcacgatgccttctcctataaccgcatcctggtcctcctcttcagcaaccgcgccgatcccgccgaggccatgcggctcatcgcggagatggagcgcgacggcgtgcccggcaacatctccaccgtgaatttgctggtcgggatgggcgtggaggtggggaggtgcctggacctggcaagtaagtgggggctcaggctgaacgggtacacctacaagtgccttgtgcaggcgcatctgaggagtcgggaggtgtggaaggggttcgaggtatatgagaagatgcggaggaagggctacaagctgg

SEQ ID NO: 197286 - DNA, 497 bp, Zea Mays
cctgttacacaatcacggtgggcaagcagtgttgatgatttaaacactccgacagactgtggaccatcgattcctgacaaatcatttccgctattgtttaagaaaccatcattacttccatgatcctgattcgaactgttgccatcagctcctcgagacagttgtgttttatcatctgactcaacagcaccagaatcaacaaacatggaggataactccccaaggagtaaacatctaaaactcttctgagctgcaacatcatcatcaggagctaaagtaacatcaccaaattttgtcaacaagcctctaatacatttccaaacatcagcaatctctggacgggattttggatcatatctcaagcacgatgctataactgcagccaatggttcaagtatagtaccaagcaatgtggcatcaagccttgtaaccacttccttctcccaatcatcatacagtccttcagagttccaacctgccacaggcacaagctgttc

SEQ ID NO: 197287 - DNA, 485 bp, Zea Mays
ttgtatcctttttggtttacccgatcattgatcgggattgagtcgtccactggtcgttgaccccgcgcataccaactctggccccaacattgactacatcaacatctggatctttgactatgcggcctggccggggcatgcgatgtcgaggggatgatttcctatgtcgtgtctcaatcgttccatctacacgtctatattgtcgatttgtcctcaccaccatagatcggggcgcctccatagactttttccatcattgctccacctcgcgtgtactctatcagtacaaccaattatgtgcgatccactcggctcccgtgacatccatcaccaagacctaagcgcatttctcctagcaacagggttgttggcttcctgttgtgtcgcctcatcgagacgcaacatctcgcccatgtgcccacttcaccattgtagctacaacgtcattccccacgcatcaacgattgtgttgtgtaatctttgtt

SEQ ID NO: 197288 - DNA, 431 bp, Zea Mays
ctttgatcactgcttgagaaagactttgcaattactgattttggagtttgttcatcagctattgtgctttgctcaagaggggttttgttaatttgagacaaactaacatgtggtggttcccatggaggaaggtctttctcaaacttccctgccaaagcatcagtcaatagaatggaatcatcctgcttctcactagctttccatattttcaaactaggagggaagtacccattgctgttccatttccgcagctgtatgattgagaaaggaccttggattttattagaaggatccatgtacagccagatcttctcagactcgttaatggctgattgagatgcagtttttgcccctgaacctatgttagtagctagacttccagatgaggcaccaggtgacccttgtggagcactgcgcgtggtgccttccag

SEQ ID NO: 197289 - DNA, 507 bp, Zea Mays
cgaagaggacgacaaaagcaccataccatgttcagaaattaacactgacaagaacattgcaactaaaaatggtggttcaagcctgaggtcagatttggagccatcctttctgagttctgaacaagagtttatttccaaagaagtgcagtctagcaagcatgagaagagcaacatcacattccaaagcggtgaagataagttcactgtccaggagctgctttcatcggcaccagaagttgctcctcctgtttcatcagcaccagaagctgctcattctattccagccacaaaaggaacactattggattcacccacttctcttcagtcatggaagaaacatgtagtttctcatttaaaccctccagttgatgatgctctacagactataagacacagcactttctgtctcagtgatgagcagccaacacaaggaagtgttcaaagagaagctcagagcgctgatatgatcaaactactggatgttgtaccagaagaggctgatgcaag

SEQ ID NO: 197290 - DNA, 712 bp, Zea Mays
gttcttatattaaacaatatgtttctgatctcatatgaatcgttggtgcattatttttttcctgcaggcttgaacgcaaatatgcaattttcagcaaattggatgcttgctcttttgtagcaaatgtttataatgatgggaaccttgtcagtatagtaactgactgctctccccatgctactcatgtcgcgggcattgcagctgcatttcatccagatgtatgttacctaactattggcttttcatttgcattaaaaattttgaaggcactattctgttgagttcttacacaggaacctctgctgaatggagttgcacctggagcacaattgatttcctgtaagattggagacactcgcttaggatctatggagacagggacggggctggtgagggccttgatagctgcagtagaggttatacgctaaccttactctgtataccatttattggtgtggagtgcaaaatgcatttgtttctggtctattggacacaataccattgtaaatgcatccttatcaagttttaatgttcgaggaatacctattcactaaagatgctcagcagacttctccatcaatccttaggattttcgctgaactgtttccttgaattctggcatccagcacaaatgtgatctgattaacatgagctatggagagcctacccttcttcctgactatggcagattcattgatctttctaatgaggt

SEQ ID NO: 197291 - DNA, 441 bp, Zea Mays
gatgccttctcctttttaagttccttgacctgctactctaagctttccacccaggagtttaggtgggtgcagtgggaggaaaggtcatcatagtggttatcgagagtgtggagatatccggccatgtagacgatggtggggtcatcctcagtaggatctcttcctgacagggcctgaagtcttttcctccaggtaggggtatttttgttgctaggtgggaagtaacgaaggggggtttcaaaaacttctttgctgtagttttggcatagctgacggagggcttttcgagcaacattttggcgcgtgtctagaaagtggtgtccagtgaaggtaacttggaaaggagggtggtttgggtaacttcggctttctcccaggtagactgccatagagcacttctcaattctgttgtcgcggtattctttccagacacactctggc

SEQ ID NO: 197292 - DNA, 273 bp, Zea Mays
caccgggggtatactggttcgggttcgcaccctactctagtgtagtgttgatcctggttcgggttctcaccctactctagtgtagtgttgatcatagtattgcgatgagtgtgttacaacaagtgtgcttgtgtgactataagaaagaaggtttgcccttttatagtttaagggtaggacctaataggggtgacttggtctctacttggaatgtggttggtctgttgccccggcttgaattgggcacctagtgtcgtgttgttcttagggcca

SEQ ID NO: 197293 - DNA, 337 bp, Zea Mays
tgcccacaaaaattagcaatacgtgtgtagtaactcccttgctaatgtcaccaaggatttgatccaccagttgatccctttgaatgttagtgcggacttgggttggaggtgcatgtggtacttcttcctcctccctttcttcttattcttgtgctcccccttgatccatgtcgtcgtcttgtggtacctgttcctcatcttgagtcggaggatgcaccatcgttgaggaagagggatgatcttgcacttgttgttcctgtggtcgcacatcgtctatcgccatagtcctcattgctaccgttggaacctcgttttcatctatgtcatgaagatcaac

SEQ ID NO: 197294 - DNA, 275 bp, Zea Mays
tgcatcttgagttttcttcgcaaccaatcctccccctgtgatagagaacgagaatccctaacaatctccaatcggtgtagcacttcttttgccatagaaagttgtagcttgacattcccaaccttgcgatggctccatttctgcagtcccctactaagcctcttcagtttgagaaacaggatctcaaccaggcaagaagaagacactgggtcttcccagttttgctgaactgattcatgaaaaccatccaacttcgaccagaaactctcaaaatg

SEQ ID NO: 197295 - DNA, 1750 bp, Zea Mays
cggcggatgggctcgcctccggggttgtcgcacttaacttcgaggatcctgtaggaaccggcgccgtggaggacgggtacgactacagcaagggagacttcgtggaacacgcatgccggtactgcgggatccacaaccctgcgtgcgtggcgaggtgcaacgtaccctcctgccgcaagtggttctgtaactcgcgggggaacacttcaggctcccacattgtcaaccacctggtttgtctacttaccttttgtcacgagactttgttatttcgagactagtgagctactaatatgttaacaattgcttaagaactgaacgagtgagagtcctgtctcacaattttggtgataattgcttagaaaccgaactgagtgagagctctgtctaagaaaattctatcgctttgcatcaattttagcctttttgggttgttgaaataagacatcatgctttactgggacttaatggctctgttagtaaactaatgttcagactctggtagcatgttttttattatatgtggcagtagctaaggaggcgatagttaccatctcatagattttgtattttttatggtatatgatagtggcgatgtatctagttactgtatgtagttataaccctggtggtcacgtcacatagatgtggctttagagtttagactttgaaagttttctggtggaaacaattgtagatgaaataactttgaagcgaataacatgttaaccatctcttgaattaggtttacataatccagtgtgcagtatacttgttgcatgtctgggagatgttacactgggatgctatgcttgctagatgtgtgcatttggtttttggttttgttgtgcagtattgaattttgattttttgctattggaatggttgctacattttgtaaatgtggttcctattttggtagctagtatcttaattgttcagcccccatttgcaaaggttccttggcaatattgtttaaatatagttaggaagctaactgcatttgcagtgaagaccatctcttttctcctatttggtagctagagtcagggtcttaattgtgaagtcccatttgcaaggtgtcaatgataccatcgtctaaatagtttgctagtaattcaattatatcttcagtgaagaccatttcaaatggtataagaataatggttgcaacaggactatatattttgttaaaaaaatgccccataaccattgaaagcctgttatgtgacacctctgtttgtacaacttattatattgccaccctgattccttattaagaggctctgtggtgttccataagcagctttgtatccttaaggccacccacaactgcaagcaaaccattgtcctttgacacacttttggtgttctggcattgatgcccaccactttgtgctatggcgcttgtccaagcaaaccaagtactggtacaaatgcatgaagaaaatggttaatacacaagctgaagcatgggtccgtttgcttattgtgcgagaatccacctatttttacatattttaaatgaaactaatgctctgtagtgtgtccatggtcataactatgcatgtatcatttgcaggttagggcaaagcataaggaagtatgccttcacaaggatagccctttaggagaaacaattctcgaatgctacaactgtggttgtcggaatgtatttcttcttgggtttatctcagcaaaggcggagaatgttgtcgttcttttatgcagagaaccatgtttaagtgtt

SEQ ID NO: 197296 - DNA, 486 bp, Zea Mays
gccgagggtgggggggcgcaggacatgacgccgagagcccctcacggagcgcgagctagaggaagagacggaggatgaagagagatgaagcaagggcaagcgaggagagcaacctagaagtctccagaggcgataagaaccatgggcacacgagagagaatgcggggaaaatgaaccaacgatccacgatcgaacgactaagaattttttggctgacgtggatgggctcgtaggcgtcgtttccatccgactttaataataaggaaatacaactgaacaagttggttacgatcagggaccgaccattacgaccctaggcatctcctcgtggctatataacccgagcaccccctccttatccatcttgtgcctcgaacgactaagaattttttggctgacgtggatgggctcgtaggcgtcgtttccatccgactttaataataaggaaatacaactgaacaagttggttacgatcagggaccgacc

SEQ ID NO: 197297 - DNA, 320 bp, Zea Mays
cgaaaatctaggtgtacagacgtgcagtggaagtgtaacaaaaatcggttagtctctctgggtacgaaaaattatatgtatggacgctgcacaagtatgtacagcaacccgtacatgatagtagttctcttattatcttctttcgagcagaaaatcgttaccgctaaccagtagtttttagtctttaatcggtattgttaatcctaaggacacctccggcagtggcggtcttgacatttcagaggcctagaacaagttttaaagtagaggctcttctaatctttttatatatatgcatgttaccaatataagcactcaat

SEQ ID NO: 197298 - DNA, 425 bp, Zea Mays
cttcttccctcgcgacccatctccctggattccgcgcagcccaactccctacgcagcccaacttgtggaatccgtgcgcgcctgttaaacccttgtgagtcgctgacatgtgggccggcatgtcaggctgcaattttggtcaccgccgtgtggggtcgtgctgtctggtgctttccccttcccccgctcgctcggctttgacccaatctcaacaactcacgcctaaaatcgccgacgatctcgccgggttgttgcatcaactcggcatcttataccgcgcctggcgtatataaatggaacccccctcggcggcaatcaccatccccactatccgagcacccaacatcaactcgaggcggaaaaccaaagaaacaggcgctaggccgccgtcggtgtgcacgcgatttgacatcttctgggcctcg

SEQ ID NO: 197299 - DNA, 438 bp, Zea Mays
atggagagtcgtatagaacgtatagagagggagagagggagagtcgtacggatattatcgagttgtgtacccctttcatcagattggaacaaaagattagaacatatatataatatcatactaagttcttacataatacgctgtccatcatactaagttcttatatataatatcatactaagattagaacatatatagtaatttctacttttctactcctcgtcgtctatcaatgtcgtccaatcgatctcctcatcctcatcgtcggagatgttggtgatctactcctctcttccctttccatccctcctctcctctctcttctcctccctcctctctcttccctctccctcctctgtcttctctctctccctccctcctctctctttcctctctcttccctttccctctctcctctcctctctctttccctctccc

SEQ ID NO: 197300 - DNA, 338 bp, Zea Mays
gctgaatactgttgactgtgggggagatggagaaagcttacaggggaagtaaaaggtaggtagcccgaggctgtgtgacgtttcctttagaaacctccattgctggctccccatcctcttcctgcttcatggtttcacctgctgccttctccttcctcgattgccgcagctgctatgggaataccatctttctacaaatgggtcgtcagcaagtacccaagcatcatctcccctgtgaaggacgaaccagaggagtgccctgatggcatcatctacgacaacctctacctcgacatgaattgcatcatccattgctgcttccacccacaggaccagct

SEQ ID NO: 197301 - DNA, 314 bp, Zea Mays
attttatctaatctattatgatctaatttagagtgagttaattaatgctagtgcaaaaagatatggccatactcctaagcctaaattggtgacttagatcagttcggccatacccaacaacttgacctacataacagatctatcttagcctcttgtcccaaacccggatggagacaccaaagagcaagactggaaaaggacaagatcaacctcgtcaaggaaggagagaagtcaaactcgatcttcagatgcattaccacccaacaaggaatcctttctcaccgtaaactttcttaccctaggctattcttgcc

SEQ ID NO: 197302 - DNA, 394 bp, Zea Mays
gacagcacttgtccatgatcgatacacacggtagatttatatttaattgtataatactgtaatcatattttagacctatctatctttattgtacagcaatttctatttaacaaactcaaaagacattacaattgttggctatgagctattatcagctcaggggcattcaggtcgttttacagctataatcaggatagcaaaaaactcagcttattgaggcagcagattctctggacagcaaaattatcagacaagcctgctacccagagaatcgagttcctaaaaagcgactacaaacagggcctaactctatcgttcataagcctattgcttatctttcactaagtagcctgcatgatacattactgttctggttggataaataagatgctct

SEQ ID NO: 197303 - DNA, 362 bp, Zea Mays
gtgaaattgagggaggcattaagtgctcttgatgaagcaaactgtgcccttgctgacaggaagcgtgagctgagccagttagaaatcagtctccatcaccaaaaggaagcgattgagcatttggaaaaactgaaagttgatatggaagctgaagccaagagctatatgtgtgacaaccgtatcctgaagagagatctggatactgctcttactgccaaagtggaagctgaggagttgcttaggcaagaaaaaatgcagttaacatgtgctcttgatgaggcaaaatataccctttctgagaggaacagtgagctgacccaatttgagatcaattttcatcagcaaaagcaagcactggcgaa

SEQ ID NO: 197304 - DNA, 461 bp, Zea Mays
aaaagatcagcaaaatgaggggaggcagaagagagtgagcaagtactggaggtctggggaggccaatcacttgtctctgctcccatcctcatcggctccagacgctatgtccatcacagacatcggacatctgggagtggcagcagcagtcaacaactagaagagggtggcaccagcagtgaggaagtggaggggaagagggggcacatatggagaacgggagagggagggacagagtcaagagttgcacagagaggggcagcggcagaggcgctggaatgctgtccaatgatttggggaggttcacgggtaacagaataactgataggtcacagaacatgccaggaaggatatatggggctgtcatgtacggccacacatacgccaggcgtaggagagcccgcgatgtgcgccgagctgagcaggcagcaaaggcacatgcgcagcaggtgagtggctag

SEQ ID NO: 197305 - DNA, 492 bp, Zea Mays
ctcagtaccatcctcaatgtttggtgcaaaatttggattgtgtatgtaatgggccataggaggtggaacaaatccatggaggaactgcatattgggtaaccatggtgtcccaattaagttagctggtggaaccccggtcaaatgcttttgtgaaaaagatgttggagccaacagtgggggatgcgctacagacatatgagaaggtatttgcattggcaattgaatctgtccattgaatccatgcaacttcacggattccattaaattaaccagaacttgttcgtcatggtgcatatccgacgattcagaaacagaagggagttcttcattcattacaaaaccattatcatcacgatagctgcttgaaacactatttgagtccgaagctgctgcactagggtgagataaacagttcaaggaagacactgattcatcctgtgaagacttagtgctgtggttgctagacatttctggaaccaggatgtttcttct

SEQ ID NO: 197306 - DNA, 655 bp, Zea Mays
cgttattccttaaagcgacttatccatctctttccttttatattcatcttttgtaaattattgatgacaatcctgaagtttatgtagatttatcagaaagagtccaagtggagagtcttcttgtgtttgcatctatttgttccaagtgcgcttcctctgacaataatagcttggatgaaagcatctgtgtgcagcttctactaggttttccttccattattctaccacttgctcatgtcaacaaggtacgaatatgcaccctggcccccaatactttttgtgtctgataatatgtgagctagctcctcttgttctgcttacaaatcttctatctagatattgaacatgtttattgtcttatatatgttgtaggatataagggcatctgcaattaagtgtattgaggggttatctttggtgtggcagcgcttgagcacttctgtaccaagaaatggtctgttagccttattttcattttttttccaactggaccagttcggtgttgatatttattatctgatctaacatatacaggaaacaacaccaaattacctcaatgtttgtcatctccaacttttggtagtttccttgaattgttggttaaccaaaagaccatgatctgctcggacgcaaaatttcttcctgcatatatttc

SEQ ID NO: 197307 - DNA, 696 bp, Zea Mays
catcacctcctcggctccttcgtcgttgatcctcctccgtcggccccagtgccactgcctgcttcgaaatttgaggtcgcggttatcgtcaaccttcacgcttaggtggccggtgtccagaacattcagacggtcgtctccctcgtcctagacctcgtgtccactcactacacccactggcgcgaccagatgctcctcactcttcgcgctatgccctcgatgaccatgtcctcgtcgacaccaattcccacctgctcccatcctgacatcggatggataatgtggtcctctcgtggattctcggcacgctcactgtctagctttaagacgtcgttcgtgaatcgtgagcgggtggcattgctcgccaagcatgagttgctctcgaggcctagtttctcgacaaccgggacgctcatgcactccacctcgacgcctcgttccagcacttcttctaaggggatctctccttgactgagaactgtcatcgaatgaagggcatggcagactcttcgagatcttggggagcctatatctgatcacatgcttgtcctaaatcttctatgtggtctcaatcggtgccacgaccacctgaaggcttcatcaaatgctcgatgtccttcccctccttccaagacggccacaacgaaggagctcaccctagatgctgagtccgcctcgctctctatggcgtgtctt

SEQ ID NO: 197308 - DNA, 356 bp, Zea Mays
taaaaggtgggttgtataggggaggggaggagtgtctgatgaacttggttgcagagttcacagtggagttgttgatttggtttttgggctatcattggagaaccgaccaactaaaatgtgtaccttgcagtagctctgccgcgtatggaaaagggaagtgaagacaagaacccatctgcttcgtctccctcttggaaataaagaaaagcagtaggcctggcattgtcttctaaatactaacggcaaacacttaaaaaacatgctatttcggctgcaccaccagaacctgacaaatggcacaataatctcggttcgaagagcaacaatagtttactataactaaaactaaaccatat

SEQ ID NO: 197309 - DNA, 886 bp, Zea Mays
cgcgatcctggcgcgccggaggtaccgaaagaagccgtcgatgcgcctgggttcacggttcgccgtgaacaccaagctttcttggtccaggaaccaattcggtcatgacggcagcaattccttcgcccacgtgatgaaaggaggcaagctgctcaccggcgtttcgcagttcatcgacaagcccatcatcttcgtggaagaggaaatcatggaggccacgatgaaccttgacgagcggtgcaagatcggcagcacgtactacagggcgaagctcgacggggaggtgtttgcggtgaagccagcgaaaggtgacgtgtcggcggagctgaagatgatgcagatggtcaaccacgccaacctgatcaagctggcgggcatatccatcggcgctgacggggactacgcattcttggtgtacgagttcgccgagaagggctcgctcgacaagtggctgtacgagaagccaccgtccgcgctgccatcgtcgtcgtgcaccgtggcaactctctcgtggggtcagaggctgagcatcgcgctggacgtcgcgaacggcctactctacatgcacgagcacacgcagccgagcatggtgcacgacgacatccgcgcgcggaacatcctcctgacggcggatttcagggccaagatatctggcttctccctggccaagccagccatggtcgacgccgccgcgacgagctccgacgtgttcgccttcgggctgctgctcctggagctcctatccggcaggagggcgatggaggcgcgcatcggctcggagatcggcatgctgtggagggagatccgtggcgtgctggaaaccggcgacaagagggaggcgaagctgaggaagtggatggaccccgctctgggaagcgaataccac

SEQ ID NO: 197310 - DNA, 404 bp, Zea Mays
gtcggttctccaccaagctcttctactatcggctgcacatcaccaccagccgctggacagcacccctctgtcaacccagggccttctggtcgcttccttggccaggtctactctcgatggcagaccaacaccgcggcgccaacttcaccgacacctagtccctgcattccggcttctgagtcctcgcctccaccatcggtccccgctggtgcggtacccgtaccaccggtcaccaatcagcatggcatgaccactcgtggcaagcgcggtctgcggttcccagctctatttgaagcttctgtgctctcaccagtgcctcggagttatcgtgctgctcttgccgatcccaattggcggacaaccatggaagaggaatactctgcactgcttgataacaagacctg

SEQ ID NO: 197311 - DNA, 458 bp, Zea Mays
gacaatgagataccgaattctggagttttttcgttgcctttcatggtgcattttcatttcacatgctgcttgtgcatttgtttacaaaaaagtatatttgctagcattgttgcaattctgtcaccaccataatcacatttctctgcttatttacaggagcgtgctatgaaaaagcgcgaggaagcaacttatgaggaagcacgacaggctcttgaagaatacgatgattccttgaagaaattagaggacaataacactgaacaaaacgaagacaaagttaaggtgtcaggtaaaagaacgtttgggcctaccaaaaatacgcacgaagagttagtgaagaggaaaaaattacaagatactgaaaacagcagtgatagcgagtatgattctgagccagcccagcctttgagcaataatgaagtaactatgaaacatgatgatacccaatttgggagtgc

SEQ ID NO: 197312 - DNA, 631 bp, Zea Mays
tagaatacaacaagcaatttaccgtgattacaagcttaactaaagtcatctaacgagtcggctagctagaacaacgacacaacccgctagatagcatacacgtcggcttgcctattattatcacaattcgagacacaacatatataacaatcgcttaacacaatcaactcctacctaacatgagttggctaataacgtgactatttcccaattaccatcacacaccacctttcgccatttttagataaccggcacgtcacacagctattgtaatacatctcaagtttagtcaacccatcagtggagcactagcgtatttcagaaaatttcctgagactacgacgacaaggcgtcgagcttatcatgcacataaaagcatcacaagcatatttacggaacctattggttaacctggtcgacacactagacatgttcttcgcccttcaaaatttatcgcacaaccaaaatcatcacacttgctaatgacaccaacaatacctactgatatgttattcacatcacgaacacagttacacgccgcatactagtttctaacatgattctcgcataacttgtaattcaactacttactaaccctaaatcacgcacgacagatttcaccttaactggt

SEQ ID NO: 197313 - DNA, 344 bp, Zea Mays
ggaattgttgccaacagtcattaaagtattgtgcagtagattactgaacaaacactcgaataagactgaacattatgccgtgctggttagtttttttgataattcctgtattgaagaaccagtggtcttgggtgccctgttccttacatgagtgcacaacaggttactgttctaagttgcttggagacagctttttcaaaagtgccacctactttggatgtctttgcggttctcactgaggattgctgtgctggttagcccttattcctgaattttaaataatgttctttcgtagttttctcatttttcattatttacatactgcacaagtctactgtattatc

SEQ ID NO: 197314 - DNA, 637 bp, Zea Mays
tgaagatggaaattacttgcaagaagcatgggagcatatattgacatgtgtttctcgttttgaaaatctacatcttgttggagagggagcacctccagatgccactttctttgcgctgcagcagccggaccttgataaatcaaaacaggctaagtcatcgattcttcctgttctgaaaaagaaggctcctaatgctacttcagcttctaaaagaggctcttatgatagcgctggtgtcggtggcaaagcttctggtgtggatcaaatgaataatgaggtgacaagcctcttggagcaagttgggatggctgaaatgaaccgtgtatttgtaagaagtcaaaaactcaacagcgagggtataattgattttgtgaaggctctctgtaaggtttcaatggaggaattacgttcggcttctgatccacgagtttttagtctgacaaagatagtcgagatagcgtaaggaatctgaggctttattatcattactacattgcaatgtgtttttttacatttctgttcggtcttatagacagtgcatgattttttttttttttgccctcttgtaggcattacaatatgaaccgcatcagacttgtttggtcaagtatatggcatgtcttgtctgatttttttg

SEQ ID NO: 197315 - DNA, 321 bp, Zea Mays
cttcggctaggccatattcttctggtgatagctctcctaatttcattactcattgtggtcttcgtactcgtcaacctgtagatttctatggtttcggcctcattacatggcaaggttttaccggatctgttctttctgagccaacttcctatcgtgatgttattcttcatcctgaatggcaactttcaactaagctatctgttctacctactaagctatttatcttaacaatgtgccctaagcccagatggtgaaaaccaggacaggaggaggaattgatcaacctgcacgcatacgtcaaggaagatcatggaacagttc

SEQ ID NO: 197316 - DNA, 442 bp, Zea Mays
cccaaacaatggcgttgggatggagaaaaaagacaatggaagaaaagacaacatggtttcaaaattggaaggctctattatgtaaaccctgctgaaggtgaaagattctatttaagaatgcttctaatgattgttaaaggtgctaaaaactatgaagatatacgaacgtataatggtgttttataccaaacctttaaagaggcttgcgcagctagatgattactagacgatgacaatgagtggtatcacacatatcaagaagcaactaattgggcaacatcatttgaactacgcaatctatttgtcataatgctaacatattgccaaataaaagatgaaaaagaatttttcaacaccacatggcacacaatggtcgatgacattcacaaacatcttatccaaaaataccaccctatcaaatatacaccctctgaattagaac

SEQ ID NO: 197317 - DNA, 465 bp, Zea Mays
tacacacaagtaagccaccactggtgtccctccactgaacaaaactgcacagaaatactatggatgtctgtcctggtagctccagttatccccaagtgtcgtctccaagcaataaggattccacccctcgaaccattagaaggcagggccaatgaaccggtaaaatcagaccccaacatagagaggagaacacgcgaagaaggttgtgccatcttagtttcttgaagacagattatatccgctccataacaattgaggagctcacggacagaattctgtcaagctagagaattaagacctctaacattccaaacaattattttttccggatccatgtagaaacaatgagaggtaaatcgacaaacaatagcagcaacatcgccagctaaaataagcttgctgcggtaatatccccagtcccagttatatattctaaattatctgggacagaccacccaaaaaggg

SEQ ID NO: 197318 - DNA, 424 bp, Zea Mays
aaattatttgtgtagggtgcttgcattccacaatgctctaatgggacaaatttactgattccagtcactgggagaactgatccagaggacttggctgttacagggaaaagtgcgaggcccaatgttcaagagagctcctatcttcctttgttatatgactttgaagagctagaaggagaattaaactttttgaatcgggttgttgcattatcttttcatccatctgctgtatcaagaacacccattactcttggcgaggtaaaattgatgaattttctagattgtgatgctattaaaaagttatttttgctatgactattcatctatccttttccttgatgagttgtataaatttctttaacagattgaagtacttggagtttcccttccatgggcagacatgttaaccaatagtgaacgtgct

SEQ ID NO: 197319 - DNA, 335 bp, Zea Mays
ggccatgcatggaaggatttcaagtggaaactaaatataaattatgtcaagaaggacaaaactccatttgaggactatccagaactcaagaaagagtggtggccagactttgtggagtgggttacctctgatgagtatattgctctaggagaaaagggcaagcaaagccaaagcatgaataagttccgacaaaaactaggtcggcgaagctatactgtacaaaagagaaaatgggcaaaggaagatgcacaagcattaaccgagggtaaatctattccatttcaagacatgccagatggtcgtcataaggattgggcaagggcgatgaatccttc

SEQ ID NO: 197320 - DNA, 404 bp, Zea Mays
gaacaatgtatggctccacgatagtttgttggttgagatacaattccatgggactatttagatgtcgaaaattaaattcacccggatgaagaccaaactttacattatgcatcttgtaaacatgcttttcatggagcaaattgtcgaaatgtttgactgtctgatacaaatatgttatgacctcgatcttggctccctaaatgtatttcagtaggagaagagtcgatggtatgaagatcgtgtaaccttaaaaatgaaacttaaagaattgttggcttacattgatgtcagataaaacgaaatgttgtctgtcacgaaaacgtggttcaatcgggaatttaacttctacccgagcgacaatactgtatttccgcggtagcccataataaaaatcttcatcacgg

SEQ ID NO: 197321 - DNA, 1993 bp, Zea Mays
ctgctctgcagttgatgccctcaaggctattaggggcagcttgatagatccacacggaaatcttagcagctggaaccgaggagatccatgcatgggaaattggtcccatgttatctgttacaatgcaacaggcagtgatggatacttccatgtaaaagaattgtatgagcataagcgatctctttgtcaatcaagtgcttgttatattccacactacaccttaacatttggttatgagttacttttggtgatgagtgactaaacctgaacttagttttgttataaatttgtttactgccttagtaggccaaaagtttgcacctggatcttttttccaacatttttgggaagataaaaattgattacctattaactgctatcacacattctctctccaaagcagaaatatgttggagcattcattatactcttcctgatttgcattgttggaaaatagacaatattttgtttggaacataatgtgttaatactattctgttatgactgaagttagctatttttacaatcagatgtaattactgtgattctgtgcacttgtttcacttgaccacatcttccatccaccagtttcctctcaaaagcataggagagcaacatgtcatttcaataaagaagagaataatttacaaccgcaaaaaagcccaccccaccccacccgccagttaattccatagctattaaagcatttacgtgtataacacaaatttgattgcagacagctcctaagtttgaatctatctggaattttggctcctgagcttggtcagctttctcaaatgaaaattatgtgagtggatttaatttcagctggcaattgattgattgctgagctaagtttagcttgtcatttgaactgcccacttatttaatcgtacatgcacaaagatgctgagtatttatttcttttgaagggattttatgtggaattcgattggcgggaccatacctaaggaggtcggaaatatcacttctctggagttaatgtaagtcgaaatctgcagcacgtcttagaaatttggtcaacaacattgtctgaccggctcctctaaaaaacctagtttcttctcccttcttactgtcctagcttaactttgttggtcttgtttctgcttgtacagcttgtgcagttctcttagttgtagacttgtagctccctggctcctattttcccctctccctctttgtgcagtggtgttcttttcatttgttaataaaatccttaccgtggggatctcccctgctgtatttaaagttcaaaaaaaacattgtttgatgttttggttgcacatggggcatgtcatggctgtaagtttttttaacttgatcactgggagaggagatacttcccatgccatttttttaattgaaggttgaggtgtactaaaccctgtctggccaggaaacatgctgaaaccaatttctcagggaggtattgacaaattggtgagccccgagtttgactccgggtgtctatcctaccaaatttaggcaataaccaaccaaattactgtttggttcttcagagctattaatttaatttagtattcattagactgaatctaagattcacccaaaaacatggtatttctattttccttcataataatttaaaggtgtttctctggtacaagtttttggcatgtgtgccattgttgtacatcctatgtagcatgggatgacctttgcaatttttttttttatttctttcacgcaattgtttctgctctataacaaggtgcccccattgtgcatttgcaggctcctgaatggaaaccaattgaatggctctttaccagaggagattggcttccttcctaatctgaatcggattcagattgatcagaaccatatatctggacttatacctaaatcatttgctaacctgaataaaaccaagcacttgtgagtataatatggtttgtatctctgttatcaaggaatacgtaccctaatgaattttctatcttcatcc

SEQ ID NO: 197322 - DNA, 420 bp, Zea Mays
catgactgtcatatcctactccaaagaattttacctgttgctatccgaggaattatgcatagggatatatacgaagcaattgccgaattaggtaaattatttcaacaattatgtgctaagactctaaagttagatgttttgcatacaatgaaagctaaaatcccagtcattttgtgcaaacttgagaaaatatttcctcctgctttctttgatgtaatgctacacctagctgttcatttgcctgatgaggcaatccttagaggcccagtacaatatggatggatgtacccagtagaaagacgattgttgacattgaaacggtttgtgaggaacatggcaagacctgaaggatccattgcaaaagcatatgtcgctaatgagtgtttgacagcatgctcaaggtactttgatgatattgac

SEQ ID NO: 197323 - DNA, 334 bp, Zea Mays
gagttgatggtcgaggtgctcgagagtctagagaggacgtcgtggccagggtggccaagacgacgatgcctagtggaggcaaaggcagcaacggtgagggcatagggtggccaagacgacgatgcctagtggaggcaaaggcagcaacggtgagggcatagtggaggcagaggcagcaacggagaggcaacaacacaggatgagggagatggggcagggaagcaaataggatatagggggccaaagttgtcgcatcgggcgaccacagcacaagtggtacgatcccataaggtgagcccctagggaccaaactccatgaaacagtggttgtcag

SEQ ID NO: 197324 - DNA, 398 bp, Zea Mays
gtcctgtgcgcaaatgagcaacgtcggccggcaggccgcagccgtatcagtacggcacgagcacggcctctaggatttgcccgcgcggacgcgtcggtccaattcgaccccaatacgcgacctgtccgcgctgatttgcctgcccgccgctagcactgattcgctgcgctgaccctcgatttgcaagcgccggcgtccagcgctagccgctatggatctggtggagtgacaggaggcggcgggggcggcgacggcgacgacggccgagcaggggattccgatttccgcgacaggaggagcggaggacaaggaccgctgagtgaggagggtgcgatggggagtggcgaaggggcgacgcgaggagggccgccggagctagcacctttgatgggctggcg

SEQ ID NO: 197325 - DNA, 376 bp, Zea Mays
tttgggaggtgggggtgtatgatttgagggggagggtggagttggatcctttcttggtgggatagctggggtggtagtttgggggaaatgagggtaaggttgtgtgttttggtagtgagggggattgctgttggtatgaagtgtgggcgatggtctttgtcggctagtctggaattgatctggccattctttccttggcctctttggtgacggggcaatccctagttgaatgcccgacgtcctctccatggaagacacaatatgaccttcgctcttgtttggatcctctgtcgctgcctttgtcggccctcgccccccttgttgagtgcttggtatgctcttggttgcaaggcgtcccttagctaggttgctggtg

SEQ ID NO: 197326 - DNA, 404 bp, Zea Mays
atccacccacctcccgcccaacggtacgctccagtttaattccccccaattcactcaccttctcggatctccccacaatccagtaggagaccattcagccgggtttggtcaatcgtccaactacggaccactgccgaaagtcccgtttcccccgttcgatggtgacaatccccgcctatggatccgtcgtagcgaggactacttcgatctttacaatgtggatccagcctcgtggattcgaatctccacaatgcatttcacaggccccgctgctcgatggtggcagtccgttggtgcacgactccgtttttgcacatggtctgaattcagtaaggtgttgctagagaggtttggtagggaccaacacgagtacctcattcgccaactttttcacattagacaaa

SEQ ID NO: 197327 - DNA, 287 bp, Zea Mays
gtttgtttacaggaaactaaaatgcaggatatttctcgttttttggttatccggatgcttggaccagattttgccaactttgtctttcgcccttcgattggtgctagtggtggcattttggttgcttggaaagatcatataaactgggctggtgtttctagagtggatgatcattcattgtcaattctttttcatcctgttgatgatgtggagtggtgggcgggtggctgacttgtgtgtatggtccccagctcaaccaggacaaaattgccttccttcaagaattg

SEQ ID NO: 197328 - DNA, 878 bp, Zea Mays
cagtatccttctgggttacttcacccattgcctgtgccagcaggagcttggcaagacttaactatggattttattgagaagttaccccggtcagaaggatatgatactattttggtggtggtagatcgattcaccaagtatgctcacttctttcccttaaagcaccctttcactgctcagggagtggcccaaatcatggtagattcagtaatcaagctgcatggggtgcccaaaacagtggtatctgatagggacaagatttttacaagtgttttttgggaacatttgttcaagctcttggatattaagcttgctttaagcacaacctatcaccctcagacagatgggcagagtgagcgagttaatcagtgtttggagatgtatctcagatgtgctgtccactccaaccctcagaaatggaagtcttggctatctttagccgaattgtggtataataccactttccactcatcattgggttgttcacctttccaggccctttatggctatgaagcatttgttcttggcattcctttagtcacagggcaggaggataagggagctgtccagtttgtccagcacagagctgagcatattgagatgttgaaggccaatttggctagagctcaacagaggtataaacattttgcagataagaagagggttcccagggagtttcaggtcggggaacatgttttgctcaagctccagccttatgctcaaaattctatggtcaatagaccttgtcccgaattcgcattcaagtattttgggccttacacagtgactgagaaaattgggccagctgcttatcgtttggctcttccaccagaagctcagatccaccctgtcttccatgtttcccaactcaaaccatt

SEQ ID NO: 197329 - DNA, 604 bp, Zea Mays
gtgtatatgggatcttgtatggtggacggaatgaaaccccactcatttcatggaacataccttgattgatctttgccttcggggggcgagaagccgagaattgatgtgagcccattgcagtttgtacctgaagctatggctgggattcattcttcagtcgtacatcaacacattcagcttcctgatctcgctcttctcccctgttcgatttgaaggacatggcgacctcgggaaagaaacacctgaattcagtgaccttgctgttcaaactaccgtattacacgcaatggggccagagcttgctgattgccgggtcggaaccagcactcgggtcgtggaatgtcaagcaaggagtatctctcagtccagtccatcaggacagtgagctaatctggtgtgggagcgtgtctgttgttgccggctttacctctgagtacaagtactatgtggtggatgacaagaagaatgtgttgagatgggaggctggggagaaaaggaaactagtcctgccggagggcgtgaaggaaggagacgtaattgaaatccgtgactggtggcaggtactgatcatttttatcaccagtgtatgtattatgttctctac

SEQ ID NO: 197330 - DNA, 404 bp, Zea Mays
cttcactcgatcgaactgagaccgtagatgcgagatccagtggcgcggagttgattcgcgactcattaaatccgggccgttcaccggtgatccaacgacttagcgcgcgttggatttcataaagacttagattcaatctgagacatccacgtctgatccaacggcccatcgtggccggtaccgctttgcagtgctcttttgcatatgaaccctcggggttctgaagaatagaactcgcaatccaccctgtgcagtgcattgagtcataggtactcttgcacgttggcccctgcgcttaccagaaattgacgcccactccagggaattataaaaccagagaaaataaaccagaaatgtatttttagtatataaataattgcaaaaacttgtttaaaccctagaaa

SEQ ID NO: 197331 - DNA, 598 bp, Zea Mays
tgtcgaactggagtagggcaagggaaaatgttaagcagaggtatatgtggtggtggtggacatggtggaaaaggcggggatggtttttataagggaaaccttgctgagggtggagctatctatggcaatgctgatctaccttgtgaacttggcagtggcagtgggaatgactctaccgagttgtccacagctggtgggggtataataggtactgcatatgctcctattctcatttttttgactcatagcatgtcttaatattgtctttttaaatgtttttgtaactgctctccagcgatgggctcatgggagtattctttgccaagtcttgccctctatggctcagtagaatcaaatggtggtagctatactaatggctctgttggaggacctggtggtggttctgggggcacaattcttctatttgtgcatactttgtccttagctgaaagctctgtcctctcaagtgttggtggcttcggaaatgctggtagtggtggaggtggagggggaaggattcatttccattggtctaacattcctactggagatgagtatgtgcctgttgcagctgttaagggatcaatacttgcaaggt

SEQ ID NO: 197332 - DNA, 331 bp, Zea Mays
tggtgggggaggaggtgggaatggcagcagcggcggcgggggagaaggcatggacggcgggcagcgtggagatggcagatgcgatcgcgcgtcgtgcagcagcggagatgacagacatggtcgcatggcagaggaaagatggcagacctggtcgcacggcagcagagggacagcagatgtggtcgcgtggcagcggagatgtcgggcgcagccaggaggaggcagacgtcagcagaaacgaagggtggaggctgatggcgacaatgacagaagggaggaagagagaaagcagagttgggactcgtgtgtgcatctgggagatggtggaggg

SEQ ID NO: 197333 - DNA, 467 bp, Zea Mays
gtatagactgattatagtcttccttgtataggcatatagctttccctgtttaggagattgtatacttgtactccaagttaccttggctatatatatgagagatcacccccctcattgggtgtggtgtcttcccaattctatctctctacatggtatcacgagtccagggtctccctgattttgtgccctccctcccgcttcctctaccaccaccatatgccgccgcctgacctagggcgcggcacctacctgcgccgcccctccctctgctgcgcagaagccttggatgtccacgatcacccacgtggactcctccgccggtgacagcgattccgactgctccgtcggattttctctcctgttcggcgacgacgttcttgctgcccagatccatctccccatggcgcttccctacgccacgatctctgtgcagtcctacgtccccatgaagctcgacctccacgcgg

SEQ ID NO: 197334 - DNA, 562 bp, Zea Mays
cacggtacctactacaatatactgccacagagatattctttgatgatgcaaacgcaccagtatttcttaacttttcatcccaaaatgatgctaaaagtgttgggtctcttttagtttccctgaggaatgatgctttgttccccaaaggaacaaccagagacaagaatagtttaatttcctttgttgacagaaaggttgcccttgaaatgtctgagagtgctagggaaagttggagaagaagagaaataagcaactttgagtaccttatgattctcaacactcttgctggacgatcttacaacgatttaactcaatatcctatatttccttggatattggctgactactcttcagaaaagcttgattttaacaaatcatctacattcagggacctttcaaaaccagtaggtgccttggatgcaaagcgctttaaggtaggatcagttcctatggacttttcacttctggttaatgcactttctgataattttgaataaactatatgtaatatgcaggcttttgaagatagatatcttaattttgttgatccggatataccaag

SEQ ID NO: 197335 - DNA, 429 bp, Zea Mays
tgattttctaaatttttgagcaatatctgatgttcttcacattgctagtggaaagttgtgatgtaccaactaactgagctatatacctcccatagaaagttgttcctatattacattttacctgcttgcctctgcggttggtagattgactttcgtgattccccttgattaccatccagatgaattactatctatattcttgagaatattatttaccactacatgtttagtgattcctggcacatccactatattgctgcacattatgttcccttagtaagtactgaccttttcagaacaatgtcaatggtattctgcagataagaaaaggtgtacttcctcgccttctagaggagatattgtcaacaagaattatggtgaaacaagcaatgaaaaagttgagtccatcacagcaagttcttcacaggg

SEQ ID NO: 197336 - DNA, 859 bp, Zea Mays
aagtagttgggcgcctagttggcaacgacccatggatgttggtccgccaaagccggcacatgtataccaaaccgaactggccagcttgaaggattggtggaataggtgtggggcgacattcatagacccgcccaaaccggccattagccggggtcggtgcaacaacaggtgctggtgtaggtgatactgcagaaggcacaacatggatggtcggagcagcaacaataggggaggctaacgggttaaggcaggtgactcgcccagaggacctacatgggagtgggtcttctcaatgtcggcggagtgcgaaacgctcgtggaagggagagactgttcaacacccatgcaggacagtgtgattgtagtcgagacgacgaggggaggcacaacatcatttgtaataaaaaaatcgaaagagcgcaacgatggggtagagaaggatgcaaagggaagacctatttgttgaagatgacatgacaggagatgatgacaatgagtggcaaggttgaggtagtggtatcctttatgcgatgagggatagccgatgaagatacaagccatgtatcagggagcgagtttattaggggcagtggcatagaggttaggaaagcacatgcgaacaagaactcaaagatgggtgaggtgaggtcgtgccatggagaatctttaagggcatgtaattgtgggccatgtgattgtggatggcgggtgcctattgatgaggtaggtggcagttgctagggcctcgacccaataaggggacgatatggacgcatgaaggagcaaggggcggatggaatttttaaacgcatggaggatgcgttcaactttcccattttgagtggaggtgtatgggcag

SEQ ID NO: 197337 - DNA, 917 bp, Zea Mays
tgtaggtactcaaaacccttctttttgtccctattaaaatgttcaacgccaatcattagctttgtcttgatgcttttttgctggtgaacaaatttaacccactggtcaggatcattactgctctcacatttcaactgccagaaaggaaaatattcacttatttctggaactgtttgatcatgatgttgaggtgcattatcagtccgctgtgccattgcctgaatgacagcaaccaaaccatccaaagcaagcacatttaaagctgacaaaggactattcacaggaaatgcgctcttagacagaaggttagctaactcttcaaaaatatttgagcactgtagatcacagtccatatttgcatacatctcagccataaactctttctgccagcaaaaatcaattagagcctctagggcaacttcttgctgctgataacttgctccatatctactctgtgctaatcttaggataacacatgagaagaaagcctctatttgcagcttaagttcatggcgcagatggtaaaagagagtaaaaacaatgctgcacacagtcgacaggatcagagggctcattgacaagccaaaatgcattagattgcggaacaattcatcctgtacaaatgctaaaagtttttgatgtctgtgtatagacgaagccgaaaactcaatagccgaattaatcaaccccagagcaaagagcggcacatcctcatcaaagtcaattggactcatccttgggttcaactcaatgtcttctgctatgttcaagagggagcacaagaattgcaatatctctaccatacaaggaaccccaaagggctccatcaagtctttgtcttgcataacaccagaaccgtctcccacttcatcgccagagctgttcaaacatacgtagtcactcttcccgttctcagt

SEQ ID NO: 197338 - DNA, 591 bp, Zea Mays
gaccatgggtcatccccatctgagagccgtttctctgagccatttgaatcatggatcatattctttgcccctctgagtctttcacattctcttctgagtgcatccctctcctccctcaggctactcatctccttgaagagatcttgcccacgccgactctccttcacaatttgctttcggagagtctgcaactccatatctgaaacatccactttcctggttaaagtggctatctcacttcttagcttatctacatcatcctcttcccctcttaaccctgcctcaccagaattgcttgttgacccatccgtactagcatcaggagctgagcttcctgaccagtcaccagaactggtcaatgggttcctcacggtgcgattgttggcaaatggcgagagagcattgctactatcctgaagaaatgagttgtgtgtgcttgcgctaattttgggggtatatcgcccagaacttccatctgaacccgacactgagacggcatcgaaactgctgccattgtggagatggcccactggatcagcagacataggcacatttcttcttgatggaaacctcatgtctggcggttttctt

SEQ ID NO: 197339 - DNA, 297 bp, Zea Mays
cacaagaagaagcaaaatcaacatcttagtaaaaaacaatcaatcatgtcattcattatcaagatttgcctcacccactatactattccttccactatggaaataacacaactaatccaaatccatcatcatcgtttagttatagccatatccaccaactttcctctacgattgtgtttcgataggctcgtcgattcatttcttatcttcccaacaagttgcagctagcaaaacgactataaaataatgaatgagacaagatcggttaccagatatattgtatacttggtgtgtatt

SEQ ID NO: 197340 - DNA, 911 bp, Zea Mays
tacaggatgcttgtttatctgaaatattgctttcagggtttggcatttcctccaggttagtgcctccatttgtgtcatacgatttgtcatttaccagtttattatatcaatggcagattagtatatagttagaccacaatccctgttttccatgtggtattgctttttaggtgggcccagaatcctgtatatttggtttgtagaactttgttgaaagcttgattataactggagagattgaatctaccataagattctttcagtcatcagaatgtctgcaacactaccagcagattcttttgtaaaaccagaaacagtaaatgttatattgtgttgatttttttctcttatattgtaaatagaagtatagaactcagatagatgttctgatatgactttctttttaagggcatggaataattccccaatcccggcttcattcagtgagggaagaactccttcaatttctgcttgaagaatctaagccactcacttctgaagtatttaagggtttcaatgcttcttgtggaaagtgcctaaacatatgctatctgctatggttggatactgaagctactttggaagtcatcaaatgtgcttttgtacaggataactttgagtctagagatgaacttccgagtactgtcaatacatctgcttcagataatgaagatggtattgatgctggaagaccagagggccaaaatgctatggtacaaaatgtggttgatgccatcattgacatagttggtttggaaaatgatgtgattcggtctgttatgggtagaactgaatcagaattatggccttcggagaaggattttggctatttaatggagtttgtgtccttttttgtttctcacaaaagggctaatgcatctaagagggttgttatgcacattcttacttat

SEQ ID NO: 197341 - DNA, 330 bp, Zea Mays
tcagttgaattccttcttcgccgttcttcacttgtattttggcagcagtaggaacgtagaactgttgtactagtccataccagcaagtagcttgcatatgtgtttaaagctacctagtgttttcttctatacattttttcttgaatacgcaggagagctgcatatcattgtattaaggtagaaaaaggggagttcttacaaaaacagcaccacccactccaaaccaagaatgggaggctgaacgacagacgagaggactaaaaactagacacaaaagggcaaaactagaccacgaaaacacacactaaacctcccaggacacaccagtgc

SEQ ID NO: 197342 - DNA, 462 bp, Zea Mays
gacgtttcctcttcgccttaaatccgaaacattcactaccttggctattttttctcttatgtgaagacacagttcggctgcaacatccgaatcattcaatgtgacaacggtcgtgagttcgacaaatcttccactcacaccttctttctcactcatggtgttttgctccggatgtcatgcccctacgcgccctcccaaaacggtaaagtcgagcgtttgactcgttccattaacaacatcatctgttcccttttatttcaggcatccctcgccccatccaattgggtcgaaggtcttcacaccgctacatacctccttaatcagctacccaccaaaaccattacttatggcaccccctattttgccctcttcggctctcaccctacctatgaccacctccatgttttcggttgtgcgtgttaccccaacatgtctgccaccactcctcacgagcttgccccc

SEQ ID NO: 197343 - DNA, 1028 bp, Zea Mays
gatttttaatgtggattctcaaccagtatgctgctgctcacatttccaactttggaaatacacttcaattactgctgtttacttaatgtttctttatccaggttcatgtttgggatttttcagggcagacaaacctaatattaatgaatgaatggaatagactacatgactgctgccatgcagatcaagaggtagcatcagttgccacatccgatacatctactgttttttttcatttcactggaattaatttatatctggagatgatattaatttctgtttttatcgtcttatatcatggtctaatattttcttgccagatgtacttatccttttcatttgtacgtgcagaatcttctggaagtgcaagtctatgcaatgtctgactccttaacatccaaaattggtggtaccaacaaagaaaattatggagatattagtgatatgaattctgattcgtcttacagaagttttggaagagctggttctatggggttaataggattggagaatctcggaaatacttgctttatgaacagttcaattcaatgtttggctcacacaccaaaacttgttgaatacttccttggtgattatgccaaaaatataaaccggactaatccattgggattgaacgtatgtagattttcttgttaacatgcaaaaagtccactccaaggattcagacaattctttactgacttttctattaactagggtgaacttgccttggcgtttggagaactgttgaggagcttatggaccactgacggaaaaccagttccacctcattatttcaaggaaaaaattgcatgttttgctcctcagtttggtggctttaatcagcatgattcacaggaacttcttgcttttttactggatggtctccatgaagatcttaaccaggttaaatgtaaaccgtatgaagaagcaaaggatgcaagtggccgtcctgacgaagaagtagcagatgagtactggagcaaccatttagctcgaaatgactctgttatagttgatacatgcca

SEQ ID NO: 197344 - DNA, 786 bp, Zea Mays
tagccattgaagagttgcttgccgtatctcccacattgttcactgaatccactacaatagtctcactatgccgtatagtgttgctaatcacattgttgtttgaatggtcaatttgttctgcttctgcacttctgtcaacctcacaaacagctgagccaaaaggttttgtctctttgacactgcttgttgccacattttcactttctttctcaaaagacgaagataaccggtcaggtacagatgtggtttgtgtaacatcaagtccgggtcgattcaatatcatacaaagggctgaagttttcccacaggaaccattatctagttcactacaaacccaggaaccattggtatcattttcttttaacatgatatcattttcttttgatggaactgaagcagaatcagggatggtattattttgtaaagttgattctgacgtacatttacctgattgggtatgcttaaactgtgtgtctagagaaggttcagagcattgaactattacaggtttattggatactgtgactactgcatcagcagatttattagaatggttgtttgctgtcaacagagagccatttagagccatttcatttggtcctgtcacttcaggtatattcttgacattctcagcgacattagcagacatcgcttctaaggcacgatgaaggcgttttgaaggaggcaaagcagcttccacatctaatgctaaaatttttgggtggtattctttattcttccaaggaagatgaccttcctttgacaggataggcatgtctgatttgc

SEQ ID NO: 197345 - DNA, 477 bp, Zea Mays
aggaaccgtgcctcctctcccacatccgcatctacaacaaatccgtcctcgagtgggagctcactgccggactgcgatacaagcccgatgcattcgtcaagttgcgcccccgctgcgaggcccccaagcgcgacgtcgtctaccccgccaaccacaccccttgccgctaccttcgcatttcctgcctgcgcggcaaccccatcgccatcttcttcatccaactctttggcatccccgtgcctggcctcgaacctgagctccagccactgctcagctatttactcccgcaaatcacatcctccaaacaacccctttctcacaacatgcacctccaggttctcttctcttactacttcgtttcttctttcatattcgacccttctgcttcggggttcaccatttcatgagttcctgatgcatttctgctctatccattctagttgcttaaagatatctccaccaggctacctccatttc

SEQ ID NO: 197346 - DNA, 381 bp, Zea Mays
attctcggtaatagttgcttgcccgaactcgtgttcatcaccgcattgtgtagaacccactcggttgaagttttaggcaccagagccatagtggagcctctctggtaatggcacggccgtgggggagactattcgcgctgccgcgcggggtttttctccgccgtggcaatgcggcgaggtggaagaatgcgctttgactgttggattcgtagtgaacgactgtgattaggtccagcgtaccccttcgctcggataaatccacgtcattgatctcacatcgtgcggcaggaactagatctaggattaattaaatctaggccgttatatgttcatccaatggccataaacctaggataccggttcgccctggcggttttgcta

SEQ ID NO: 197347 - DNA, 425 bp, Zea Mays
cttgatcatttcatcgatgattttggcattggcaaaacttcaggaaacgagctcaagaaattcaccaacattgcacagaacttaattgttggttccgtccttgtttcaacggtcacgtttgcagcagttttcactcttcctggcggctacatatcggaggggcatccacacgccggtgcaccaattctgtcacacaggtacaccttcaaggcgttcgtgatggcaaacaccctcgcatttgtcggctccaccttgtccaccatctggctcacctatgctgggtcggaacacgtccacccactgcttcgtgcaatctacatgttcctctccgtaatttcgatggagcaggcaacaagaagtatggttataggattcgcattgggtgcgtatgtcgttctgagcccagtcagcgagcggattgccat

SEQ ID NO: 197348 - DNA, 605 bp, Zea Mays
tgcagatccaagcccttgcctctctctttgggtggtctctacctgaagagacgttggttgtggaggctactctttgaggaaggtttctcttccttgggttgcggtttggttggacgtcttaagctagttttttatggatccgtcaaaaattctcatatggaatgttagggggcttaatgcctcggctcgccaggatgctgttagggctgaggtcgtttcatctggtgtggatgtggtttgtttacaggaaactaaaatgcaggatatttctcgttttttggttatccggatgcttggaccagattttgccaactttgtctttcgcccttcgattggtgctagtggtggcattttggttgcttggaaagatcatataaactgggctggtgtttctagagtggatgatcattcagtgtcaattctttttcatcctgttgatgatgtggagtggtggctgacttgtgtgtatggtccccagctcaaccaggacaaaattgcctttcttcaagaattgagagatatttgtgcttcctgctctggcccctggttggtccttggggattttaatttagtttataaagatgaggataaaaataactccaatc

SEQ ID NO: 197349 - DNA, 500 bp, Zea Mays
catatgtagtggacaacttagaagcggaacggggttaaatcaagaacaatcacttcaaagagccggtgacactcgttggtcgtctcattttaaaacccttcagaggttaagcagtttgttccctgatgtaattgaagttctccaatacgttgaaaaagaaggtccaaatgatgccaagagacgccaagcacgtggtctcatggactatttgatggattttgactttgtgtttcacttgcagttaatgttgcttattttgggccatgcaaatgctttgtcattgtcattacaaaggaaagataaagacattttagaggccatggtagaggtgaagttaacaaagcagagatttcagcaaattagggatgatggttgggattctctattagaggatgtgttatccttttgtgaaaaacatggtattccgaagttggacatggatcatgagtacattaatcgccacaagcctaggcaaagaaccaaccgaactaactatcaac

SEQ ID NO: 197350 - DNA, 514 bp, Zea Mays
cgggccgcctccgagagtggggccgagcaatgagttgcttactcaagttccggggaactattgcactttcgatcttgcgccggacctcactcgggcaaatgcgagcaatgctgctggtaccattgattttactcgggctggtccctccagcagtgctgccactctgcccaagtatccgagacatggattgccagctagcagtagcaatgagcagtcctcttttggagcgcttttcccgaacagaagtgctaatggaatgggtatttttacttgtcaaagttcggctaacgaaggtaaggttccagtgaatttggaggcaatgactacatgtccataatcgtagctttcctgtgatctgaccactcgcggcaatttcaacttgcaggaatagcaaatgttggtgtgcagtttcaggactcaagtgtccatggactgcagaaattgccattcaaatcgatgactcatcagcatcctacactgcctggtgatcgaatccgtgtcacctgtatgaatg

SEQ ID NO: 197351 - DNA, 352 bp, Zea Mays
aggtcatttatcagtacgtaaagctgacaactacgttgctgaggtaagggacaacaatgatgtgcattctaagcacattgtcaatgctcagctgcgggaatgttcttgcaatgagtggcagcacacgggcaaaccgtgtatccatgctttgtgcctgataacagcacaagaatttagggatgtcaggatggaggattttgtcgatgactactattctgtagctcatttcaccaccgcgtactcaagggtggttccatctgtgggtgacaaatcattttggccagaagttcctttcacaaaagaagtgggtgctccaattggaaaacgcactgtgggtcgacagaggaaaaat

SEQ ID NO: 197352 - DNA, 357 bp, Zea Mays
cctcgaagctcgtctccaccctcagggctcccgtgctgcccgggaggccttccgtcggtaaggataacgtggtggaggcaggcttgcggcggagcgtcaatggtgggatcagggcttcttctgtagagaaagggaggaggtcggttagtgttgttggatccagggcctccgaggctaggagagggagtgctggcgctggtggtgatggcactagcagaagggagaggcttgatgcgaaggccaaggggttggatgagatcagcaggagaagagatgatcttgatgccaaggggaagcagactgatgagattggcaggaaaagggagagctttgatgcaaagcccaagcagatcggtg

SEQ ID NO: 197353 - DNA, 512 bp, Zea Mays
cacagatgaagtctgttggtgaggcgatggcactggggcgtaccttccaggagtccttccagaaagctgtccgctcactggagactggttttgcgggatggggttgtggccctatcaaggaacttgactgggactgggaacagataaaatatagcttgcgggtacctaatccagatcgtatccatgctatctatgcagctttcaagaaaggcatgagggtcgaagatatccacgaaattagcttcattgacaaatggtttcttacagagctcagggaactagtggatgttgagcagttccttttatcaagaagcctagatcaattgtcaaaggatgacttttatcaagtgaagaggaggggattcagtgacaagcagattgcatttgcaacttcctcatcagaaagtgatgtgagatcaagacgtttggcattaggcgtcactccgtcatataaacgtgttgatacttgcgctgctgagtttgaagccaacacgccctacatgtattcttcc

SEQ ID NO: 197354 - DNA, 300 bp, Zea Mays
ttctactcattgccctgcagccctatatggccaggcagtaggcacttgaggagttctaccaactccattgactttgctagaaagagacaaagataggagctaagcaattactcaacaattcttcccctaattgtgatgctccttcttgatctcctccactcccaccttgttcctcaattcctggagccaaagacgcccaaggggcttggtgagaaggtcaccgtctcaccgagctgtcgagccgtctcgacatactcgatcttgatccgtgcttcctcaatgcagcccctgatgaaatgg

SEQ ID NO: 197355 - DNA, 999 bp, Zea Mays
gacaccgtccaactcaaaccccaacggccggatccgacccggcgtgctctacatatgcgtcccgtcacccctctcctcttcatcctctcttttcttcgcccaaatctcgcgtgctgcctccgtcctgcccccagcgcgtgcgctccgatccgccgggtttcagcgctgcggctgtcgatttacgcgatttgtctggcagaatacagttcagagcctcgagcgctgcagatcgaggacctggtcgtcggattcgggcgccgcgggtgagacctaggcgccggagtttttgtgacggagttttggcgtggttggtggagggggggaggaaggagcggtctcatatgcgcgtgacggtcacgcccaaggacgaggaaaggctggttgacttgatggcgcgcgagcagccgcggtcggcggtggttgcggcgggcggagatttggtcactgctgccgggggcgggggcgaggggtcggatagggactcttcggggtccatagaggagattacggctgacgacttcaagaaggactcgtcgtcggcgttgggcggcgcggcggcggcggcggggccgagatctaggtcttgggtggccccgcccgccgtgggttacatggcccggaactttcgctatgccttcaatagctttgcgtggtcgcaggccgtgcggaataagccgctggggctacaaccgcctgccccagacgacgacgaggtggagcacgccgtggacgtctccgacggagagaaggaagagggcgagattgaggagggggaggctgtggaggccttggcctcgcctgctcctgcgcagcctgagaccatcgatttggactccgacgccccggagaagtcagagtcggtggctatcgatggaagtgccagtgttgtgcctgtcccagctgctgaggaagaggaggtgaaccttgatcagcgtgtggggagtatactggaggagctcgagatggtctccattgaggaagctgagaagtatatgggca

SEQ ID NO: 197356 - DNA, 539 bp, Zea Mays
caccgccagtccaagggagcgggccttgagcaccttcaggaagttcgattcttccaacgtgagcaatctatcttcttgggcagtttccaacctgaggattaactctttagtaattgcaagctgtagtttcgtgtctccaaccttggttttgcgccatgccttgatgccttttgcagtgcgtgctagcttgatatggaggcgttttagtggcgcacaggaggagcatacaggtttggaccatgcatcttggacggccactttaaatccctccatctttacccaaaagttttcgaaacggaaagaggggctacatgttctcgtcagctctccctgtaggagaagcggagtgtggtcagacatgagggacgggagggagtgcaggtagcaattggggaagagcatctcccattcagaagtgcagaagattctgtcaatccttgttagagttgggctagcatggccattgctccaagtgtaacgacggccattgaggcggatttctttgagcaacaggctgtccaaagctgatttgaacgccc

SEQ ID NO: 197357 - DNA, 1052 bp, Zea Mays
gcagcttccagcgaagtgcgtcaggcgtataaacaatttatcggggccgttgtggagttgttgagcggagaggcagtgtctgaagaactctaccaagttgcgcagactgtatatactctatttggtggcgatgacacggagtatgttggtgctaaaaaagtcctttccaaaaggtagcaaacaaacatgccatgtctctcttttttcaagcctcacaaacttggcaattcgtttggcttttgtgctcttaaatgaggttcaattctatgcattgcaactcgggagctcttaaactgccagtagtaaattaccgaggtctagatggcagatggccataatctcctgggcaatagtttggttgcatcaattatttgagccgtgttacatcatctttcagaatactatcactctgcgtggttttctgtatcatgtggatgctataagatcaagttctttctgctggattcacactacttacatggtttatgtctcatcaggaatgagttggagagccttgtgggctacactgtacaagactcagttttgaaaaagctagctcagttagctcagaagctcgattcccttcaacgagcaagtgcctatgaatctgtacacagaatagcggatgatgtaaatgaaaatgatagaattgaatttggagcagacttcgatttcaagccacttgcccgtttcattgttgatgtttctcttgacgcacccttagaaagtgctgaattgggcagtggtccatttgaaaaatggcagtatgatgcttggagcacatccacaactagtcattcaactgctgttaggggttctgtgagtttgaggtggctgaaagatcagtgtgctttgataactaaaagtggtggctcaatgctctcaggagatgaacttgcaatgaccttgtgcagagtgctcctatcaaataaagcaggcgatcaggtttttaacgttctactgaaaattgcctctgttttaatttttgtttctgcaatcatatggtgctcccactttgcagatagctggtgaacttttggacctggttggcg

SEQ ID NO: 197358 - DNA, 451 bp, Zea Mays
cagaattctcctaccttcccgagataacaggtcggccttccaaccaggtagacggtccgcaatccggtcaacaaacagctgaatttggtcccttgtcaacttaagcagggaaagaggtacacctagatatctaaaggggaattctttcagctcacatggaagaacgttctgaaccactgccacatccgtttctgtgcattggattgggaaaacattactcttaagcaggttggcctttaaaccagaggcatcaccaaagagttccaacatatccatggttaggttcaaatccaagtcagcaggatgaagaaaaataaccacatcgtcggcataaagggacaccctgtgttgcaacgcccttgtggataggggttgtagcagtccagcagcggaagctttagcaaaaatcagactgaggacatccataactaggatgaataacataggggag

SEQ ID NO: 197359 - DNA, 406 bp, Zea Mays
ggacaaatcagcgacataaacgaaaaatttgggcaacaaaaaaacaaatcagtgataaagacaaaaagtattaaaaaaacaaccaccgtgtgactcgaacccacaaccacaaggtaagagccttgtacattactgactgagctagacaggttgtaattttcctaggtatgctgagtgatccagtttggcttgggcacatatttgacaatttttgacgaaattttgaacgaatgacttcatgtgtttccaagcaaagatggatttaagtctactatatgtggctgtagcaccagagtgaccacctagaggagagttgtgcaaggctgtaataatacgatgttgcaaatctggattctgtccaacccatatgcggttcttatatttgagtattccattttggagggtg

SEQ ID NO: 197360 - DNA, 304 bp, Zea Mays
gaaaataaagaggccttgaggaagtcccgaggcgaggacgatgaagattttcaaatcacagagtaccaggcacagcgaggcaatgctgctaacatgtacaaattagggcttctgtattactatggactacgtgggctccgccgtgattatggaaaagcttttcattggttttctaaggctgttgagaaaggagagacacgagcattggaacttctgggtgagatctatgctagaggtgctggagtggaaaggaactatactgaagcatacaagtggttggcacttgctgcaaagcagcaacatt

SEQ ID NO: 197361 - DNA, 649 bp, Zea Mays
agttgctgccagggaaatcccttcccagtgttgtcatattaagagctggtgattgggttgaatgtgaacagatggcttcatatataaacaattgccctgccgagttggacaaggtcgaagagatcaaaacggaaatacttgtaaagcactcaaaaggcttttcatggccttcagttgctgaactttgtgagtggtataagaacagagcaagggacattgactgcttaagtggacagctggaaaactctctggccatgatagagcttgcatgtcagaagggcattgtagagttgcagccattctttgatgatattaaatgcctctaccaggttgtatattctaatgaattgaatgagtttacaatgaatcttttgacatgggaagatctgcctgattatgaaaagttcaaaatcattctcaaaggagtcaaagaagatacagttgttcaacggctagaagaaaatgctatccgttttatgaagaaattatatgaacacaaacaagaatcctaccttgttagttggctgaaagaggtagctgctaaaaatgagcttttgatttgcttagctgtcattgaaaatggttgtggggaatcaccaatatatggtctcttcaaggatcttgctgagatgatagaaacctctgttca

SEQ ID NO: 197362 - DNA, 319 bp, Zea Mays
gtcattgcaagaagcaaagatggcagtgttgagaggccgcttaacactagtgctcatcctcagtctcaactgctgcttctccttccccacagtactatcctcagttacttccgatggcttcctccaatgcctgtccgacaacatacctgtcgggctcatctacactcagggctcgagcaacttcaccgacgtgctggtgtcctccgtccggaacccccggctgttcaccagcgccacggtgaggccgctctgcatcgtcacgcccgtcgacgcatcccacgtgcaggctgccgtgcggtgcggtcgcgccagtggcgtg

SEQ ID NO: 197363 - DNA, 409 bp, Zea Mays
cagatgtgttattgtcacttgccttctcatttaaggtaattcacttcttaatgctcaaaacttgtgtttatatgagtgttttttttggataaatgttctcctacatgtaacatattcatgtgtttattttgattttcccatcatagcataaactaaaagttgatatgtgttgttcattgaaactattaccatttgttgctttttgactttggggtataacgttctctcccttttatgaaaaagaagttgccattatctggtgtacctgatttaattctcattagtgcttggattttgaatagtcaattatggtgccaacagccctgttatattctgcccaccaggtgattcatgcaagtgctcacctcccaaagatctgaagaaagtaagaaaacaaattgtcaatcac

SEQ ID NO: 197364 - DNA, 388 bp, Zea Mays
ttaggccatgcggatgctttaagaagctcatctatagaaacttttagaatatgggttatgcattgttccaatcagcggcatcagttgattttgatgaaatttgtcacgggtttgcgacgctgaatagctgtggaggactggaggtatagagagatgcgtagtcagaggtatagggctgcgttatcaggaaggatctgccgagcaattgaaactgctgcgctaactgctgacgcgtagtcttatgtatgccatacatgcgccaatggccaaggtctggtgtaaatgtgctactgcactgggatgtaattactattacgcagtgccaagtaacggctgtccatacttgataaggagacacgttttttcacatgttatggggaaataaaaa

SEQ ID NO: 197365 - DNA, 449 bp, Zea Mays
ctagaagagtagtccccagaagcattgaatttccaaatatgcctatctggaataccaggctgaagaacaagaccctccagcaggtcacaaaggcctagaacttgcgcaagtgccctaactgaaagcgcaccccttatgtcagccacccaatttagatctgtcagagcatctttaaccagccttttggaagcaatacgcctaggaacatgctcaagaacctcaggtgccacctctccgatgcatctaccattcagtcaccgatccttccaaaaaaggatatcatttccatcacccaactcagacacaactgcaatattgatcaaagcctgcaccgatccacaagcctgaacagggaggaccgcccaaggcttagagtggtcggttctctggagccagggccacctagcccgaagagccacgctcaacagccgcagatcagtgatcccaag

SEQ ID NO: 197366 - DNA, 370 bp, Zea Mays
aagaagctcctccatgcttccaccatgcataaccatagcagctgcctcactcagtacatcagacctgctggtctcatctaccacctcaccctccttctcagccgattcatctaagacttctccaccttgagcaataacccttcatgcgtatgagattcaaattgcatctccccatcccatgccacttttagacccactttactgaacaacggatcacccaacttccatggagcattaggaacaacaccctgctcgcaattgttgtgcgtctggtcacccttcccttccaggttcaccacatctccatgcttggcttcctcatcccaaatcacactctccagcggcatttcgttgaacaccagagagtcca

SEQ ID NO: 197367 - DNA, 598 bp, Zea Mays
attaggagcaagtcttgtggaatctctatccatgttggctcatcttcaccttcttgtgatgtggcatctattttgccttccccaacattgagcatccacttgctaaattgtgatagttcttgtcgttcttcttgtgacaatgatggcattagaagtctcatattctgtgtaagatgcaggatgtgcacatgagaccaaagagaagaattgattattgctgaattaacaatttgtgagcgggtgcctccttcaatcaaaggccatgtttgtctgagatcaccacctagaacaacaacctttccaccaaatggtaagtccttagccacaggtgatgaagatgccaagatatcacggaaggacctgtctagagcttcaaaagcaaatctatgtgtctttagtgcttcatcccatattattaatgatgcaacttgaactaactcagaaagcatcgtgccacatttgatgtcacatactgttgtttcttctaattcacattgaattttgaaacaagagtgtgttgttcgtcctcctggtagaagtaaagaggccacaccagatgaagctacagatagaactatttgtttgcgactacgtagga

SEQ ID NO: 197368 - DNA, 761 bp, Zea Mays
ctcactgcccagtatgactgctctagacaagaaggacgtggagatgaggctccaccatgagcttgcgcaggtgaaggacctccagattagactgttttcaggagggcataatgttgggagcatgaatggtgcgacggtcgcgtcagctcccggaagcgatatgctgcccaagaaaaaagccgagaagctcaggcgaagcaattcagtgcagacggataggggagctccaccacctatggccacagctgtcgccccacctgtttccagctctattaactacacgtcctcgtttaaacaatgtgccaaccttctcaagtcccttatgagccatgtatgggcaagcccgtttcttgttccagttgacattgtgaagttgaacatccctgactactttcaaatagtcaagcagcccatggatttgggtacgatccagaaaaggatgaaggcaggcatgtactctacacctccggaatttgctgcagatgtgaggctcactttcagcaacgctatgaactataacccagctaacaatgatgttcatttaatggccaaaactttgagcaagaactttgagagccgatggaagcttattgagaagaagctccctaaaccagatgagaagcctcctcagccagatgagaagcctcctcaaccagttgagaagcctcctgtgaggaagcccacaaaaaagaattcaactaagagagtttccattgagaaagaagacctcactaagaaaaaaccctcaaagaaaagtgtac

SEQ ID NO: 197369 - DNA, 544 bp, Zea Mays
cgaacatgtcgtcctaactgacacgcatgacatataggatccaaacttttattacatgccggaatggcagaagctagtttggagagggcctcgcgaccgggatgaccgaggcgacggtgccataggtgggatggtgcagcactggcgacaagggagtgagcgacgggcagctgcaaggggtagagcggaccggagctattgcacctgatgatcacgttccgcgagagaagatccttcacagagcaaccatatgggtcaaattccacagagcaatggttatcgatagtaaattgtcgaacagaaataaggttcttgataagaggaggtgaaacaagaacgttatttaaaataagagggccaagttgcgccttgccggtggcagtgacgggcaagagcgaaccattaccgacaacaattgatgtgagagaaggaaatcgaggtgttgaggagtgagagagggtaccgtcatgagaggtcatgtgagaggaagcaccggtgtcaaggtaccagtcgttgttcaccggtggagtgagcgtcatggtgc

SEQ ID NO: 197370 - DNA, 440 bp, Zea Mays
caaaaaccctggcgcaacatttaacttggcctaatgagcaatgtccagcctttgtacgccatagttgcctgtttcctttaccttctaaatattgcaaaggctgtgagcctgcgaccctttgaatactaacatgtgttggaaacttggattcagtgagtcacacagatcaaacatgttgacctctgtacaaaagtacacattgacttctgtagtctgcatcagataaacaagcagatgcagaatagagatacttctctcatgtatgcctgaagaaatccatctcaagtagcttctagttctgtacccccccaaaaaatccctctgtgcttgcaattgcatgaataactatgacatgtacaagacaaatgtttcacacaactttatttgtcaatgcattaatcttgactgtatatttcacaggcagggcacaccatatactc

SEQ ID NO: 197371 - DNA, 1381 bp, Zea Mays
gtcgcactggattccttggatggtggtgccaaactgagtgtgcacaaaggagaaaaaatgagtgagggtagaaaaagtgtcgaatttaagccgcaaggagaacatccacaaataatgtgagcaatcatctaggatgactaagtaatatttgaacccagaaatgcttgggacgggtgaggtccaaagatcacaatggattaactgaaaattttgtgtggcacgtgatgaagacacatgaaatggaagacgagtgtggcgacctaactgacatgcataacataaaagatcactagtagttttattacatgaaatcccggaatctgctagtttggataggacttcacgaccggggtgcccgagacgctgaagccaaagtgacgaggatgtggcggcatggaaggtggaggccggcagccgtagaggatagagcgggccggagctgccgcagcagacgatctctctccgacagtgaagatccttcacagagcaaccaaaggggtcaaattccacagaacaattattgtcagaagtaaactggcgcatagaattaggttcttgatgagacttggtgaaacaagaacattattaaggcggagggaatcagatagagtggtggaaccagtggaggtaacgagatggagttcccgttaccgtcaataattgaagagggaaagggatgatgtgaaggaaaggaatgggagaaagtaccaacatcagaggacatatgtgtggtggcaccgaagtcaaagaaccactcgttttggcgaggtggttgaagcgtcatggcgctgatgttggagagtagcgcctgctgatcccaggatggagtggtgggagtcggaaatcctggcggcggtggtgcagaccatggttgctgtggcgccccaggccagggaccttggatgccagcgatcagggactggggcagaggagtggccggctgttggtgtggcgccgagggagcagctgacatccgtggtccgggccacatctgaatagatccggaccaaggattatagaagctaggccaggtgttagtcgatgtagacccttgcccatgctgtttggcgggaggaccggagcgacgctcgcctctcttgtcgccacgcgtctcgcgcttggggttgttggggggatgatgtggaggcggtggctccggcttgctggtcaggggcttgtcggtcgtagcggcgagaagagcagaagctggaactgtggagtgatgcgcaagggtgagctcctcaagcagcaaatcattccgtacctccaggaaggtggggagatgtcgcccgcgccgaaaatgaagaccgatgctagtgaagcgctcatttagccccccgtcccgttgatgacgagagtgcggttagggaccgtctcaccg

SEQ ID NO: 197372 - DNA, 580 bp, Zea Mays
aaaaaggagatatattattttatccattcttcgttcaactgaactcctctttgatggtggctccattgcattttgcatcacctttgtatcatgtcccgtaaatattatggtgccatatatatacattgtattacgaagttttgaatcccttagcaggacctgttccggagacagagaatattgttgcccattgtagtatagtgttcctaagaaagaatacaatttctcattcggatcctcacaccgaatgaaagccttgaaactatggaaatggtcatcattcaagcccatagtcacctctaatgcctgtttccgcttcaagtttgtctcaccatcaagattcatcgtctccacatagcataatccatcacaagagctagacgaaaggaaaataagatcagcagggaagaactcatcctttttaactttaattatatcgccaactcgaagcttcttccattctgtctcatgaaatgattggatcccatcatacacctcaaccttcctattgttcacttctatgtcctatgtaaaagaagggcaaacaaattcagttcagtaaatattaaacaaaataatg

SEQ ID NO: 197373 - DNA, 408 bp, Zea Mays
gttcgggatcaggtggctctcggtgatgtccgcgttctccatgtgcctactatctcccagtatgcaaacatcttcaccaaagggcttccctctacagtcttcacggagttcagatccagcctgaacgtctgtggtaccgacgatcagactgcgggggcgtgttagctgatatatcagacatgtgtttcctgccatatagacgcaggatcccctaccatacaagtgtaggcatacttgccttactagcactgcgcatataggaagctacagccgcatataggaagatatagatacaatcctcccatttagggggcagagatagttttcttccattcaaggagatctcagggtattgtttctataaacctgagatctcctacccctctgtccctctataaatatgtgcgc

SEQ ID NO: 197374 - DNA, 392 bp, Zea Mays
aatcatcatgtggttgggatggcttatatatggccatcacattatgtaggataaaagatgtcctagaagtatgaataggtttgaataagaaagggtagtgtaaagaaagactccatcctggatcttgattcccttgaggatccggcttgtatcttatcctttcttgatttgatgaggttgatcatcttcgatcttcggccatggaatcttcacccaagttggggacacatagttaagatggcttgtaggtaaggacagatggttagtgggtaggtcgcatagaatgagtgttggcatggcataatctagcttcctttggggtctagcttgattcctattcctattttatgagattaatctcttctttcttgagctttggtgtcttcatccgg

SEQ ID NO: 197375 - DNA, 469 bp, Zea Mays
acacaagcaaaaggaactttgtacatgtacatcttctcctctgccgtaaaatcgccacctaaagaagctccacctgaaatgttaccctttgtgctacccgctctgcctcaaaattaccacatgaagaagctctgataccgcttgtgagggtcgaacgcagcagaagcgggctcaaagcagcaagctaaactatcacaagcatttcaccaaacaccttgtgggcataaaccaaacgaagcacctaggctttggatcaagcaaccacgagatatctagtagtgcaaaaacattatatgcacaacatcagctcaacacaacatcagccccattaacagttcattagcataccataaaacacatatatgcccctcatgtcgacatgaccatacaccagaaaacttgagagatggctccaatagcaagtaagatgatgagtaatcaacacatatgatgagcaaaatacccaagc

SEQ ID NO: 197376 - DNA, 276 bp, Zea Mays
ggaggggtccctgctgctagctgcaggagagcttatggagaagctggctggaaaacatgttttggccctgttaggctgtgtttttgttgttcactataatgttttggtccggtttcttatggactagtgacctctactttctcttttctattgacctctactttctctcttctataatgaaatgaaactcagtgtcctgtgttctctagaaaaaagtatgtattcttaggtagtttcgcttggttagagtttatgtggcccatagctttgtctggt

SEQ ID NO: 197377 - DNA, 296 bp, Zea Mays
aagatattggtatggacttcattgtcgggttgcctcgcaccccgaaaggatatgattccatatgggtgcttgtggatagactgaccaaagtggcacatttcatttcggtcaagaccacttacaagggatctcagatggcgcagttatacatggctcggattgtgtgtttacatggagtaccgaagaagatcgtttcggatagaggctcatagtttacctccagattttggaaaagctttcatgagaatatgaatacaaagttgagtttcagcttggcttatcaccctcaaactgat

SEQ ID NO: 197378 - DNA, 292 bp, Zea Mays
ccaggatttggttctagcttataatgatatggaggattactctaatgagttgcatgaggaagttcaccaactctactaccagctgcaccccaatgatgcgccaggagccgcagaagcagaggatggtgtggtgctagctaatgggggtgagcctgatgcagacttagaggaagaagcagctcctatgcttgtacccagtggtgggtctctaggagacagtgatgtttctgaggtagctagtgatacagagggttaatgtgacatgtgtatggtgttgtgacctctattgtag

SEQ ID NO: 197379 - DNA, 480 bp, Zea Mays
cttgaaatcattgtgcagctcatcttaaatgagatcagctgcctgctgaataacatatctgatgcccaggatgtgaagcagaaggagcttgttgagaaatcacttgtagttacacttctggagcatttcgggcaagaggtggctgacttgaggtcagagcggaatgtcttgaggcaagatcagcagataaagattgaggaactgctccagctgcagagagaaaaggaggaacttatgaagataagtgatgaattcttggaagaggtggaggctcgtaatcacaaagtggatgagctaaaggctgaggcgaagttcttggttgtaaggttctccgaactgcaagagtctaggaggtcattgcaaagcgagatcaccaagctattacaatcgaactcttttctatcaaatgaactaaatgattccattgaaaaacagaagaggtttgaacatgatttcagcaatcttgttagtgaagcagtt

SEQ ID NO: 197380 - DNA, 535 bp, Zea Mays
ttctagtctatggaggatgacgtggacctcaccgagaactccgtgcaaccataataacaggattgtagcagccatggtgttgatggcaaaggcgaccatgcccgggatcccttctgtgacaacgacttccatgaagacggctactgtatgcccttggcgaccctagcgatcatcgtttccctcacggacacgctactatttcaccgagtgcgaccctagcgaacacgcgtatgttttctctcgtcttgaactatggtccttctcttcctttagaccaaggtgatagaaggatcccgttacatgattcgaagggttggttgaagcgagtgaaggtcgggtgctgttgtgcagcttgtcctccggggttcccgccagccaagggataccgtatatgatgcctccttcctccatcagggtactgtagccacgccaacgccagcccgaagcttgccattatacttcgtcacgtctcattgtggtttactctaggggtggtaatagacgacgatctaaatgtttctttacaataagttag

SEQ ID NO: 197381 - DNA, 473 bp, Zea Mays
gtaagtcttatgaagttttatgccagacgttaatgcctctatgttagacctcctaaaatatggtgttctaagtgacttgtgtgttgtcttgtttaagttgaagaaaaggttaagaaacgttaattaacctgctcccacccatgttttgagttgcaatgtctaaatgggttgctaagtcttatgctgtgatttgccaactaatgttaagtaggagtcaaattcgttaagtgattgttatatatgtgttgtctcggattgcgataataatatgcaagccgacgtgtaggatgtatagcggcctagattgttactctggctagccgacttgttagatggcttggttaagtttgtagtcgcgatgaattgcttgttgtggtctaaatgtgtatggttatggttgcgaatgaaaagtattagtgctcatgtgatgtctaaattaaaacgcaaatggttgggtgcttatcggggagaat

SEQ ID NO: 197382 - DNA, 491 bp, Zea Mays
ggatccggggacctccatggcgcttgctgccgccatggacgcggtcttcccctgggaaccgaagtcgatgggcagctcgtcgtcgaagacaggtcccttgtcaaagactggcgtcgtggtattgcccgcagatcgaacgaactgaggcagaacgggcagatcctccgccgcttgctgcgccaccgctgctgctagatctgcctgacccccaccaacgactccatcttctggaccagacaactcagcttcttcataaccaactcccagcgcgcttcatctcgttgtgccgcctcggccatcgtcgcgagcaccaaggacgaaaccgaggaaaatgccgagaatcgactacctctgataccaactgtcacgtccccgtagccgccgatggtgagccgggacgtgaggagctggtgacgcaccgatatgccgctccgtggaggaagacgagcgaagggacgaaccctgtttccgatttctgatttgtcttcaat

SEQ ID NO: 197383 - DNA, 358 bp, Zea Mays
gtccagaggtcgatagtgcctagctttatatgcacaatagagatccagtcgcggggcactagatcgagggaggtcgtatgacgattatgttgcaacgaccggtgcgaatgatggaatcgattacggtttggttaaggatggtgctgacaaaaggggcccacaccaaagtgagtggtgtgggcgtgtggacgtggggtgaggggttggttgtcaagcagggcccatgtgtcgattggtgagaagggaggaaattgggccacgcgaggaagcctaggttggtctgatgaaaatgggttgaggaaggtgaaaggatcacgatgccaagagggtggtgaattgggcttctcaaaaattcttg

SEQ ID NO: 197384 - DNA, 467 bp, Zea Mays
gcacggcaggcgatggggagatgaggaaagatgagtggtcgagagtggaggcgcggatctacggggaaacgcgaagggtgggatggcgggtggggaaacgcgtagctcggcgcgagaggggcggggacaccgagctcatggcgaggagatcatggcgaggagatctgcggggaaacgcgtagctcggcgcgagaggttggcaaggctcatggcgaggagatcaagctagaggttggcgcggagctcggccggccgagctcgtcgcggcgaggagggtggaagttgcagagcgcatcgaggacgggaagggatggtgggcgagggggagagcgatgtggggatcgtgggagggtgggcgtcggtggaggactggagagagcgcatcggatgggggaggagctccacggcatattggacgatcgagatagctagatggcagaacgacagaacagatagaggcagactac

SEQ ID NO: 197385 - DNA, 691 bp, Zea Mays
gaaatgcgaaatgtgtatgtagcgttggatttgtggtcatacaagaaggggacatcatgttcagataagtgttgcagaaatatgtaatgcgaatgttggctgttgcgtttgatttgtggtcgtgcaagaaggggtagaatccagaacgatgatatgggtagcaccaatggaagaaaaacttctccaaccaacagagacctctaaagggatgagtgtgtaatgcagcacgtagtgggattttaaggcgctaacggagatctccaaaggcacgagtgtgtagtgcagcgtgtagcgggattctaaggcgcgataataatatgaagtgaggcaagcttctccaaacaacggagacctccaaaggcacgggtgtgtagtgcaatgtgtaatgggattcttaggcgctaaagtgtgatagtaataggaagagaggcagggacatgggaagaggtaggaaaaggagatttcaaaggatgatcttgaataggagtgaatggagaacagctatccatgtgaaccttgatttgtggcttctgttgtttttgaactctagactaccccaatttgcttggggctggaaccaaaaggttttgttgtttcttgctgtgaataaatgaagtggttgctttatagatattgatgttcccacctggaagtatttgggggtgtatgagggaatgcacatgtattgaaa

SEQ ID NO: 197386 - DNA, 659 bp, Zea Mays
caccaacgaagcgtcgatctgtcttcatttctgacggctcgcggacggcgcggcgccaccaccaaagcgtcgatccatcttctcgtttctcagggctcgcggacggcgcagcacagttttatcttcctttcctcgccctcgccaggccggcaccggtaggctgcaaggtatcgcgccgccgcgttggacctcctccaagtctccaactcacgttatgccaggttagacaaagattttgatttttgactcacgtttgcatctcatgcttatatcatatatcctttagtattttaattttgttcaatgttcacgaatttgatagggaaccaaagtttgatggaacggtttttgaaaagaaaattgcctccagctagtgactctaatgatcctggtgccgatggagagacatcaagaaggggagcaaatgcatcaaacactaaccttgaccgtacagcgagtcatcgtcctttgcgagtttcacgaaaccaggtaaactttgatgagcttccttacgatccagcagatagaagaagcatatctgattacataggacaaaagctccaagatgaaattagaaagaagtatttgatcagaggtccttttagaccacctgttggctttaaatatccacagaagatcatagcaggtcatgcacgtcg

SEQ ID NO: 197387 - DNA, 1006 bp, Zea Mays
ctcaggctggctgattgccgttcaggtgctgtttcaaaaaccttcctcccgcgtagttcttgctcggtgccctctctcgcctagttctagctcggtgccctgggctctgcggggtccggagtctcttctccgtaggagagatttgatggaggtcgggggaagaaaccctaagaacgatgtctcaccaaattgattccttccgcccgagagatttagaagctagatctgtccagatttagtggattgataggttttgtgaatttgtcattctccaactaatctacttacagccagattttacatcagacctgatgaaacactgtttccttgacacgaaactggtggacgctgcctttgcatcaagaatcaagaaattgatttgcgttttatgtctctggtagccccagacacctcatactctcctctgttgcctgtgatgaagcagatgactgtgttctcttcattaatgctggtggtggtgcaatcgaaagctgtgatccctgtgtgaaggtttctggtgattcattctttgaaggaggggatgtgatagaaacaaatgagagcatagccgaaggtggtgattgtccatttatttatcactcagcaagatacggcagtttcagctacaagttcgacggtcttgcccccggagcttattttctagatctgcattttgctgaaattctatacacgtgtgggccaaaaggaattagcatgttcgatgtcctggtgcaggacgagaaggcaaatatgctaacttgttaattaaaacttataactgtctcccatgatttctattcaggttcagctaaaaaatcatcacttttgaatccacagatactgtctcagctcgatgtatatgctgtagttggagggaacagggcccttcaagtgcgtgatattagggttactgttgagatgaatggtgctgttatgatcaatttcaaaggagtaagaggaagtcccatggtttgtggtatctgtattcgcaaagcaccacttttat

SEQ ID NO: 197388 - DNA, 582 bp, Zea Mays
aacagaatgctctgtattcaatgtgaaagcaggtacatgtcttttttatctgctacacaaagtattcttaactatggtggtttacttgcatgttgttctttgctagacacacatgcccaaatttcaatcctgttatatttagtggtgtaattgtacccagcttatgacttgtacaagcagatgccaatcaagtttgatactctgttgtttgctcatctgagatatactcagcatgtttcactgtaatggtattgtcaattgaacagattctccacgtgactttgttcagttcattgaatggtctcctcggtcctgccctcgtgcattgctagtggcaaattttcatgggcggatcactatatggacacaaccaacaaaggtaagttactcctttgagatggatgcatcatttctttttagagttaattttgcagttcaataagagcatgtgtttctctggtagctgcctgaaacaaagtttcatatttgatgttatcagaatattttcatactaatcacttcattgtgtggcgaagggtcctgtaaatcttgtacgtgatgcaagcttgtggcagtgtgaac

SEQ ID NO: 197389 - DNA, 1355 bp, Zea Mays
cttcatttctctccccgcttcggtgctgcctgctggccgaccgccgaagcgacaaccgaggccaccgatcagttgactcccgtctcctcgtcgcagggtctcctcacacgagcacacgaacatcgagccctccccgcaggagcataagacgcttcgcttggtaaggaaaccctaccctacttggacgagcttctctcaacgactcaacctttctttcctggatggattagcagttcagtttactgtgaaatttgcatgtacgtggagtagagggaagcccgaacccggtttattttcgaaatttgctaggggttcagttgaattaaacctcctgaatcctgagcccatgtttgttccgctcctttctggcaaactctctgaaagtcgggttgtgctgtgcgattctggttcgttccatgttgggccaaacaatggctgcagtactttattaccattttaaatccgggtaaatgcagtatgagaacagttcctacttcttacttcagatgttgtggttgaacagatacatttttaagaaatcgatcttctttttttcttatcctagcctcctaggcaagagaacactggttaccatgatagacagtgtgcagtgtgctgtacgtggtgttgctttagtagatgtattaggagaaaacaacctgctagcagagcacccaggctcaagcgaccccgggtagttggcctctcaattatagcctataggcgcgaataaactcattcatacagaagactcaaacaggttttagccaatggggcacagctagagtattatacagggacaactggttacgcagacagtgcactgtgcatggtgttgcttcctggatggacaaggagaaaacgacacttgtgggttgcttgcccgcgactggagtgcaactctaacaagtaatcttcagacaatatgatacataaggatgctgctatcttcttctcatcggtttgatttgacttcacttctactcacacatcattgctctgatccaaatgctggttcctatccttgcagttttctaaaacattgctggggttgcagcatgtgtacttgggcatagagggattgttacatcgagctagtgctttggtctctgctgtagcagagcgcaatgggcatccgggcttgttcggtttgctggttgttctatgtgctggttcttgtctgttccttgtgtcagatactttatgttggatcagtggcggctcaaactgctcagttgactgtggatgcttcacctcagaatgctcagataatccctggcaatatgtttggcatcttctttgaggtgagtgtaatgtttaactagttgtccatacattttcatgcatggctattc

SEQ ID NO: 197390 - DNA, 381 bp, Zea Mays
cacccgctcctgcctccgattagccaccagagagctccaatttctttctcttcccaaatcagttttccgcacgctgtgaactaccgtgtcatggccagccttccgcaggttagttcaagcctccttgattgatgttctagactccctcaagtcccctagtactcatagacccattgaattgaactagaccgccctagataaccaagaacgtgtcggtttgctcttagttttcgccgttgtcgtggacaaggagttctcaacccggaatcgtgcaattagttaagggattattgtcatcggggttagaattaggggtcaagcaaagaaggagactagccattgcgttttccggccgcgataagctcgtcggagccactgctc

SEQ ID NO: 197391 - DNA, 406 bp, Zea Mays
aactgtacaaagataggttaaggttgtaaggcaccttttttccaccatacagttgcgaaaaagttggaatataaagaattcaaaacaatagatcaccttttaaacctcaaatgacgtttctatgatattgagggcattgtattcacaactagtggatgatgacgttattgggctagctaatgaccttttgtgatactaggtttcctataatcccctctattcaaggcatacctagatggtgtttatgtccactcaagtaaaacaccgtacatcattttttccacatcgtttctcaaaataaaataaagaccatgggaaatttatccaaattgcgtgtgagatctgtccaaacataggttacggttgtaaggcaccttttttccaccatacagatgctaaaaggttg

SEQ ID NO: 197392 - DNA, 489 bp, Zea Mays
gcccatggcgtcgcacggtgccctctactgatgtcgtcgctgagagcgaccagttctggatcgtttctgtgtgtttggtgcaggttgtcgatgaaggagaaccgaggtgtcgccatggtgaatgccgaagatgccttcatgtcacgacgggagagggcgttggcgacgatgttggtgttgcccgatttgtactcgacctcgaagtcgaatcccagcagcttgcccacccaatgatgttgagggatggttgctatgcattggtcgaggaggaacttgaggctgtagtggtcggtgtggacgcggaaatacctgccccacatgtatggcctccaatggcaacaacctgtacgcggccaatgagttccctctcgtatgccgcaagggaagcatgtcgaggtgccaccggcctactgtagaatgcaggggtctcttgtcttgcagcaacacggctccaaactcgtaggaggaggtggtgagtgccgtcttgag

SEQ ID NO: 197393 - DNA, 314 bp, Zea Mays
aaaaagccacgtgctcaattttgtctaaaacctaaatagaagaaagaagtaatggaatggttgaaagttttgaaattcctagatggttatgcggccgggtttaggagagctgtgaacttaaagacaaataaaataactggattgaagagccatgattatcatataatgatggaaaggctcctccctataatgttccgtgggtacttgaaagtcagtatctggcaggctttagctgagttaagctacttttataggcaactttgtgctaaagaaataaacaaagatgtgatggagaagttggagacagaaattca

SEQ ID NO: 197394 - DNA, 302 bp, Zea Mays
agcggcgacggacacggcactaggctccccgaagcagctggatttgtgtgcaacgagaggagggtgaggattagggttaggcgtatggtcttatacccacctgagatttggtcaaggcactagcttcactcctggaacacggcggattcgtcggaggtcgttgcagcgtgaaggttgcgcatgccgccaggcgtggggaattcgttgaggagagagaactgacatgcctggaccacctgccagagagcggaagaaggagcgagcgcgagtgagtgactggacagtggggcccttatgtcggc

SEQ ID NO: 197395 - DNA, 434 bp, Zea Mays
cgcccgccgagccgtcgcctgccgtgactcccttggaactggaagcggaggagcctgtcctgttggagtccgacgctgcaggccagaatggacaggacgtcgcgacgtcgcaggaggctgccagcactgacatcacgactgtggcggtgaggtgtcaagaggagcaggtcggcgcagggcagccgaaggaaaaagcggaggcggagatgtcggatttgcaagaggagaggccgcagagcagcgaggtcgtggagacagaaacgggggcccatgagcgcacggacgatggctcaccggccgtcgttggagaagcagcagcaacacctgagggagaagatgagcttgcaaccagcgcggcagaagagaagatcgtcgaggagatccagcgagcagaggcgactgagaactcgaaggcgaacgcgaaccctgaggaa

SEQ ID NO: 197396 - DNA, 632 bp, Zea Mays
ggcctaacggacagcatatctgcctcgtctttgagttactgggagatagcttgcttaagctggtacagtacaaccggtacaaaggcatcgggcttgatagggtgaggcaaatatgcaagtcgatcttggtaggtcttgactacttgcacaatgagcttggcatcatccactcagatttgaagctcgagaaccttctccttctctcgaccattgatccctccaaggaccccattcgctctggcctcaaaccttgccttgagaggcctgagggaaaccctaacggtgaagctgggattaatgcgattgagaataagctaaagatgagagcaaggagggtgcttgcaaagcttgctgagaaaagaaaatcagctgtggaatcttcacgctcagaaaggagcttgggtggaattgatcttacatgcaagattgtagactttgggaatgcttgctgggccgacaaacaatttacagattttattcagacaaggcagtaccgggcaccagaggtcattctaggtgcaggatactcgttttctgttgacatgtggtcatttgcgtgtatcgcttttgagctcgcaaccggagaaatgctatttacacccaaggaaggccatggatacagtgaagatgag

SEQ ID NO: 197397 - DNA, 431 bp, Zea Mays
gggcccagggccctcgctgccaaggtaatccgccaaggattttactggcccgcaataatctatgccatgaatcgagtcacgaggtcttacgaagcatgccagaagttttctccctgctcgggcaacccttcgcagttcaccaagctgatcgcccacacctagccacttcaacgctgggggctggatattgtcggaccactacctacggctcaagggaacctcaaattcaccttcatcaccgtcgagtacttcaccaagtggatcgcggccagggaagtatccacaataacgtccaagactgcccaaaagttcttctggcaaaacattgtttgctgattcggagtcccgtccgagctcacagtcgacaacggcaaacagtttgacagccaggacttcagggatttctgcctctccatcggcaccaaacctgc

SEQ ID NO: 197398 - DNA, 943 bp, Zea Mays
caggagcaccctaggggtgttcattggctacgcaaagggctcgaaggcctaccgcatccttgacccaggaacactgtgtgtgcgcacagcgcgcgatgtagtgttcgacgaagggcgagggtgggccttggacaaggcggtggacgacggcacgactctaacgtacgacgacttcaccatcgagtatgtccactttgagggagccgggggagtaggcgacccttctccgagtaagcctaccccagcccccaagtctccaccgactccagcgccacgctctccagctccggctacaacgagctcttcgccaccacgcaattcagccactactccggctccagcgagctctctgtcaccacgtactccagcaccgacggtaccctctccgggaacgtcctctccgacgccagctcgtgtcgagcagaacccagtggagctcgtgaccccgctctcccacgacgaggagcgcgtcgacgcgtgctacgatggcgagtcgttgcggtatcgaaaggtggagagccttctcattgagccgtcagtgccgggcccggcgtctcgcattctggcagaagagttgcatcttgcatgcgacgatggcgagcctcggtctttcgtggaggccgagaaacacgcggcttggcgtgccgcgatgcagtcggagatggacgcggttgagatgaaccgcacttgggagctcgctgatctccctcatggtcatggcgcgatcgcccttaagtgagtgttcaaactgaagagggatgaagccggcgccatcgtcaagcataaggctcgcttggtggcacgcggtttcttacagcaggaggggatcgacttcgacgatgctttcgcccccgtggcacagatggaatccgtgtgactccttgcgttgtcagcccaggagggcttgcacgttcatcacatggacgtcaagtcggcgtttctt

SEQ ID NO: 197399 - DNA, 641 bp, Zea Mays
gcgattatcttgcgccacctctaattgatgtagaagctccctagccatctcaagctgcagtttaatcttcccaacttttttgtcattccagctctgcaaacatctagccgttgtctttaatttcttggccaaggtgataagtgggcaaggccctgcaggaacagacgcccaggcctgagttaccacatcctgaaaaccctccatcttagtccagaaagcttggaagtgaaacctcccttttcctctgctgaaatcatgaagcccaagcagcaaagggcaatggtcggagtcatccgtggctgagctctggagaagagaatctgggaattgttcctcccaatctgttgtgcagaaaaccctatccaatttgaccagggtaggattagagtgcccatttgaccatgtatacttccggccaatcaacggaatttcattaagagccaaatcatttgcccatctcctgaatctacccatcatggcacggtctaaattattattattcttttcttcctcccttaaaatcagattgaagtccccgagcacaagccatggcccattacagagagctctaacttctctaagagattgcaaaaactgaatcttgtcacggttcccttgtggaccatacacacaagtaagcc

SEQ ID NO: 197400 - DNA, 492 bp, Zea Mays
cttcccgaagacgacgtacccaatggtgatgctgcgtccatccagtctgatctaggagatgctcccgctgtcctcctcactacgaagctgctgttcttctcaacctccatgtgcaggctatggcagtccagaacatccgagctcttgtcccggttgttcttaacatgtcctccccttctacactagatgacgcgactccttcctacttgttgtcggcaagtacacgttgacggatcaagtgctcaccgacacattcgcactctcttctctcgattgggtgcggatggactgcgtcaagtcatggatcgtcggcaccatcaccactgaacttgtcgatgccgtgctcatccgtgacgtccctgctcgtggtgcctagctcgccattgagtctcagttcctcgggaaccgtgagacctgggcgctcatcctcgatgcgaagtttcgcaacttccgccaaggcgacctctccattatcgactactgccgcaagtt

SEQ ID NO: 197401 - DNA, 1249 bp, Zea Mays
atgatctgctgcaggttatttccctgctaaaggatgacacactctttattagacgactatttgccaggatgaggtcatcagatatttcaatggaatcaaaacgagaattggtgagaaggctttgttcttgttagtatcttcgctttttaactcaccattgtaaattattagttagcatcatcatagtgcaattgagttaggtagttgaaggataataaggcgagactgcccattgctgttggcattgatgcaaatgataatctaggactgaaaatgttactatcttcatgatttttgttgatttgttttgatgttaattttctaacaagagacagctggattaacagggctttgtttaagatctgtattatttttccttgaatgaattatataatttgctaaatttgattattacctgagtttagttgttctttataggaccttggatgtttaggttttgcttgccttgagggaattcaggttaatgctacacaaaagtttcatcacataaaaaatgccactcaatatctcccagacttttgtatgtggcttgcgcattttgggcccacctcatttctaatggaattgctcaagattttgtcacatgcatttgctatcacagagactctcttgtctttatgattagttaatctgaagcttgcttgctttgccattctgtttgtcttgcaattactggaacctggattgaaagtggaattccttggatctcgtttgttgaccctgctaaaatgtttctggtatttccaggttctgttcttgcatgaattttgcacacttagtaagagtctaccacttgttcagcaactgcgactgtttcggtaggtccttcaatttcattcttctttctttctacctgtaaaggcaacacaacactgccatggtattgtatcaattctccaaatgtgtaaatgcatggctgcaggctatctgtactacaaaaacaaaaagaaatatgaccatataataccggtgtgcctgagcttggtgttatcattgttttctctgcctggcagccctgtgctttgtctcgctatcatttgacttcagattgctgaggatcttgttataggtatatcaggggttaccattcagattttttacgtgtttgttacctagtacctataaccttgaaccgttgtccgcactacaattaatacttcaatagattgcatacaaccaacccaatataccttacagatttgaagacatttgtgttgctctgctttag

SEQ ID NO: 197402 - DNA, 577 bp, Zea Mays
cccgtgcccgccatgcaaagcatttgctccggatcgaccctgcccctgcgggaagcagatcatcgtgcggcgctgtgcggacaggagcacgcctgtgacctgtggccgcccttgtgaacagatgctgccttgcaaaaggcatcgctgcgagaaggtttgccacactggttcttgcggggattgcgctgttctcatctctgtgcgttgcttctgccggaataagaatgagacattgctatgtggagacttgatggaaaagggggagctgtctgaggaggacggggtgttttcttgcaatgaggtatgtggccgcacgcttgcctgtggcaaccatgcttgcaaggatatgtgccacccagggccttgtggggagtgtgagctcatgccgtggaaggtcagtacatgtcattgcggcaagaccaggctgctggagaggagggcgagctgcttggacacaatccccacctgtgataagatatgcgataagaaactgccatgtggggtgcacaagtgcaaggtcaattgccatgagggagaatgcccaccttgtttggtgctcgttgagcagaagtgccgt

SEQ ID NO: 197403 - DNA, 563 bp, Zea Mays
ggtaaagaccacttggtgaagctattaaagcaactgatggctagttcttatcacccacacaacttgattggaagagtttctccaaatgctgctgatgtcccaacacttcttggctccaactccttttcacttcttccatgtatgtgtatcaatgttcttcaatgtgttacttcttagtattctttcctggagctatttattagagcatttgtattgtatattcaactttgtgtttccagtttgggtagcccccaactactgtttggttttccatgttaatatcgcaatgtcttcacacattcttgaatccttcagctgacaggcaagataagggaactcccaggctgccaagttatcttcgttggcctcacattcagactgatcaagttcatggtctaagtttgagagagataggtggtttcactaagcattgtcgagctccctctgtacgtgcatcttgctatgccatcgcgaagccatccacccttgttgaaaagatgcaaatcataaagagattgagggggcatcaaaatgctgtgtattgtggttcgttgaactttctt

SEQ ID NO: 197404 - DNA, 394 bp, Zea Mays
ctaatttcagtgtccagagcagaccatctggttccattctaagtatacaggacgtcagctctgttccctcagagcaagaaaatccaactggacctacaattgagagaattggttatagacaagaaaccctacgtgtgatggatgctaaaggcgctgaaacattgcaaattctcagaaggtatttcgcgtgcattccagactatctacactcatctggtttcaagatacagatacagtgcacttttagattcgacacagagccatttaacaatgcgtgggggttagatttgccagtttcagattctgatggggctgatgagttgcctgccctttatgcagtgacaattacattttcatcaagtgcacagtttgggaaaattccatcatgtcatat

SEQ ID NO: 197405 - DNA, 273 bp, Zea Mays
caccatcgccttggtgatcttggttccgaagctctctctcagctcgctagcaacgcttccatctcttgtattaaaaatattaatacttctgacctctgccatgcatgttagttaggtcgccatgtgcgtctccctttttcctcttcatagtctcgtgccatgcacaactttgacctcaaccattgtgacctttggacctccctagtccccagtgtgtctggttttaagtattacctcaccattcttgatgattgctagcaccacctatggtcg

SEQ ID NO: 197406 - DNA, 680 bp, Zea Mays
acaagctgctgaacctgaaggcgcgggagccaaactggacaatgtgggccgttcaaaggagaaagaggagccagctgagccaaggagaggtacacgtgagcgtaagttgaaccagaggctgttgggcccggagtgggtgaactccatgtaacgtgtgcgtggcctatgggggatgagatgccggcgtgttgccttgctgcataaaggagtgagtgcataagagatggggttatgaaaaatgtaacagaattatattcctctagctactctctgatcaacgtgttcttcacgttgccgcctgtcccctgttcccttctatctctaccgatttctggaattccgctgtcgttgttggagatctcacatctggtatcagaggtaccgattctgggcatcgttcgctatggatcctgatcatacctatttcactcggttgcaacgtcgtcaaggtgcaatggatccgaataccaagttgattctagaagagatggagaaaaagtttgctgccatggatctgaagtaggagcgcaagttatctgaaattgccgctggaaaggagtctcgtctgtgcgagttggaatcagcaggggccgagttggtggcctggcgccccaaggtcggcgccgccatggacgacgtcaagctcgaactgcgtaagttcaacaaactttgggatcgga

SEQ ID NO: 197407 - DNA, 407 bp, Zea Mays
gggctagcgtagcctgattggaggtagcaggtttgattagctgttagatcgacttgtgtttttttgaagaaacaagcatgattgtagctctgtaatctgtgcatctgtgtgtgtgggtatattgcatgtttttgtgtgccttgtatttttatattcaaggaaaaaaatgcacctcaacacgtcttcgtccacgtattagaaattccattatttatttttcgcagtactccgtggagacatctccattctgtatcccatgcatatccatattgaattcatatctggtacatgatacgagggtgccttatgtatccatgtaacttaggctatttgttgttgttagcacttttgctgcattacttgatgttagagtaactatgtattccttgtaatggggtcttgtgtaa

SEQ ID NO: 197408 - DNA, 462 bp, Zea Mays
ctgtacatcatcagctgacccagcaatagggaatcgtgtcaactcagtcctaaacttgtccaaagcttggaaggccaaatgcacaagaggtgggcggtcgaacttggagaaatcactcatgagaaattctcctggctccttgattgcctccttcaaggttttgaaattaagaacctttggtggcttcacctgtgtgacaataccgcctctaatgtaagtgccatatgaggtggtgtcttcttctagagtaaaagaataaggccttgcattcttaatctttcttggttttccatcattgagttcggtcattccatgcacttcagagaaaacaactagatcaccatcctggaactccagacgctcatcatccacacaagaaacaagtgctgggttgtcattgctgattgatgccacaattcctgtatgtggctcctcaccatcgacatccaaaacagtaaactc

SEQ ID NO: 197409 - DNA, 1729 bp, Zea Mays
ggctgcgctccgccggagcgagcaaatatccttgcccccacgagaccctcgcacagtcgcacctctccgacgtgaccggcgccgtagaaccaccgggtcttcccttgtggttcgtgctctccctctctacccgggtcccgggctgctcccctctacttcgcaatcgctggatcgcacgccaagggcctggcttgcgcgtttcgatctgcatggccagagtgtttcatgcgcgtttgggctctctgatgtttggatggggaggaggttccagggtttggggttgagttcgcgatagggttttggggggtttgtagggattttcagggtttgcggtgttgtgcacggatcctgatctggggccaggattgtttgtctagattcctgccgttgcaccaggatgtctctctgcgtgattactggttactcaagttagtgttggctggcaccgtgcgatgtaggctgcagcgctgtcggagtcagtagggggggggggggggggggctggcgcatgctgaacggatgcccccatgattattttttcattgacttcagtgcatgctttaatatttatttcatggattaactgatttgagccccatataatcatataattctagctccatcactggcagtggaacagatgtacgaaacttgaacaggcgtaatgatatactattattaactagcaaacatgttcgtgctttgcaatggaacacactttggaactggactgtatgctcacttttctaattcgtatgagcagaggtcgtgagttttaggtcacggacgggatattaaaccaattatgactctagtcgtactactcttaaaattggtgagaactgtgcttgggggagtgtagggacagactgaccaagagagagagagagagagagagactaagagagagtgatggatcaaaatttggaggaagaaatttccactctttaattttataataatatataaatatataagtaaagatttattattattaagtgatttatgacaaggccatgaacttctagatgaatgttctctgatgttcttgtcttgcctcgttgcttgtttgcaatggctatttattgtaaaatctggtttttgctagtagaattgggtactgtgcttgttgcatctgcatatcctctactccatgcttgcgagtttcttttagaaggatgcaaaagaaactgcatttatgtgttttgtgagtagtaggaaaagtatagttctgcagctatttaactatgtaagcgcatgcaaatttgaaggcatatagccagtttatgtggtttcaatcttgtaacattaagtattgtctagggcagcaatgccatttttaccacgtttaccaattgcttactttgttgatatctttccattattcattgtgaagctaccgtgttggcccagggattattcaagaacatggagagaaagagaaaccccattgtctttctggatgtatctgtaggtgatgagccagatgaaagaatgatctttgaggtatgtttgttattactgtttctcaaatccgtattcagatggtagtgcaagcatgactaagaccgtgcaagttgcaacatcaaagatcaggagctgtagctttgtctttttatatcgaaggctaatggtggtacttgtctacttgattctgtttaaaagcatgagaacctttttttgcagttgttcgctgatgttgcaccccttgtgactgagaacttcagag

SEQ ID NO: 197410 - DNA, 603 bp, Zea Mays
gagaccagaacgttgtgcatttgtcagcttcttgtatttcattgactcttcgaaacctgatgccttctcccaaaacagaccctcccaagtagggaagtaagtccctttaaataatgtatgctccaggatgccttctacaccaccaagtgcttgaatgacatcagttctgtagttatttagattccaaagcttcccatcatgccgctgatgtgtccaccagaatgggttctgtttcagcacttgatattgcttaaaatccgttctcactctccatcctttgtcataggctagtgtatggcggtctttttggaaaagagtgttgatacgaggtatacctctatcccatgaatcttcgagatcctcaagagttaatcgtctgttctgtgattgtgcttcctgcctcttcaaagcatactcagcccaaacacgctgtgaatcaataaactcactctcccatggctgaatgtaacgatacaagtttggaatgagctggtcctcttcatggctcatgccacttctaaaatgtgttacaccaacatctgtctgcttgctatacctaagatcgctctgtggtataagaatatggcccattgataacattcc

SEQ ID NO: 197411 - DNA, 398 bp, Zea Mays
gttcgatcggcaagcagatggcgtcttggagcctttccaagctaagcatgtcttaacagggattaatcttgaatgtttagctgccattcttcaaaagaaagaaagccactatgacttggatgtatacgcttatgtaattcgtcaagtctattgggtaagttttccgtgtccacttcaagttacaatagctggctgtgtaatattattgatttccatggtcaatgacatttaataatatgcatcgtacttgtaaaggtttcaaggattacacaggtaaggttggtgctgctgatacagatggagttgatacggcataccgcctagtcgcagatcacatgagaatgatcgctgttactaatgcacccggttctcaacttggttagagcgttatgtttctg

SEQ ID NO: 197412 - DNA, 458 bp, Zea Mays
cgacaacaatgaaattgtaggggaaaatggggaagttccactatgcagctcaaccactgtggctataactcctgaaccaactgtaaacagagagatagaacatgagtttcatcaagctgtgtatcaggaaccatcgaattcattcaatagcagtaaagtttttggagatccactagcttctgactccagagatgttgcaccgtcagtcatctcgagctttgattggatgcttaatggtgcaatgcagcagtcattcaatgtctttccttctcatccaactaatggaaatgaacaagaaaatggttcttctgaagatgcgccaccacttcctcctcttccaccgatgcagtggagaacaaacaagatacagacatgctcatcaccgttatctgcaaagatcgggagaccaccaaggccaaaacctccagcaaaacaacaagaaagtgaagctgctcata

SEQ ID NO: 197413 - DNA, 389 bp, Zea Mays
atgaaattgagcgacaggttgcagaccttctcaagtcggggatgattcaaccgagtagcagtccctttgcttctcctatcatcctagctcgcaaaaagacaggggattggagactctgtgtcgattaccgacgtctcaatgccctcacggtgaaaaacaagtacccgttgccaataattgatgaacttttggatgagcttcagggtgctttgtggtttacaagtttggacttgagttcgggatatcatcaaattcaaatggatcctcaggatgttcacaaaacagcttttcaaactcacaatggtcactatgagtataaagtgatgccttatggtgtcaccgggggtccagcaactttccaactagccatgaattcagtattgtctcca

SEQ ID NO: 197414 - DNA, 441 bp, Zea Mays
gtggactgactgaggacgaggcactagggcggagcagccgcatcagcgcgtcgttctggcgagtcatcgaatttgtcgtgagatagcgttggtgagacgacgacaagtaggaggagcgagtgcaggaggcaaggtagcgatagatgatggtgacgacaagcgacacccattgtcgtgttgcaatggcgcggtgggactctaatgagttagcgagggacgggtgatgccatggtcccaccaacagcttgcccatgtgctggtgcatactaggaggcaaaatatcaatgttgtgtgtaggatcccgacgagtcgacgagctgatgagtgatgagaaggcaaagtgcgcagtagcggacgggttaggtcaccgacttactggtcaatcgatgaccgaagaagcgagtgagccacgagtgagcttgcgctagggaagagaatcaa

SEQ ID NO: 197415 - DNA, 632 bp, Zea Mays
gcgatctggtttcctggtcgtcctaatcgtcgattaagcatccaaagcgactgattagtcgtccgattagctaggttctggtcgactagtgcgcgtgggctaaatgtggttgtgctattgggcttcaccgttttttgggcccagtagccgcatacatctgttggcacccctaaaccctaaatccttcttgtgcttgcgcccctctcaagtttctgtcctctgccggcggctgctgctctagcctccaggtctctccaccgtccaccatcgtcggcgtgcagctcatccttgaagaaggtcgtccctgcccccttctcatctacaatgcacaagatgagctcgtcatccgaaggtcatccctgctcccctccttccccttgtctgcactctgcagttttgcatcctgcacagcacgacagcatggcagttttgccaagaatctgcattctgcgcagtctgccctggccctgctcatctagtgttctatacttctatgttctactgccttacttcaatagttcttagcttcatctccgccaaccagtttccatcagcccagcagtagcatatctagtgcctagtattgacttgacctctatctgttgacatgttcagagtttcatgctgccggt

SEQ ID NO: 197416 - DNA, 328 bp, Zea Mays
tggagaccttggctgggattgtactccagtttaagagtgcttgcagtgcctaagttgataaagttgtgagtagaacccgtgtccagtagtgctgtgagagcatgtcctctgatagatacctctagctgcattgtgccctcagattgaataccagtcaaagcatgcagtgatatcactggttctggttcctcaagatcggtctccatggcttccccctcctcaaaatcagtgacctctagatagaacagccgagggcatcggtgtcctctgacaaactgctcatcacaattgtaacagagcccctgacgtcgacgctcggccatctcag

SEQ ID NO: 197417 - DNA, 627 bp, Zea Mays
cccgcgagtcccgtttgctcggcctcaaggtaatgtgctcccgtctcttgccccccatcagacttcgtcattgtctgctacacctccgaattaatcattcagcttgctttcttcagtggcccagagggttgctgctccatggcccccctggcaccggaaaggtactgaatttgcaattccttgtcttgactctcagctctttcttccatcatctaaaataactaactctatcacaagtctttacaccgtgaagtgtttgggttgtttctgtatatcgtggagtgcttggattgtttttttgggtttgatgtttctgcaagacgtaaacagtatggtgattgttattttgacagacaagcctggttcgagctattgttcgagaatgcaacgcgcacctgacaacgatcaagtactgaatttactttgttgtgtttctgttagtgctgacatgtacattgtatttttcgatatgatttggaatattgcttctggccaccttgacagcccatattctgtacacaaagcccatgtgggagagggagaaaagttcctgcgtgaagctttttctgaagcatattctcaggctttgcggggtaaaccagctgtgatatttattgacgaacttga

SEQ ID NO: 197418 - DNA, 350 bp, Zea Mays
ccggcaatggccgctgccatactggctttgcgcgccgctgcgctgtgtggtcgggcggggaagacactttgactgccgttgatccagccgctaacggctcggatcgggctggtcgtacgcgttcggctatatggcatggagaccgttggatctgcagtcaacgcgtgggattagatctggggaaggaatcactgtgggtcgttgatcgactgatgatcgggccggattaaaccaggggataacgtttcggtccaagggatccgtacgttagatcgcaatcgtgcggtttacgtcgttcgcgggttcataatgcgcttagtctaatctgagctatcgagcgctgatccaac

SEQ ID NO: 197419 - DNA, 555 bp, Zea Mays
atacagtgctctggagggagtgaaacccaacaccgaatggttgttagaggtataccaatactcaactaaggccaaccattttttccattggtggggctgattgtagacagcacacctgaggtacatctccacacactgatttaccctctcgctttagccatcagtttgtggatggtacacaatagaaagtaagagcttcacctccatgagctggaaaaatgcttccagaaactgctggtgaagactttgtcacgatcagacactatagatttaggcaccccatgcagcttgatcacattgtccaggaaaatttgagcaaccacttcggcagtgaatggatgcttcagaggaaaaatgaatgtacttagaaaatctgtccaccaccacaagtatagtatcaaacccttcagatcttggcaatccttcaataaagtccatggtcacatcccttgaggaataggcaacagttttgtgagaggctttgccaagagtccataacctttgacaaactttctatagtatatagttagacccaaaaatcccctgagttccgta

SEQ ID NO: 197420 - DNA, 535 bp, Zea Mays
gtaattaatttcctttgaaacaatgactgtgcgatagtgtgattaataagctatgctttgatgtacatcagctttggtgcctgaaatctcccacatcagagtgtactctgcacggccattcggacaaagtgaattgcttggatttcgtcacacatgatggtcagcaatatttgattagtggatctcaagactgtactgccaaggtatcgatgttgtctgtgtgtatagacacattatagttccgcgcataacaattgctactgatccatgctatatttttgtcaaatgaggcatgggccttgaaggaaaaggaatgcgtccagacaatggatgttttcatgtcgccagttgtttctgtcatttcccttccggacactccatatataactacaggttcagcagatggcactattcatttgtggagttctgctaatttcaggtgactaaaaccatagtatgaaattctgtgagatactagcaaactattttaaatatacatcagtgcctattttatgtatatataacttatttctca

SEQ ID NO: 197421 - DNA, 629 bp, Zea Mays
caagccaagtgaggatgttgatgactttgctcttcgcctcaacactctgttgcagaagatggtgcagttcgacgacgacacctacgatgaggagagagccgtcgagaagctcttccgttgcatccccgagaagtacaagcagattgctcgctcaatcgagtctctgctagacctctccacgatgacgatcgaagaagcgattggtcgtctcaaggcctatcaccatcggcgggaagctacatctcactcgggagcagtgggaggcctgctaaggtgacaagaaaaagggggagtcctcctcgacacagggccgcaaacgcggcaagccgtgcaaggcgcgcggaggcgcctaagccggggcacgaggacaagctgagggtggtgctcgcggaggcgcccaaggcggcgccgtcggcaacaagaagccggcacgagatgatggttgtcacaactgtggcaagcttggccactgggccagggaatgtcgatagccacgacgcggccaggtcaacgtcgcacaggtagaggcggaagctctgctcctagcacacgcaagcatcgagctacctccagcgacatcggccgcagcggcactccaccttgatgagtcgaaagcacgcgctttcctc

SEQ ID NO: 197422 - DNA, 308 bp, Zea Mays
cgaggatgtggattgtcctgtgtgggctctcttcctttgaaaaccaacttggcgattgggaattagcatgaaacaaatctttacacaattattacttgcatggacgaagtatggacgaaaagaatgaaatataggagaatcatattgttggggaggtagatctgaggcatttgataaaggccaattcgatacatgagcatgcttcaaatgaagggccaattgctaccggttaaacataccatttgcagtgtttttccttagtgttttttgatattttgatcgattttggctgcaaaggtctactaatt

SEQ ID NO: 197423 - DNA, 477 bp, Zea Mays
aagagtatggataaatcatggatcacaagtgaggctaggtacaaagcaacttttcatagcaactcttatgtttttctatagttatattgatatgtaacataggaactgtatgtagggagacaaaggtttataaacaaggggtgaatggttttctagcttttgcatttagacattcagcaataggaaataagatactatgcccttgcaagaagtgtgttaactcatttggagagaggccagtgaagtgcgagaacacttgatatgtgatggttttctaaaagggtacacaacatggaccttacatggagaagcttcgtcctcttttgtgaatcatggtaacaatgatgatgagtttagcgagcatcctacagaagatgatgcaatatctgagttgttaaaggatttaggttgtggtttagatgatggaggggatatggaggatgatgggtcttttgaggaacccaatgaagacacagt

SEQ ID NO: 197424 - DNA, 401 bp, Zea Mays
gatgatcaagttggcgtggtggcgctcgatgaccgatcgatgcacatcagcacatgcacctaattctaattcgttatctgaccaccctagctaggcaacaagagcagtgtcggtcgttatcgagcgctctcgacaggtgcacccagatgaaacacgaaacattggaatccgatgcaggggaaatcaaaagctgcaattgtcaattgaactacaccaccacaccgatctatatagagttcctctaaacggccgggtgcatctgatgctttgtttctcgtgccaaattatttagataatgcaacgaaccttctcgtcgtaacttattgtcaaaatcgtcccctcagctcttgtccggttcgccgaagcaagcttcctaagcacatatctccgactccgattcc

SEQ ID NO: 197425 - DNA, 279 bp, Zea Mays
ccactttctctacattatcacgccttgatctcaatcttagctctggaatgttgagctgacatatctcacggaactcagaccatttgattacagctttattattcttcaacctccagtcatgcaaaactctaaccaaatcattgcatacttcataaacttgaggtacttgctggaggattgtcttaattgtcatcctcaagtgatgggtgagtctacttactgaaaccaatgatcttgcatccacggcaaaaacagtggggtaaatttctgcatatgaat

SEQ ID NO: 197426 - DNA, 362 bp, Zea Mays
gtcttcttcctgttgccatccaccttggaatcaaccagccctttgaggcgcgtaacctctacagtgagatgctcaacttcctgggccttcacctcggaagccctaacggcatcatctacctggctgagggcttcattcttggcatcgattgcgtcggccagctcatacctggccttctccagctgctccactgtcgaccgcagcacagcgtcatcagcctcctgctggccatggatgcttgcctgctccgactctctggcagggagtttgtctgcctcctgcgcctcaatagccctcctttgcacatcaagcgcatcctgcagcttggcattggcctcatcagccaccttcttggcacgctc

SEQ ID NO: 197427 - DNA, 1192 bp, Zea Mays
agtcaagttcatgtgcagctttggtgggaaaatcttgcctaggccaagtgatgggaagctcaggtatgtcggcggggagacacgcctcatctcgataaccaggaacttctcgtggaatgaactagtgcagaaaactctcacaatctacagtcagcctcatatcatcaagtatcaacttcctgacgaggatctggacgccctcatttctctttcgtgtgatgaggatttccagaatatgatggaagaatactgcagtcttgaaaaggccaatggctctgttagactaaggatgtttcttgtctccctcaatgaatgtgaagattcgtcattggacgcaaagagcttggagagtgaaccagagtatcattttgttgttgctgtgaacaatcttgcacatttgggccggagcattagtggcaacaatttaatgagccagccgagccatcaattggatccttctccacactcctttagagactcacctgtctgtcaagccaatacagaagttaaagccaaagattctgttggagcaactctcaatgaatcttcctctcagtttttccttgctccatacacacaacaattggtggtcgagccatcgacaactccgtccccaagtttaagtcagcagaggaccatgaaacaatctaggaagcaaccccctgcagatgaattgacaacaaaccaagaacatgtgagtagaagtgaagtttccagtagctcaaatttgaaaaccatgcttccgaaccatctagataagaagcacaatgatgcggacaagggtattggaactggatctcccttgaaacatcttcacattcgaaggcaggtaaaagattgggctggaaatggtattgacttgattccacataccaactatgatgtttctactccagtggaagcgtccttatattctgaaaaggttatcatgcatccagaaaatgcaggagggacatctgggctgcaggaacatgccggtcaaattctaggcatgccccatgccttctcagatcctttactaaagaatcttaatgacttgcctgcatcgaatttgtcattacctgctggttcttacataacccaatcattttcccagaaaatatgccatactaatgagttggagagaacaataagtaggactgggccagcttttgaatgtgtcaaaccccctgacattgcccgtgcagatgaa

SEQ ID NO: 197428 - DNA, 380 bp, Zea Mays
atgccgtcagagattggatgtgtggggacgatgatttccatgtgagcagcggcctggtgtccatgtactgcagggttggccacccggactctgcaagaactgttttcaataggatggcacgaaggaacgttgtttgctggacagccatggtgggagggtacatagagaatggcatgtttgatgatgccgtggattgtttccgggcaatgtggcttattgatgccattccaccgaacaggattacgttgatcactgtgctctcggccattgaggccctctcgagcttagcagaggggaaacaggtgcatggttttgcagtaagaatgatgatgcacgcagagatgtcgctgaacaatgctttgattgatacatacgcaaag

SEQ ID NO: 197429 - DNA, 357 bp, Zea Mays
gctcctcctacgacccctacccgtccccggccgccgacgacctcttcctctacctctccgacctcggccccgcctcgccctccgcgtacctcgacctcccgcccaccccgcagcctcagccgtacccgcagtcccagcagcagcagcaggggagcaaaggccccacgcaggacatgttgctcccctacatctccagcatgctcatggaggacgacatcgacgacaccttcttctacgactacccggacaaccccgcgctcctccaggcgcagcagtccttccttgacatcctctccgacgacgcctcgtccccgaccaccaccactggcaccaccaacagcagcgccagcgtcaacc

SEQ ID NO: 197430 - DNA, 632 bp, Zea Mays
ccgccacccctgccgcctgctgtaccacctccattgcctccatcaccagaacctgagccacctggagttctagccgaggatatgatagaagacatggatatctgtgacaccccacctcacactagtgcagtacctgaacccacagaaccaatttgtgatatagggaggtggttttaccttgatcacttcggtatcgagcaaggaccttccaaacttgctgagctgaagaagctggtgcaagatggatatcttctttctgaccatctgataaaacatgctgatagcaaccgatgggtgactgtagagaatgcagcttcaccactggtgccatctgatttcccctctttatattcggacacttcaacacagttggtcaacccaccagaagccccaggaaatttgctcgatgaagctctagaggaggcttctaacttggcatcaggagctgaggataaacaaatggaggaaacgtctgcagaagatagtgaagaattctgcattgatgatagggttgaagcactgatggatggatcaattttggtgcatggccaggagctcgagatcattggaggtaaaacagaagtcccctttgctatatttgaagatccacgtgtttttgctgtgggctgggc

SEQ ID NO: 197431 - DNA, 296 bp, Zea Mays
ctttcataaactggttgcaaatcagtttgatgcaagaattcgggttatcatgactgacaatggaacagagtatgtgaataatgaatttagatcatatatgtcaggtcaaggaatcattcaccaaacaacttgtcctggaactccacctcagaatggtgtagcagagagaaaaaatcgtcatttgttggaagtagcaagatctctcatgtttcagatgaatgtgcctaagtatctgtggagtgaggcagtaatgacggccacatacctcatcaaccgaatgccctcaagaatactta

SEQ ID NO: 197432 - DNA, 583 bp, Zea Mays
gaaggtgattctgatgattatgtgtctaagttttgtgagtctgatgattctgggagttcgattgtgtggacggaggggtcttcggaagaggacttggattattttgcagcgttggatgtggctgcggcagagactcctccacgtgtgatgggcgctgaggttcatcctggtgcgagtgctgggtgtaggcggcgaagagcggtggcgaaacggggagtgggtgaattgtcacgaggtgaaaggcgtcatcgtggtgagatggagggtggtcgtcttcgtgtggatgtgactggcaaacgggaattgttgtcctcgccggctggggcgtgtgtgggtgagggggagctgcgaagtctgtttgcgggtgaggaattgaggataatgttgttcaactatagggagatggatataatcccgaaggttgagccgatgtaatgtgtgatgccctcgctgtatgtatgtaactataatttgtatggtaaggctgcgtgccttcgctgatccggccacgcccgtaggcggcctgtgcacttgatcttgcgcatttattgagttggtccggctgcacccgtagtcgattttt

SEQ ID NO: 197433 - DNA, 456 bp, Zea Mays
tatcctcagatttaccagatatatctgaccccttccagattcctgttgctgttctccagcgtcgtgtggtgtcgcgcggattacgtgctgtgcagcaaggattgatccaatggtcgtcactctcaccgtcgctagccacctgggaagatctcgaagcacttcggcaacgtttcccattagcgcctgcttgggggcaagccggcgctcaaggcgggggcaatgtcagcactcaagacaatacacttcagacatctacgccttcagctactgatggagacatgggagcagaggaagtgcaggtttcaaggcctaagaggacggctaggcccagtagccgtgttacgggcccagaatgggtgcgctagaattgtatctcgctaagcccatgagcttctatatgtatcgttgtatccgaacgagacgagaacaagaaaagagaacactcatttaccacca

SEQ ID NO: 197434 - DNA, 611 bp, Zea Mays
ggtaggagaggtagtacaggtggaggccccctgtatggtttgagaagaacaacatggaatacgtcatggatgcgagctccaggtggaagctccaaacgatatgcgacgttgcctcgttccgtgacatggaaagggccagcgtagcgtggacctaactttcctttgggtctgctgatcaaagactgcctggcgattgagcaagcggagccaaatccagtcatccacagagaattccagatcccggtgacgtccatcataaaaacgtcgagcgtgcttctgtgcttgaagtaatttatctctgacttcagcaagaaataagtcacactcttggagcatgtcatcaactgcctgtctggatgcggtgcctggctggtaaggaagcagggctggcggttctctgccatataccactctgaatggggtggtttgcaaggctgaatggtaagaggtgttgtaacagtattccgcccaaggtagcaactcaacccatgctcgagggcgatcccctgtaaggcatctgagatacatggcaatagttttattgaccactttggactgaccatctgtctctggatgaaaagctgtgctcattcaaagttttactccagata

SEQ ID NO: 197435 - DNA, 308 bp, Zea Mays
ctgccacaagggatcagtgggacgggcaggagcagagccatcgatgtgtgctagcaaatcgaatttgccgcacatggtgctaaagaacgatgattggttgaagttggaattcgttaggttgagggtcataggaatgtgtgtacgggtgaggaagacgggcccatagttcttgctagagcctccattcgttgcgggcgcgccgagcaggggagaggtcgcaaccgtggtcgaagaatgggtagaggtgattcacgtggctggaaggagttgcaaggtatgaagtatatgaatatgcagggggcgttgag

SEQ ID NO: 197436 - DNA, 336 bp, Zea Mays
tcgtctgcgatatagttcccggcgcatccaatctctgcaaatatattgatataaataagttagcaaagacaagataaatacaatgtacgagcaaaacaacacatctttttctcactcacttgcactcagatgactatcaagattccccaacatctgtttctcggctctagccgcctccatttcccttgcctcctgtgctctcatttgccgccttcaatcttctccgctcaacatgcatcgggctgtcataaccccgtgattccgtgaacctacgcatctatctacaacgcatcttctgtcccataagtctcttcgaccttcttgtatgcatcacct

SEQ ID NO: 197437 - DNA, 318 bp, Zea Mays
ctcttttagcaagtcggtctgcagtccagcatttgttctgagctactagccacaggaagaaccgacacttagaaggagcccaagatctccatatctgtttatggtgaacaaaggcacatgaaccatagaagagaccattgtatgcagttcttgctgagtaaagaccatcacgagcaatataaaaaatgtgtctatcctcagtatcaggttgcagcaccaaatcagatagagcatcccagagatgcagctaatcaatcagggctcccacagtcagagctcccttaatatcaccaatccaccttctatttaacagagctt

SEQ ID NO: 197438 - DNA, 338 bp, Zea Mays
gacgtatcgaaactccggcggccagatcttgagaagacaaataccgccagctctgtcatgcttatcactcgacatctcctcaccatactcttctatagaagaagcggtaaggaaggcctcaaaacatggaatttttgcatcgctgaatatgaacggaggcgagtaggcgtcaggcatgcgaggtagccgcatgcgctgcctcgacaaggggtcgcacacggctagctccggcaacaagcccaatgccctgaatgtaaaccccagaggtgcgcacttgaggagggcacgatcgtcacggaggtcacaaatctcccaaccaaggccagatgcagtgcgac

SEQ ID NO: 197439 - DNA, 357 bp, Zea Mays
gtggtgggtgcgtcctggagcttgccagttggaggctcctgtccgttggagcatgtgtcattgaagcttaaaaggttagctcgcacattgcagtcctgggggcataaagaagtgggtaatgtaaggttgcagctggggcttgtcagagaagtgttgcataggctggaaatggcacaggatatcagaattttgtccagtggggaagtttggttgctaaatttgttaaaacagcggtgtcttagcctcgcgtctcttgaaaggactgttgctcggttgagatcacggatccactatctaaaggagggtgatgccaacactaagttctttcattcgcaggcatgttatcgaaagaaaaag

SEQ ID NO: 197440 - DNA, 450 bp, Zea Mays
cacccatgtttgtgtgtcacttgctgttgggaagaccttggcaatatgaccgatattctcagcattgtggaagaacaaatcagtacacactagatctaaaagggagaaagtttgtattcaagactatgacccctcaacaaatcatggttgaacacttacaaaagaaaactgaaattagtgcagcaattagaggaggagaagagcaaaagaaattgagtgccatccacaattcggtgagtgagtgctacaagccaaattcaagagataaaaagaaagaagagggagaacatctagttacgctagccacaaaatctgagctgagagaagtgaggaacaacccttatcaagtgctatttgtacttgtgagcaaagatgttttgatttctcctaacgacataacatctcttcctagtgttgtgggtgatcttttgcaggactttgaatatgtgt

SEQ ID NO: 197441 - DNA, 431 bp, Zea Mays
gattgttcgaggccgtcacaaaacagagaaatctgagcggcacggagaactgcagttcgttgtggccaaccttcaatgcaaagatcgccacttatctggcccctttgctctgcaaattggctttaccgtctgtttctttactgacactatctgtctttcatctgtggcatgtagtgttcggttgtcatgcgatatgcgctacatactgtacatatgtattatgtagttcatgttagtttccgtagcttttaactggagacacgatacgaagaagataaaaaccaaaacaaaatggataacatataagatatgataatgtggcagcttgttcgaggccgtcacaaaacagagaaatctgagcggcacggagaactgcagtttcgttgtggccaaccttcaatgcaaagattgccacttatctggcccctttg

SEQ ID NO: 197442 - DNA, 425 bp, Zea Mays
tccagtgttgcttatgagatgaagcagattgtgtacaatgtcttcagacaccaaggtctgcctattatgatcaagtggaatggactcaaaacgtgcacccgatgccacaacatttgcaagaatggtcgctgagacctccttcaatctcattggaagctgattactgccaacagtaaagaggtctgtgatgagaggcggaagaataccggcttcaattaatatctttgcactaacatcataagatgaaatttggttcaatgccttcaaagctgcttctctggcctctctattcccttttttcatgatattgactagtgtggagccagccttttgtgccacaagtaccttaacatcattgcttagaacaagctctccaaggtatgcagccataggtaattgcatgccaggtgaacctgcaaacagca

SEQ ID NO: 197443 - DNA, 320 bp, Zea Mays
gtcattcagacattcgaccagcgtaatcttcagctctatttattactgctatatcagggagtaggcaccagcccaccgactggtgttagtgtgttacgggcttacggccgtgttcatcttgctgctcgcctgctctccccgttccgtcctgcgaggaggagatccgcattccggagggaaacggcgaagggtctcactcgatttatactcgtgccgtactgctgctgctatcttctctatccccattactcgtgcaatggcgaggaggccgtagtgctaagtggagcagcggcaggcagcgcagcgcaggccaacgcgga

SEQ ID NO: 197444 - DNA, 644 bp, Zea Mays
ctcgtgggagctcttccgtgagaaggttggcgaccacctgatgagcgctagccctgagatccggcaccaagcgcaggcgctggccatgaagtgcggcgggctgcccctcgctatcatcactgttggccgggcgatggccagcaagcgcactgcaaaagagtggaagcacgccatcactgtgctaaagattgccccatggcagctccttggcatggagtttgatgttcttgagcctctcaagaagagttatgataacctgcccagtgacaagttaaggctctgcctgctatattgctcattgttcccagaggagttctctatttccaaggattggatcataggctactgcatcggtgaaggtttcatagacgacttgtatactgagatggatgaaatatacaacaaggggcatgaccttcttggtgatctcaagattgcctctttgctggagaaaggtgaagatgaggatcatatcaagatgcaccctatggttcgtgccatggctctgtggattgcatcagatttcggcaccaaggagaccaaatggcttgtccgtgctggagttgggctgaaggaggcaccaggcgcagagaaatggaacgatgctgagcggatttctttcatgcggaacaacattcttgagt

SEQ ID NO: 197445 - DNA, 581 bp, Zea Mays
ggaaaattgcgccttttcctttctttttgcaagctgtgtcccactccatactggcttcgattggattggattggatagatagctcgtccgtggcgtggcacagtgtagcattgatagcccagcggagtgatgcttcgctgctgaagcaatcgcaggtttggcggagctaaggaaagagctgtagcgagcacgatgttagccttttgaattggcctggccctgttccatgagctggcgtgtgtgagaatggcgtgagtgtgagctgtgggcacgaggggaaaggtgagaccccccttggtgctggactgctggtgctgtggggggagcggcagtgcatgagatgcatgtgatgcggcattaaattttagtgtagccacgattgagatgaatctataggtgaagcgaatgaagtgactaatgtggtttcatcagactcaggaatttgttagtattcgtccattgccaaagctgactggtggatgtttaatctagtcgtagcaatagatttccaaccaatgtgtgtaattattgtctcgagctaaggtggcaagaaacttatggcgtattaagaattgtccaag

SEQ ID NO: 197446 - DNA, 303 bp, Zea Mays
aaggagatgacctagatcctggcctggacttttctaggctccgcgatctcatggccatgcgacacttcctgtccgcatgcgactactacctctccgacaactccaacgactacatctctgatgacaagggttacgacccatcttgggaatgcttccacaccgagctcgaggaacacgaaggagagaaccagcttggcatgcctagggacgacaacaccccagcaccaacaccacacatcgagggcctgagggaacgagatgtagtccggacccctgcgggaagtcagggcgcgcaactcgaac

SEQ ID NO: 197447 - DNA, 1012 bp, Zea Mays
tgaacctcaactcacagctggcatccataatttggaacatttgcaacacagaaaacaaaatgatatcagttgaaagaataatgcagtactcgaggatccctagtgaggctcctctcatagttgatcactaccgccctccaaacagctggccagatgctggaactatcaatataagatcattggaggtatgtgtaatatgatactgcctgaccaactataggtgtaacaatcaagtgtgcatgtatacagttttagtcagcaaacccaaaaagtttatcgcggagactaatgtctgaaattgaaccatcgtttgctaaatcaaaggttgccaagcagaattcatctcaggaaactgccgacttaatgacattttgcagtatattttactaaagaggataataagcccatattttaaatatgagagataaataaagagcataatgttcacgctttctcatgcacaaaatatagttattcgattacataaacaaaagagggagtgccacagattgtaaaaatgaagaaatataaggcaagagtggtgatatagatactgaaagcatgcagtattgcagttaactgtcttttctctatgatgagacatgacacataagagtggacgtttttcagaaggaaacttctgatttcactaacccatatatgcactttctcaattgcagccatgtaatgttgtttgcttttataggttcgatatgcagagcatctcccatcagttttgagaaacatatcatgcacaattccaggaaggaagaaggtggggattgtaggacgtactggtagcggaaagtcaacttttatccaagcacttttcaggatcattgaaccaaggggaggaacgatccaaatcgacaatgttgacatcttgaaaatagggctgcatgatttaagaggaagactaagcatcattccacaggatccaacgatgtttgagggaacagttagagggaatctggatcccctgaatgagtaccctgatcatcgtgtgtgggag

SEQ ID NO: 197448 - DNA, 659 bp, Zea Mays
aagcgctcaaactaggcacgaggagcctgtttgaggccatagagagaacgacgaagtcgacatatgtgaccatcaggaacaaggtaaccaggcgaaggatgcatgtagacttcctcacacaactcaccatgaaggaaggcattcttcacatcaagttgtgagatagcgcaccgacgaacagaggcaacatcaacaagagtatgaacagtggtacaatgggcaacaggagcaaaggtctactcatagtcatgcccatactcctgttgaaaaccatgtgcaacaaatcacgctttgtagcactcaattgagccatcagagcgggtcttaatcttatagacccacttgcgcgtgataggagaagcagagggaagaagtgggacaagatcccaagtgctagtgcgttcaagagcagcaatctcctcggccatagctaattgccactcaggacgagaaagcgcatcacggtaggaagtaggcttaaaaagaatagaagcagaagcaacaaaaccaagacgagtcggacgacaaagcgtacgtcgatcgcgaaggtcatatcgtgaaggaggcacaccaagcaaaggagacgagctagatgatgatggaggggatggtggaggacgtggatgtcgagtgtagtggaaaagaattggaggacgtga

SEQ ID NO: 197449 - DNA, 1006 bp, Zea Mays
cgacagtggatgtaacattgcatcattaccgaaggcgaatggatctgcgcggggaccccgatcaaattcagggtcaatattgaagtcatatccaaacattcatcgatcacaagctagttctgatgattgggaacatccgtctggtacaaataagttaatttctgctggtggatctggcattcataaacgtacaaaatcaacacattcattatctcctccgatccaatggggtgggcagaggcctcagaagatatcccgttcagcaaggaagtcaaatttagtccctataatcactactgatagtgcactggtaccaggttcgctggacagtcctgtcaatgaagattgtgcaggtttaccgaggcgtgcatctgtaaatagccttcaacaaacaaaacgaggagatcatgggctctcaactggacctgaaggcaatgagcctgtagttgctgagaaaaagctaagggacaagggcaaaagggctggtgaactggatgatgggcatggctctggttttcagaagattgctatgcttgggcatccttccaaaaggaataagttgcctgctgatgaggatattggagatgctttaaggagacaagcaagagttgtcccgggttttactctgaccaggcctgggactcctgtatccattgacaagcttgaaaatgctccgattacaaaacaaagaagtgtgaggacagtctcagagagaactgagaggtaacttgtttccttagctgaaaagcagttttatgtggctaaatactctaaccctgaattctccctgtagtaaatctgggagaccactgatgaagaaaatatctgagcgcaaaagtaatgcacggcctaggcatacaagtagcagtgtgcagtcagactctcctggtatagcgtctcttggtatcaatcagagtgctttatgcaacttgaaacagttccttttgaaccatacccttgaacttgtgctgttcacttttcagtgcaatctgaagatgatcatgag

SEQ ID NO: 197450 - DNA, 378 bp, Zea Mays
tgatacacggacagttgcaacaccaatggatattcatttaaaacttcgtccgcaggatgggacacctctagcagacccaactcgatatcgtcatattgtgggtagtcttgtttatctcaccatcaccagacctgatattgctcatgttgttcatatgttgagccaatttgtatccacaccaacctcagttcattatggtcatttgcttcgtgtgcttcgatatttacgcgggacacgatctagatgtttactctatgcttctgatagtccacttcagctacatgcgtattctgatgccacttgggcaagtgaccttgttgaccgttgttctactacaggttactgtattcttcttggatcatctccttttgcctggaa

SEQ ID NO: 197451 - DNA, 458 bp, Zea Mays
gggttaatttgaaactacgtacgtgcccgtggtatgctacagaaaaattgatgagactccaacgaccctacagatgggaaacacagtataaatagagaaacacaataagtcagacaaggaaacatcaatcatacatgcaacatatcctaattaaggaatataatcatgcatgccctaaaaaggaaacagagaataaaaaaagaaacacaataatgaggcaaagggaatgtgcatgcacccgatcctaattaaggaatcgtcaatcatgcatgcaacacatcctaattaaggaatataataatcatggatgccctagaaaaggaaacataaaataaaaaaggaaccacaataatcaggcaagggaacgtgcatgcaccagatcctaattattaataaggaatatataataatgcaagggaacgtcaggagcaaattgaaggcagatatctagtgctcaa

SEQ ID NO: 197452 - DNA, 457 bp, Zea Mays
attttgtttattcatgtgtcttctcccattttaaatgttccagagaaagcatgacaatttgatgaaggagaagggagagattgctaaagaaaatcaaagccttgtaaagcagatggaggatcttaaatcaagtacttccacgctgttccttgttccgttgcatcttattctttcccacttgagcaaacttttgaatagtttcatactagttgctgcaaatctaataatatactttagcagctcagaagacaacatctgaaacaacacttgagcaggctattaaagaaaaggatttcaggatacaggttagcacgttttgcttaaatggtacacaaaaatattcttgagcctttaacataaacatatattaacagacattagaaagaactctggaaaaggaaagagatgataacaagaaagagaaggcaaagagtaggaggaatgagaacacaatctt

SEQ ID NO: 197453 - DNA, 551 bp, Zea Mays
cagagatatatggtatatagcctgagacaccatacatacatgtatataatgaataaatacatatatattacgccgtaccattattgttattctttagtttgatttgattgagtgaagctcttcagtagattcagatgcaatgaactgcggtgtggtgtactggtatgacctcgtgacattgaaaaggcggcgggcacgaggacgaccatgaccaacacaacatcgtggtgcacatgctagacaacaagcgtggcatgagtcggacgtaggtggctagaccgaggtcgtcacgggagcctctgggcacttgacctggttcgctttgacgacagacgacgctggcaataagttgtcatgtcaaggccatcggagtagctccaatatgacatggtgttcggtttgggcaactttaggtgcactctaccctatgactccgcaatttctagccacctcgccgtggtcgtaactcggatgtggctagacctttaagtttaattccgcaattatttcggtcagccaacgttaagttttagaaaagactattcgccccc

SEQ ID NO: 197454 - DNA, 474 bp, Zea Mays
gatctatcgctacagtgctacttgagggacaaaataatgatgaaggaaaaaagttcaaaaatcctacgaggaggacaacacacaaatctcatgcccttaatgcagttgaagaggtcagcatggatcacattgaagttggtgaagaaggcttgaaattgaggaagcgcagtaggtttttgctggaaatatcatcttcagctaatgtttcctggaagcatcagaatgcacagatctctaatgaaaaagataacacagaaggatcgcagcaggcatcaaattgcacaacttcaaagagaaggtcttcaaagaagagacgaacaactgctccagaagaagtgatgcctttcaaggtggcaaatgatgacatagttatcatggaagaaacaaaggacacacttgaatataataatgagtctagtagtaaagttcaagaaatttgtcaggttaatgctgcaagagaagagttctcttcag

SEQ ID NO: 197455 - DNA, 318 bp, Zea Mays
atctcagtccaaatatatacaagatcttcttgatcgctctggacttactgatacacgcacagttgcgacaccaatggatattcatttacaacttcgtccgaaggatggtacaccactagcagacccaattcgatatcgccatattgtgggtagccttgtgtatctcaccatcaccagacctgatattgctcatgctgttcatattttgagccaatttgtatccacaccgacctcaattcattatggtcatttgcttcgtgtgcttagatacttacgcgggacaagatcaagatgtttactctatgcctctgatagccc

SEQ ID NO: 197456 - DNA, 273 bp, Zea Mays
agtgaagcatttgatgcatccgcttcaattagtctttgctgattcacaaactcctccattttgcatgtatcagaagcagatgcagaagatcttgcaagaatttcaggcgccgctgatgttaatactgaattctccataagggattccttgcattcagaccttggagttgggctaggacattcacgctctatatctttagtatcagaagatacagcgaaagtgcgacactgattaagtgaagcatttggtgcatctgcttcaattggtctttgc

SEQ ID NO: 197457 - DNA, 692 bp, Zea Mays
tagctggctatttgcatcttccctctgccctcaagacccttgaataccttatccgcagatacctgtatgaatttagctcagctaattttgccgatggccctacgagctctagcttattctcttgtttctggtgggaaccttcatgtagggtgcatgtatacaattcggatgagttgctgctgagcgcactgccataccatgatacacatgcgtttgttcggatcgtgcagttggtcaacttagggtgagtgtggctctggtctggatagatacttattttctccatttgtcttcaatatcaacttgtgctggttgatgtgctttcaggaatagtaactgggcatttcttggcggtgtcaagtcctcaggtgcaccgccacccaggagtgttctagtgcaacagtgcatccgtgataaggctgtgctggagaccctatgcaactatgtaacgccgaaattaataatccttttaacagtaggattctgtcatgatttttgatatttttttgttgataattcattttactttcaggctacaccaacaaaggaattcagtcactcgaagacagtcgtctgcttttgcactgctgtgattgttgagtgtttgggtgctgtccctaagcttgacacagatgtagtgcagagggtgttgggatttgtgtttgactctcttaatcctgcagtgacgcgag

SEQ ID NO: 197458 - DNA, 476 bp, Zea Mays
ccaagcctattagcatacacgaatgtctcttctttgtcactccatctcggttccaggtcttctctttcgattccgactctttgtcacggtcactcgcgtctctagctcttgaagcatgcacatacaagcaggggtgaagcaaggtagaaagtggtggatgcatatgtacccatgaaaattttaaaagtagtgttttggatcaaattgtgacaacctacaagtttttagtatgcatccttaaggtatatgcacccacatctgattcactctagcttcgccactacctacaggtcgccctctctctagctgtctccactctccgacaagggtgagggcgaggcaactctcatgtcatgcacattgcatggtgcaccccactggtcggcgcggctgcccctgtgcagctgctcacgactttggcgcttgcatcttgcctgtgccttgtatggcccacgactttgcgaccgttcgcggcc

SEQ ID NO: 197459 - DNA, 459 bp, Zea Mays
cgcggagagagtcggcgagagacttgacgtgctggcagtagtctgtgatggaggaatcgtcctgaacaatggtgtgaaactcgttgctgaggtggatggcgcgagattcttggttggtgtagagatcgttgatggaagtgttgaggtcgcaggccatctgatgattgcccatggcaagatcgagaacgatgttgtcgacggacatctagagccagctcttgatggcatagtctgtgtggtcccagattggatcatcagggcacgctagcacggacacgtcgagaaacaaaagaagaccaaacttgcccgccatggctcggaagaagatgttccaacgatggaaattagggcgtgcgatctgcaacgtcattgaggcatgagtcttcatgttgattgtacataagggattgaggatggctgcggtggtggtggacagcagctcgacggaggaggaagcac

SEQ ID NO: 197460 - DNA, 769 bp, Zea Mays
atgcactttctacccttttctctctgtacattcgtgatcttggccctgctgttgaatttggagatgcacactggcttggaagacagggtattgcattagcgctccactctaccgctgatgttttggccgctaaagatcttcctgttgtcatgacatttctcatctcacgtgccttggtaagtaatttgtttttatggatcttatcattgcagatttgcagtgccacttacatagttacatttaacttttaatgcttctcatgacgaatctacaggctgatccaaatgttgatgttcgtggtagaatgattaatgctgggatccttattattgataggcatggaaaggaaaatgttcctttgctatttcctatttttgagagctacttgaataaaagggcaagtactactttcctattaataattgtactagcattattcaatatactacgttcctattagtaactttactaatatattattattgctccttgttttttatttgctatgcaatccatatgtaacaggcatcagacgaggaaacatatgatcttgtgagggaaggtgttgttattttcactggtgctctggccaaacatctatcaaaggtgtagatggatactgaactatcttttgtttacaagatacattcacagtactaaatatagcatttgtaacaggatgatcccaaagttcatagtgtcattgagaagttgttagatgtccttaacaccccatcggaggcagttcaacgtgctgtctcagattgtt

SEQ ID NO: 197461 - DNA, 547 bp, Zea Mays
cagcagtctgcctccttcagatgagaatgagtttcatggtgaggaggatggagatgtccggggtccgtccaatccccggatccgacagccgtgccctttgcagcgttagcctatccaccatcgcctcggttcacatcagagagtgggcagagaacggtctgtagctatgcatggaaatatgatggaggcgccggttctagctctggtagatggtgctgctgtcagtgttggtgatgggctgctgacctcacctggaccttcctcgcctcagcacagaagtttggctgagccgctggagaaggctgggttgagctcgcccctttctgccacttaagtgccatgcatgacaacctcgaagattaacttagctgggccgtctgtgtcggctgctgtagggtcgctggattcagtcctccctatttcgcccagcgacacagggctgttgctgggttgctggaacaggctggtgcgaattcgccccatcctggtggttttgattttacactcgaggcgtcttctgtcagaatgggggcgttgtcggttgctg

SEQ ID NO: 197462 - DNA, 480 bp, Zea Mays
tatagaggtgataagggtaagggtgataattatgaaaagcataaccctggacagagttaaggcaagactcgcaaagtggcgaagtggagaaaacaatcaaggatcagataagtgaggttccgacagaagagttgaagtaaaaaaatcattaccgaaggaagttacaaggaattaacgagatcaccaaggatgtgcaaaataaaatggttgttcatggatcattaataaacaagggtggtcaagggcaggttaactgaaatgtcttaaatagacattggggtatgaagataatcatccataaaaaatatgagaatatgcaagactccaaggacatgagtacaacaagactaaggaaatgaaaattgccaaaagataacgacctaacaacagaagaggaaagggtctcaaaagatacgaagatcatggatatataaactgaaatgtttaagtatgcagtagaaattctgatgtaagcatttg

SEQ ID NO: 197463 - DNA, 426 bp, Zea Mays
ccccccagccggcggtcacctccttcttgaattggtgggaggaggtttcagaggtggtctcaggtgtcaccagaaaaggtctaaactcccttatcatcctgggtgcttggactatttggatccatcggaacaaatgtgtcttcgatggattgtctccatgcctcacctatatccttgcttgggcagatgaggagagaagtcgttgggaggcagctggggcgaagggcctatgttctctggctgcctctgcagctgctccctagggtggtgtgttgttttttcctttcacaggatgagttcttttttgtatgctattttctggcccccgtgaggaggcctgttgatgtatggtctactttagaccactttatcctatcttcttaatttataaaggggcgcagttctcctgcgcgttttcaaaaagaa

SEQ ID NO: 197464 - DNA, 1018 bp, Zea Mays
tacagtgggttctcaagtttgggttgaggatgctgaggtggcttggattgatgggttggtggaggaggtacaaggagatgaattaattataaactgcacttctgggaagaaggtcagttattagttctgtgatatgtttctctttatgtattgttttggccaccgtcgggtggttgttttactcttgtaccagtctattttggaccttatcttcttaatataaaggtgcatagctctcctgcgctttcgagaaaaaatatgtttctctttttattttctgccaaaattgacattttgttagtttatttggtcctgatggtttgtcactttctattcatgctttaccgaggctgttgcattacttttctcttaaaatttcttttttatgcctcaggttaattgtctgtatgtctcagtttgttaattcacgagtgccaatgtgccagaatatactactatagcttatactagtaaattaatttattgaagtagatggataatgataaataaaaataaataaacatattttgtttacaggttactgcaaatgtctcaagtgtgtatcctaaggatgcagaagcgaagcgctgtggcgttgaggatatgacgaggctagcttatcttaatgaaccaggagttttacagaacttaaagtctagatatggaatgaatgaaatatatgtaagttgagttattcaacatatcaacacttttattatttttactcatgcatcattgctgttcttatgtttattggtgttaaggtgtttactgtttctagtttctatattagaggagtttggaattctgtaacactacatatgtttgtattccataatatgctctagtgcacagaacaaccttgtggcctgatctaaccacttaatgatgtttgtcctttccagacttatactggcaacattttaatagctgttaatccatttcaaagacttccccacctttataacaatcacatgatgggaatctataaaggcgcagaatttggcgagctgagccc

SEQ ID NO: 197465 - DNA, 2876 bp, Zea Mays
cgaactgttgaagagcaagtcagggcttcagcagaacacaaattaggtgttgctaatcagagtataactgctggtttttttgacaataacacaaggtaaatccttctattgtctagaataatttagcacccataggtcccatcttcaccctcactaatttatacaatggagtgccatttcagtgctgaagatcgaagagagtatcttgaatcactcctacgtgagtctaaaaaggaagaagcagctccagtgttagatgatgatgctctgaatgacattctagctcggaggtaagacctgattgctcgagatcatgaatgtctgtatttacataacattgcttcacttgctgtactgcagcgaagctgagattgacatattcgaatctattgacaagcaaaggagagaagaagaaatggtatgctgaatttatgcaagttgctttcagctaaatcttctacgttttccatcttgtaatattgttgtgtcttcacaggcagcttggcaaaaggtggttcaggatggttcaactagtgggctagaccctggagtattgccttctcgtcttgtaactgatgatgatctgaagcccttctgccatgctatgaaactttatgagccatcaaatgtgaaaacagtaaatgtgaatgtgaggaagaagggtgaacttgggggccttgatacacagcactatggaaggggtaaacgagcccgtgaggtcagttgcacagtgtcttttaatgtatcttccaattgtagtctaatgaactttgctaattcgtgaatacccatataggttcgctcttatgaagaccaatggactgaagaagaatttgaaaaactttgtcaagctgattctcctgaatcatcccaacctggtggcatgtcgaaggatttggatattcttaataaaggcattaagactgaaattcttgtggagagttcaaaagaaccagaacaaacgaagatggaggcatccccaactgtcggtgactctccaccagccaaacggcggagaggtagacctaaaaggtcagatgtttttgtatctcctactgctggtctgactgatgctgtcaaacaagacacaggaaccacacaggacggtagttctgctacaccagcaagtaccatccactctgatgcaccagctactgcaatcaattcagctgtttcagatgttaatatacattctattccaccagctgataccaagaaacaagagttcagtactgataccaaggtttccagttctgtttctgttttggaaggatctgtgccgaatgaaattggtacaccattacagagtgttcataatgtagcagtttctgcaccaccgcatcaatcagctaggggcaggaaatgccaagcaggagaaacacctcgtaggcgaggccgaaaaccaaaatctctatcttcatctggtgtagatgatgttagtcttaacccaaccttttcaactgttagtggtgtagcagacactagttatgttccttcatattctcaggtctcatcacaaggcactgctgtggcactggcaggaatccagaaggattttgtgacagttaagttggatacattgttaccagatagtggtaagggtgctcctcctgttaatgagggagataaaggtgctactgttacaacacctgtggcaaaagatatatgtgctgggactgtgacaacatcagacaacactgtcaccctgacaccaaatactcttaaggaaaacattggattagttcaagtggcatctgcaccttctatgctcgtggcttctgaagaactaatgaaaatagcacatgttgcggtggccgataagcctgttgagaagcaaactgcttcacgtcgccgcagaaagaaaacatctagtagcgaggatactggagtcagcactagacaaagatcagctatgaaaagatcttactacaacacctctgttgccgttgatgatattggttctgctgtgatcccaaatgaaaaatcaggaataacgaaggaaagagatgtcagttcaattcaaagtacatccaatgaactaccaaatattaactcaccattgtatgagaagtctggatatgattctcaaccaagcacacctatagctgtccccatcaatgaagacactcttcctagtggttttgacacctgtactaattctatgataactcttgccacatctgccaactctgctgaagatgataaaccagttgatttgcaccttaatgcacctgtttctgttgattcccaaaaccaagaacaacacatgacagggaaggaccatttggcagtgtgttctagaatctttgctactcagttacagacggacactgcaaatcctgctattgatcataaaccaggaactgcccagtttgaaccatctgcttccttgccccagaattcaggcaaggatgctactgcactaccttctgaggttgacagtgctgctccaaatagggcatcaagcaggaggaggaaagggtcaactcgagaaccacgcaccagaagtaattctgcatcagctgcaagtgaacgtcgtgcccgacttactggattgaagcaggcagaggacataaagaagttagagatgtcagcaacgccgaccacaacagtgtgtatttcatcggtagagcaacagggagctgcttctttaagtgcgaagattaccaatgcttctgtttctgaaggacagaagaatcctggaaattatatgccttctgccatttcaattcccgtggggagccatgttctgggcctgggcgcaacaagtattgaagaaacaactgccactatgataactcaggctcctgcagtttcaaaatcagaacgaagaaaacttccaggaggcagtcaacaaggtattatttattctactc

SEQ ID NO: 197466 - DNA, 462 bp, Zea Mays
gttgcgctggaacgagtagcgtagctcagggtcgatcaactcctcgtcgaagtcattgatggcgagctcgagatcctggcggcgaccgtggggcacactcatggtggcagtctcaccaaggttgtggccttgcaggtgacgctcaccttcccctcgaggctcggccaggcagcctcgtcgtcctccctcgctctcctcctccaccacccacctcagagttctgcaagaatcaaaattaggatcggactactgcatctgataatactgaattcaaacaagaaatctcacatgtccagcccaaaacgctttctccttccccaatcataatcaatagttcaacaccaactcccacgcaaatcaacacgaaccccaacctccatctcgttccccatcccaaatcaacaccaatcccccatatttgttccactccttttgagagtgcaagggctttgttcctaggct

SEQ ID NO: 197467 - DNA, 277 bp, Zea Mays
ggcattgttcttgcatcaagtggttaatagttgtgttagctattagaggccgtaacaattgattgatagtttggttaacttgaaatctggatgacagactgatttttagtctagatgtacacatctcaagcaccaaaatccgtcccagcactactgttaagcaaccgtttgtttttggcagtccatgagtagccctgctaatgggttgggtaataactggagttttttcgggttgggttgtgctgcgccctgcccgctctccatcgtgcccttcacc

SEQ ID NO: 197468 - DNA, 814 bp, Zea Mays
ctaaaaccagaagacaaactgaagctttcctcctagaaaatgttaataaaagctatgaaccaagctgaagctttcctctagaaagaaccacacctattggagagatctgggttgggctacggctgggctatggctgctgggtcgagaggacgacctccacgatagggacgacgtctccacggggccgcctacaggtatcgtgtcgcctccttgcgagcgtcgcgccgccacctccctgcgagtaccacacctccctgcgagcagcgcgacagtgtctgagagattgagatgtagccctttcacatgatccacgggcttatgccctttcgtttgatccagtagcacatttcggctttgtttgatgattgattcatgtcggccgtttagtggagtgtcttgatccaactctgccctaattagtggagaacccaaaaaagctcaaatttgttagcccacaagtttggagcccctttctgcccatgagtttatacggcccattcccaggcctaattatgggtcataaatacagttcattatgaatcctcaacgatcaaatgcctatatcgcaatcttctgtgtactttttgctactatactgtatgtcagctggctttggaatcaataccaagctaccatctcgttcaaatgtggcctcgctactgaaattgaatgaatcgtctgtctcccatttttctttacgccgactaattctgcacgatggcttgtttttgtcaacaagttcaaagagcgtttggttggtgctaagcctgtctgatgacccgtatctactctcggttgaagatgaataggtctg

SEQ ID NO: 197469 - DNA, 509 bp, Zea Mays
cttccacattatacgtttcatacagttttgtatctattgttaatttcttattatgtcttacactatcaaaacaatgattaggcgcaagaaacaaatgttggtgactatgtcctgccaattagaggattttggcattcttgtgtcatcttgccttcttgatatttatttatttcttgatatttcattcttgtacctgtaggtttgggggaaaattgtgtttgtgagacatgcacggtgttcagcctcctacaccctaagtcgcatcgagggaaacaaccatgtcagacagtcaccacgatcgacgctgacgtgccactttgcttccctggacccttctcagatgctgctgcttcccacacccggacagcgagccgtatgcggaggacaacgagggcccatgcccattcttggtccttgcttctcttctgcctccatcccatactactccagctccaccggcaacgcttcaacctcctccgagctcgacaatgttgcaaagaagcgcggac

SEQ ID NO: 197470 - DNA, 312 bp, Zea Mays
gatggactacctgctgaatttgtacttgggagaggcaggaaacctccaagcaaaaaaatgatggagtctatgccatacactcaatctttgttagctggctgcaaagcagcaggttaccatgccaaggctgcacctcccaccgtcacaatgcctcgactaaaagtaagactttttgtagagacacacttttattcaagtgttccacaatactaactgtaattttttcttaggctatggtgtctggtgcaattggaggttttctagatgtagcatttaatttcaatactcaagccttcttagaggacaatcttc

SEQ ID NO: 197471 - DNA, 861 bp, Zea Mays
ccacaaatcatatgtccggatccagggctgttttcaccgatctggataccagagtgctgggtactgtcaggttcgatgacaacttggtggctcagattgagggacgaggaaccatcaagtttatgcgcaagaatggcgagacccggtcgtttgttggggcttattttattcctcgcctgacaacagatatcatcagtattgggcaacttgatgaagcaaagtacaagattcatgttgatgatggggtgatgcatattagggaacctgatggaagattactggcaagaatagtgcaggctgaaaacaggttgtacctccttcatttgaagatacaacagtctgtgtgcctagcagtgcgtgggcgcgaagatgaagtagcctggcggtggcatgagaggtttggtcatgttaatatggctgcactgcggaaactggagaaggaagaactggtccaaggcttgcccaagctcggacaggttgaaagggtgtgtgaggcatgccaggcaggcaaacagaaacacacctcttttccagcgcaggcagaataccgggcaaaacaacgcttggagttggtacatggtgatctgtgtggtcctattgccccaatgacaccaagaggtaacaaatatttcttgctgttggtggatgatttgagtagatatatgtggatggctgcaatctcgtcgaaagaccaagctattgatgcagtgaaaagaattcagatgcaagctgaaagggaatctggactcaagttgaagacacttcgaactgatcgaggtggggagttcacctcgggtgaatttgcggagtattgtatggccagtggtattcaccgacaacacactgcgccgtacagtcctc

SEQ ID NO: 197472 - DNA, 450 bp, Zea Mays
ccagacgcttcgcgaggaagcagtcacccgacggacctgtcgtttgcaaaggaggatccctggacaaacaacgtaaagcagcgggaactgttgctggacgaggttgtaggtagcataacaggaggagctctgagaacctcctcctccgtccttggtatctccctcgtcagcaatacgaaagggaagagaagcgagagggaagggaaggggcacaaccgagacagcctcaggtccggccgtccgtcgccgtccaacgcaaagggtgaaaggaagaacaaaacaaagctcagacagaaggcagccaacatctctgctccttcaggaggtctacagcttccagcgaaaacaacgcctcccagcagtgggaacggcaaggaggagagcgcagcagcagcagcagctgctgctgccaggcatggtggtgatccggcggcgaatgcttcgaatgac

SEQ ID NO: 197473 - DNA, 598 bp, Zea Mays
gaagaagaggtgaattgcttacaggacttgctgccatgtaatatttcagattttccctgtaagtacctcggtttgcctttgtctgccaagaaactcacaagggaccaggttcaggccattgtggatagagtggccagccttctgccaggatggaaagctgagctcatgaccagggctggtagagttattcatgtgcagttcgtcatgacggcaaagatgatttatgcagctttggcacttgaccttcctgtatgggccatcaaagcaatcgataaactgaggaagggcttcctctggaggggcaggaaagagttctgtggtggtcattgcctcctggcttggcctaaggttacccgtcccaaggagctgggtggtcttgggattagtgagttaaagagcctctattgggctctgagagctcgttggccatggctggagaaaacagatcccagtaggccttgggcggacttccccactcacgtttgtaaggtggtacaaaatctgattgttgtagccgttactactaagctcggtgatggagccaatacccttttttggaaggacagatggttggatgggagatgtattagggacatag

SEQ ID NO: 197474 - DNA, 319 bp, Zea Mays
tgcacctcggagttcatcaagtagctcgtccaccaccgaaattggaaatttgtccttgattgtttttgcattcaattcacggtaatcaatgcaaaacctccatattttatctgccttcttgaccaatagtacatgtgacgagaatgccgatgtgcactctcgaatgatgccttgtgccaacatctgatcgcactgacgctcaatctcgtctttaagcagttgagggtatcggtagggtcgtacaaccactggttctgtaccagccagcaaccgtatgtgatggtcttggcgacgtgatggtggcagtccctgagggtcc

SEQ ID NO: 197475 - DNA, 416 bp, Zea Mays
gccagaatgcttagcattggtaggtgcacttgaacattgtacctatgatcctggattggccggtggtattgttaagagctttcacgtgatcctacaacttgcaactgaacaaactctagcttctttcaagtcaattgatgtgctcactagagtcctgaaggttgcatgccttcaagcacaagaaataaggaagctgtcccaagatgacttaaatcaaaatggttctcaatccagaaatgctcagacgacttattcagatgagagaattaagaacacttgtgcatttgtgaaactggctttcaaccttttcaaggagtatgccacaatatctgacattggaaggattacagttttatgcaatgctaattgcatcgagtgtttatttgatttgttccaagaagaatacctcaggaaac

SEQ ID NO: 197476 - DNA, 820 bp, Zea Mays
gtgcgctggaagggacagccggcttctgctgctacttgggaagactgggacgacttcatcgccaggcacccgtcgtttcagctcgaggacgagctgcgagtcgagggggggagagatgtcatgtggggtctctcctatacgcgcaggaggcgcaccagggatgttaggcgtgcggccgagagggctgcagcgcgcccaccggccctgcaacaggaaggccggaattctagtggataagataggcaatagaattagttgaggatccacaaaattaggagggaattctagtggataagataggcactagaattagttgaggatccacaaaattaggaggtttgttgcatgcggcaggctattaaagccttgtactgggcgctgatcaggatattaagaaataacacagctatcttcttcctcctccctaccaattcccaagccttcggaagaggggtaaaacctcaccggagaagacggaccgaggctacaacctgcgtagccgagggcctcctactctagacactaaggcccttgacacccaaccaatagagtcatgatggattgcataatctgtctatccccacctaacatcaaacaaacttttgacatacatcatgtagtctatctcatccatatctatcttaaacatattccccaactacgatgatatacactcaatgagaccaagaccagagaaggacaagctcaacctcgtcaagaaagaagagaagtcaaacttgatctttagaggcattactacccaacaaaaaattctttctcgctataaactttttttaccccaggctattcttgccctaac

SEQ ID NO: 197477 - DNA, 278 bp, Zea Mays
attttcttggggtacattccaaattggttaaagggaagccaattgctgggcagtatcatagcaatccttctttgaacatattgccatatcgaccccactcagttctgcatccgatagggtcagctttggtggatactatgcgaattggttgcatgcattccattgaaaacaagttgatcaacgatatttgtaaggcaagcttcaaaggtgttaaggaccctttacttgacacgtacaccaggaaggaagtcattcgcctacttcgctatacattccca

SEQ ID NO: 197478 - DNA, 395 bp, Zea Mays
gccactaagctcgaattccacagggataggtaaacttgcacctgaggatccaaaaaacctggaccatcttttacagtgcagggagaaagcgcctgcacgaatagtgctccatctcgatgtcagctggtcaacagagtggagggtggggagcatgagcagaaaatgtccatgagccaattgcctcaggattagcgaatcagaattgacttcaagcttttgagcaactgcatctgcgatatcagcgaccggcacaagcacatcactgaccacaaagatagagactgcgttcttcaaatcttcttctgctttgtccatcaaactattccagccgagcacacaagggtgctgaagatgcacagggctgggaacatcctgaggggtctcttcatttccag

SEQ ID NO: 197479 - DNA, 1069 bp, Zea Mays
tggtgagaacggtagcatcaagcagtcatctgacttaagtttggctaattccggaaacaaaattgaaaacattgatgaggagaagcttaagcgccaataccgaaagctagcaataaaatatcatccagacaagaaccctgaaggaagggagaaatttgttgctgtgcaaaaggcttatgagcgattgcaggtgcaccttgtttgtatgactagttgccccatttatgcatgatatcttttcatgccttcttttgttgcttagactgttttacttagttctcccttgtattcattgaaatgagcagcattttattattctatgtgcctattgagtttcttttcttacaaattgttagtagaatatatgcaaactagcgagacccattaaggtatattttcacattgttggctatttacagtgtctatcgtctctatatgcaggctagtatgcagggattgcagggaccacaagtctggaggctgctactcttgctgaaggcacaacgcatcttgtacaagagatatggagatgtcttgggaccattcaaatatgctggttatcctatgttgctaaatgcagttactgtagataaagatgacagcaattttctttcatttgataggacccctcttctgatagctgcttcggagctaatttggttgacgtaagctaacacagacttactttattgggtttatacattttttaaaaactgctcactttgattattttagatgttccccttctttgttatctgatgttcctgttgtaatgttatgttagatgtgcatcatcttcattaaatggagaagaacttataagggatggtggtatccccttgttggcaacacttctttctcgctgtatgtgtgttgttcagccaactacaccagcaaatgaaccagctgcaagaatagtcaccaacataatgcataccttctctgttctcagtcagtttgaatcaggaagagttgagattcttaagtttggtggccttgccgatggcattgtgcattgcacagaacttgagtttgttccctcagctgtggatgctgcgctgctgacagc

SEQ ID NO: 197480 - DNA, 379 bp, Zea Mays
ccgcgaccggaggagtgcctggaagaagatggatgcggtggtcgtacggccgaggtggaggcagcccggccggttcggtgaacaccacctcaaattgctggagcaggcgatccatgagtggctggccgggtgtggacggtatggcacaggaggtcggtgtgcgtgcctggcccctgcgcgagcacaagccagtccaccgcacggaccgggaagcccgcgtgaaagacatgcacatgtccttgaaattccacagtataggccccagagtgctgaggaactctacgcccaggatgagatcaaactcgccgaggttgatgccgtaacagttgacgcagaaagcttcggcgttgatggcgatctccacgttccgtgctacgcc

SEQ ID NO: 197481 - DNA, 2053 bp, Zea Mays
ggagcagctaagagctcggcaaattagtgcacagcaaattaacaaagtggaagagctttggaagacaaatcctgatgcatctcttgaagatcttgaaaagcctggcgtagatgatgaacctcagccagttgttttgaagtatgaagatgcttaccaggttaaaactttctaaagttctgtattctgttacttgagtttacttttttgttggtgctttacttcctactctcaaatatcaaagcccatatttttaccttgcatctaagacctaactagcatatcctgcccccctttttttgccagtaccaaaatgtttttgcgccactgataaaacttgaggctgattatgacaaggtactgtgttctgattaagagatcatgttttttatcttttccatcacaaaactgagttgtgttactgttttatatgttgttgtagatgacgaaagagtcacagagcaaggataatgtaactgtccggtgggatattgggttgaacaagaagcgtgtagcttactttgtctttccaaaggtctgttcaagaagtgaaatatatgggattagtgaattaataccataattgtatagttatctgttgttgatgatgttcggtattgcttcgtgatactctattgtctaacacgggaaacaattatgtattttaggaagacaatgagttgaggcttgtgcctggagatgagctacgcttgagatatcctggtgatagctcacatcccacatggcaatctgtgggacatgtggtaattagaaacctgctgataatcttaattgggccagttttatctttgtggctatgctaaggacatttgttctttcagattaagctcactgcacaagaggaggtggcacttgagcttcgtgcaagtcaggtataaccgtataaggcagtatgatttttctcatgttcctttttagcatccactcagcctattttaacaatttccttgaatttcagggggtgcctactgagctaaacgttggattcagtgttgatttcgtttggaagagtaccagttttgataggatgcaaggagcaatgaaaacttttgctgtggacgagacaagtgtcagtgggtgagtataatatgtgatactgtgcatagggttacgacatatcgttgtcattataatcgaacaaggctctttgatagaaaacaactccatcaaatcctaaaccacttcatatattattagtcggcgagatatttgattgtttctgttacacacactgtttcattggttaactatgtgcatactgaagaatattcttataataagatccattctatctcattctttataattttgttcttctgaagtgtttgtcatagttgtatcactattaacaaagttttactgtctgttctttcacacagatacatataccaccaccttttgggacatgaagttgagcatcaaataatacgtaacaccctaccaagacgctttggtgcacctggacttccagaactaaatgcttcccaggtacattatctctctctctctctctgtctctctctacactcacacatgtgtgtgtattctttgttctatatttcctcttttttttgcttttcatgtcttctaacatggtgcattcatgcctttgattaacatggttgtcttctgttctgggacaatctgtgtatattatatattttaaattttgggtgcagctttgcaaatttgctgctgttatggcctgtgtatgttgttattgattgtttgatctgatgttgtcttctgtattatttattgtgtattcaggttttagcagttaaaagtgtcctgcagaagccagttagtttgattcaaggtccacctggcactggaaaaactgtcacatctggtgcaattgtgtatcacatggccaaacaaggtcaaggacaggtatgggattattagaagtatgttgttcacttgtttgacatggtttagggagaattgtctgacctctaattttgtcaaatttgtaggttcttgtatgtgccccaagtaatgttgctgttgatcagctggcagagaagataag

SEQ ID NO: 197482 - DNA, 679 bp, Zea Mays
acgatcaaaacacaatggttgaacctagtgaatagccccttacctcttttgtctaggtacatctacagaagaagtttttacaagatgtggggcatataaaaatgcagtagatgaatcatgaatccagataattgtttcacattactagttcaagcttcggtctttgacaggtaaccaactgaaggggcaaagccaaaaaactcaacaagctattttgaaggtatcagataataactcctatcagttcttgatttggcactacttatggcatttctaatcatctagttcatttacagaaattccgatctggggtatataatgttttggtggcaacatcaattggcgaggaaggacttgatattattgaggttgatctcgtgatctgtttcgatgccaatgtctcaccattaaggatgattcaacggatgggaagaaccgggagaaagaatgaaggtcgagttgatatccttttgtgatgatgagaatagcacgttctcaagttcaaaagttacatttctatacaagttttcttctttggcatttgctaccttaactgctcatactggttttggcttatgaaggtcaggaattgcaggggtacagaaagaaacaaggagattgtcgaaccatgaggaagctattgcataacagtgagagatttgaataccatgctagtcct

SEQ ID NO: 197483 - DNA, 392 bp, Zea Mays
gagagaggcgaggaaggaagaaatcgacgaggggattggattggactgcgactgttgttgattctctcttgcacgcggcggtcctcctccagagtccagacccaatcccaaatccctaatcctacagagggatcccaaatccggcgtccagtccagtccaacctgtagtagatatccccgccggcttggccgtccgtccttgccccaattccgattgaccggagaggagttggatcagggagcattggaatggccgccgccgcataggatggagctggattcctccggccgctgctcggttgctcccgtgaatgctgtgatcgtcgcgattggaggtggaggcgaaggttctcttcagtaagagcttcaagagctgtgatctagctgattgg

SEQ ID NO: 197484 - DNA, 287 bp, Zea Mays
aaatatacatcggcgagcagaggacactagaaatggtctacaagcaggctcgcagggactttatacagcagttctttcccttgaatccccagccttcacatttgagatatctgcactatataacaagacaaagaggtggttcagaatggcctcctattagcagacccttcatcttggattcaatagttctccatattgttctgtggtttgacgcagatggtggttgtaggccatacttgattgtacatgggcaagactcaagtcctggtaacaagagtgcaaaggtc

SEQ ID NO: 197485 - DNA, 1185 bp, Zea Mays
ccattgcttggggtcattagagtatgctataacattgctcttaataggtacctgttatatcactaccttcttgtttgcagtatgttgccttgttgccctttggaccatgtatgataatttattcatttgtattttgttagcaagagccctgtgaaccaggctacctcaaaggctatgttaacccagatgatcagcattgtattcaggagaatggaatctgagcaggtaaagaattccacatatcttatcttgtgcctaggaaaatgattcattgaggttgtttctctaggtattattttactttcttggttccaggtttctgtattgcctgcaagctctgtggttaaagatacaccttcatctatcacaaatgaatctgaaaatggagaaatatctaccgatggccaagatgaggaaaaagttactccgggagatgcattgtctatgaatcggccttctgaagcacctccaacatctgttgaagagcttcagaatcttgctggtggagcagatattaaggtactgaaactggatctcgttgctcttggaactttcaaacgtgtcttaggtattgcattggttccatctaattacaagagatcttttacaggggctggaagctgttctagacaaggctgttgaacttgaagatgggaagaaagtgtcacggtttgttaagcttgtactaaggtttttttgcatctctaaggtgatgcatccgggactcagatgtggcagtagctaattacctttgcccctcccctcttctgtttttccagtggaattgacctggacactgtgaacataatacagcgggatgcactattgctctttcgaactctttgcaaggttggttgctttagtaatgttactttagtcggagctataagaaagtaacaattatatcctaactatgttgtgttatccttttagatgagcatgaaagaagaaagtgatgaagttgctaccaagacaaggctgctatcacttgaactgctccaggttagcttacttctttgaggttgcttatttttatttttttctttgttttgattttattcgtagccattctcttcagggattgctagagggagtcagcaacgcattcacaaaaaatttccacttcattgattcggttaaagcatatctttcatatgctcttctgcgagcatctgtcacttcatc

SEQ ID NO: 197486 - DNA, 1204 bp, Zea Mays
ctgatgcggtgaaagccatcttagatgaggggattagcttgttcaagatgcatcggagcaggcatggaaggtatgaaactgaaatgcatattaatattaaaaccccctttttagcacgttgtgaacagtaaacaacactctggttgtatagggtcgaatgcctttgttcaatagcagattaacattcctcaaaaacaagcagactagcagtataacccttattttatacatagtattacttcatatttatgtcgtcgagggaatacttttgtccaatcttcaatcacacttgtatagagaagaatgttctccaaatccccttttctgtagaaacagttaaccacacttgtagcagtattacttcatctgatgatgttgacataactagtggttttcacatgtctatatacattgcctgatgttttgcaaaacgatgtcaaatcagagcagagccatcaaaaggttcatacgctaaagaatgggcacaatgggaacaaaggttgcgtgcgaccttgtttgggaatgctgatcatcttaactcaattcaggtaaccatatttcatttattattcgagattataatggttgctgaatgtttatacacattttaacatgtgggtctactacaaatctacgataactaagtagtttgctgtagtaatttcttttacactttatatatgaggactccaataagaacttggaggttgctagattatgccatacaagtcctccatccacctctcttgcgtgttagagaaaaaaaagtccgtccaccaatgttatgaattaaataacattaaaagaattgtttgcttaggccaagataagttactggtagatcagtagtctaaattggctcaaccttatgtgggaaagggagcaccatactaatgttaatatggtgtagcagtagcattttcattttcatgtgatgtgcttaatcaggtctttcattggtctactatgcactgatcttaatcctgtacacttacaccacaagggtctgttataatggtgcaacttaagcacccagaaatcatgatgcagttctgatggtatctatacttttttttctaggttccttttgactatgctgtgaaagcagtactggaacagttaaaagctgttgcaaagggtgatctcaaaacacctgatactgggaagcggaagtttggaaatatcatgtttgctgctgttcgat

SEQ ID NO: 197487 - DNA, 412 bp, Zea Mays
aaggaaatggagagacttgagcgtgagagaagaaaagaagaggagagattactgcgtgagaggcagagagaagaagagaggttccaaagagagcaaagacgtgaaaatgagcgcatggagaagtttttgcagaagcaatctagacgagtttgtttctgggttcctagaatgttaattgtaaatgtagtgtagtaaataccttatttatgctgcctacacttgtgcaggaagagaaacaaagacaaaaggagcaactccgaaaagagaaagaggcagcaaggcaaaaggctgccaatgaaagggctgctgcacgtagaattgcacgggactatatggaactggtggaagatgagcgtttggaattaatggaattagctgcacaaaacaaagggttgccctcaatgctgtatct

SEQ ID NO: 197488 - DNA, 820 bp, Zea Mays
atccagctgtattcacatcataatcgaagtggttactgaaagatttccggtggctatactgacatgggtgatttgattggtcccattatctgatccccacagatttcatctacttcagagaacagcacggaggatgctggtccaactgacagcgtggagatatggaccaagttgtctgcaatggaacttaacacttctcagaacgatgctgtcttgaactgcatttccaaaatgcactccaagagcagcacatttacccttatctggggtcctcctggcacagggaagacaaaaacaatcagtgtgctgctttggttaatgagagaaatgaagcatggtacgctcgtatgcgcaccaacaaaccttgccatcaaacaggttgcttcacgtttcttgaagctggtccaagagcactctggcgacacaaggtgcttgggagatgtcctattgattggcaacaaagagcgcatgtgtgttgatggtgacctcaaacaaatatatttatatgaccgtgtaaggaggctttttggctgctttgcaccattgaccggatggaaacatcacctatcttccctgtctgattttcttgagaatggctactcacagtacctccaacatctacaagacagtcaggaaggtgatacgccttcctttttctcttacgccagaaaaagatttgccgttatttatatggagctcagaagatgtttcaatgatttgttgttacatgtcccaaaatccagtattctggaagtgaattacaacagtatccttttacttcttgaaatgcttgaagagttcaaccacatgattcagtgca

SEQ ID NO: 197489 - DNA, 417 bp, Zea Mays
cttgacaaggtatttgcagcagaggacactgttgttcgcttcggtgaaacaccacgtgacggaactgatggaagagcagacctactgatcttatcagtgagatccatgctcttggacattgtgcttgcagacaccctgccccccatcatagcaggccagcgatgatgatcaatcaccttggcatgtggattctccgattgctcaggggtagctctacctctcaatgggctcctcttcctatcagcgggtgctgcatccctcgtcttggcctgatctgcagaggagctactagaaatctttttcccctttgattcgagctggaaagaagaagacagactccgcattgaaggccacagcccatcaggagcccggccaccaggcaacctcctcagagcgatttgcgtttctggaacggca

SEQ ID NO: 197490 - DNA, 357 bp, Zea Mays
gactttttctggagaaaaaaaaaagaagaagcagcgctgctcccctaaagctcacatcattattcccaaacaagaaaaagataatacaggcctggcctggccattgaagtgcataaagtaaggttccctacacatcctcatgaaatgtttcagatacttggagtcgtaattaacagctgaaccaaccctatcggacgaccaaccgaacattcactcagtgtcaatggccagtaactgaaaacgcacgcacgagcacatggcacagatgcagcaatcacaagacagccgtgactcgtgagcgcgcgcactgaagaagggagatgaccccaaccccaatcccgtacacgaaccaaaaac

SEQ ID NO: 197491 - DNA, 343 bp, Zea Mays
ggctagagccaagaaacaaatgttggataatcttgctgatcgtctcaagggaagtgagtgagaaaaactatactataattttgttagtacaatttatttatcctgactttgctaacttatttttgtcattatatttgcagagattggatatggcgtaaactatatggcagatgaggcacatgcaagatatgttcagaaaaaatggcgacggtggagctgatggaggaggaggacgacgacacatctagattgagtgagcttatcgctctcgcggaggaaggattacatggggaataggaggaagacacatcaaggttgagtgagctcatcgtactagctgagg

SEQ ID NO: 197492 - DNA, 1781 bp, Zea Mays
ctgaaacaagaagtgggaaattagatcaatcaacatgcatcacaggattagtctctgacaattgtgttgtctcagaggacaaaacattgatgagtgaaggtgaggtcaacatttggtggtaatggcatactagttgttaatttattctctgcatagccaaatctataggctttaattatgtttaagttatatggcatcacaattgtattattattttttgatcttctttggatgctggaaagctggcatattaataccctattgattttgtgatgttgtaattagctttgtccattattgtcatgttatatactcaaagggagactttgttggtccaaaatcaccaaatggtttatcaattagtttcattgtcgcagaccgtgaagagcaaagccctgtgtccggagaacagagagttagcttggaagcaaatgccaatgagcctgaggaaaagaacctagctaacgtcacatcaactgatctccacaccaaaagtctgcagcatgatattgacagaatagctaaagagactgataaaggtacaactgaattaatcctgtatccataataaaaactctgcaacattgatgagtgaagataatatgtatgctgaacatctaaatccacctgtgccagctgattattcactgttttttttctaaagatcttgcttagtaatcttgcttcaagattttcaattcactaaattaaacttgctaaatctccagatgttttgtctttggttttccctattgaagagcatgaagaaaaatatggagtgagccctatagctgttgaaaagtgcgtctgtcgtgaagcaagtgcatgtgaatctgcacgaaaacccctaaccgttatcttttctaacaatctccacaccaaacatctgcaacatgattgtgatgtgctaattaaggagactggtgaaggtaatattgcattaatacttgttccacaacttgttactgatctgtggagatggtgatgaaaacttgtgctgtttgcactgtgtttaatttaccaattttaaacatactgagttctaagtcaagttgttggctacttgtaattctaattatttttaataggctttatgtttgttctatctggaacagctaggcatatgtttcattgtcatttgttgtcttttaagtatcttacatttttttgaatgtattctttccctttctcagaagttttagctcaggagaattgtaatgaccagcctgttcctgcccagactgaccaagaaattaagttaaacgatgaacttgctgatccgggtatggactgtgtttaatttaccaattttaaacatactgagttctaagtcaagttgttggttactttcattctaattatttttaataggctttatgtttgttctatctgcaacagctaggcacatgtttcattgtcatttattgtcttttaagtatctgacatttattttttaaatgtattctttccctttatcagatgttttagctcaggagaattgtaatgaccagcccgttcctgcccagactgacctagaaattaagttacacgatgaacttgctgatccgggtatgtactgtgtttaatttaccaattttcaacatactgagttctaagtcaaattattggctacgtgtaattctaattattagatttgtgcattattgtcatgttatatactgaaaggaagactttgtcgttccaaaatcaccaaatggtttatcaattagtttcactgttgcagaccatgaagagcaaagccctgtatccggagaacggag

SEQ ID NO: 197493 - DNA, 653 bp, Zea Mays
agtccaaagatcacaatgtattaattgaaaattgcgagtggcatgtgatgaagaagaatggaaaggtagacgaacgtgacgtcctagctggcatgcatggcatatgggggtgtttttattcgggggtacaagggatgacagaagactgagctagctgagtgaggaccgcagatcctggatgtccaagtcgttgatgccacaacgaagaggtggtagcatggagagaagatgtcgtgctcctaagtgggtagagtgggtcggagctatcacaccgaaggatcacgcgccgagtgggaagatccttcacagagcagccaagagggtcaaattccatagaacaattattgtcagtggtgaactggcgaacagaaattaaatctttaatgagagaaggtgaaacaaggacattgttaagacaaaagttatgagaaagttgagtggtgccagtggaagtgacaggaagaaggttgccattgccaacaacaatgttagagggtagatgatgagaagaagagaggtgggaaagtataccagcgtcgaaagtcatgtgactggaggcacctgtgtcgaagaaccactcttgctgctggggatgttgaagagtggtggtttggaaattggtggcgagttgttggatatcccaaccaggaggg

SEQ ID NO: 197494 - DNA, 703 bp, Zea Mays
cccaggttttccagattctcttccaagggccaaacttggtagagcccacgaagaaggcctcatacgcagacttgctgctataacagccatcttgtgtcaacttccacctgaactgatcaggaacatcagattgcagcacgacctcctcaacaaaatcccagacctggaggtactcaattaaaacctgaacaataagagcacccttgatatcacgaacccaactccgcccaagcaaggcctgagccacagtctttcgcttagcagttcgcatagggacaactctggaaagattgggcgccatctcagccatagtaagcccatccaaccaacggtcagaccagaaaataattttctcaccattcccaaccacggcattcacagccatatcgaagagggcccgagctttataaggaatagaaattgagagaccagcccacggcctctccacatcagtcttctgagcccaaagccatctaattctcagggcccaacctagaagctcaagattatggattccaaggccgccatactgaagaggtctctggaccttttcccaagctaccaagcagttacctccattagcttgttgatgtcccatccacaagaacccccaccgctttttatcaatagccttgatgaaccatttcgggagatccaaagctataagcaaataaataggaacaacagtgagaaccactttcac

SEQ ID NO: 197495 - DNA, 292 bp, Zea Mays
agaccatgggcaccttggtttttcacccgcactaacatggtaactttcatatgttaaacttttacttcgactgtatttcgttccttgtccagctcttattgtgcaagctcaagcaaagggttgcattaattagttctaggatactcaattcttaagcatggtcctgaatgcatctttttagctttaatgatgtcctggtgtttattaggtatatatacctgaatactgattacctgtgtattgatgatgtatacacatgtcattaattaactgtagttaaaggaaccatgcc

SEQ ID NO: 197496 - DNA, 716 bp, Zea Mays
caagatgagtacctttgtctaccatatcactactctcctgtgggccactaagttcttttggggcatcatattcttgagcaatattgtcctcagcttccgttatatcatctgaactagctagcgcagactctgctggttgtgactgcaagatgttcctatcagacgtatcttcctttcctgtgtgaatagattcccctgtttcggtgtcacctgattgatgtattttagtaggcgaagaagatgcactaccatcaggtaagtctcgaacagactctctaagctgattcggctctgcttcatcactaggatcagaatgtttgctaacttgatggtgctggttttcttccactgttgaaggatgtcctgcagattgtgatgtttctgatgcttcagcatcacccaccttagatgcaggtgcctcagtagagctatcaagcttttcttctgctactgaaggatgtgttggagtttgtggtgttatggattgctcagaaacatctgccttagaaacaggtgacccattggaaatactatgaacttcttccgattttgaaggcagttttggagatgttgttcctgatacttccgaaggatctacctcagatatatgtttcttagttggtgtgctattaattccttcctctgctgacagattcttcagagattgtggcttttctgatacttcagtgccatcctcctcaccattgtgtcccatg

SEQ ID NO: 197497 - DNA, 414 bp, Zea Mays
cgcagacaggactccacctgagctgaagctccagcttaagatttttcaacatctatactacttgccaccctatggtaaaagttggcatgcaaagtcctctgcttggtgcataatgccccctccgaacaacatagagcaacagaaaagaaagccgccgaaagccacagaccggttacttcccagaaatcacgctaactactagtctgtagccagcaacaaccctcaaatcggccccagaagcgatcaggacaacggccccaaaccaatacccgaaccagaggagttcccatgagcagtgcgagccgcgacgcgaggcaacggaatttgcaaagccgcgccgccgttacagcccgtgcaggaagaaccccaaacatgtttcgaaatcccaccaccacacacacacaaatatagcaa

SEQ ID NO: 197498 - DNA, 1165 bp, Zea Mays
ccggatcacagaggatatcagaaacgctgggttctccataaacccagacgagctggcatcgatcacaagcaagcacgacgcgaaagccttaaagatgcacggcggggtggacggggtgtcgaagaagatccggtcggcgttggaccatggcatatctgccagcgacctagacacgaggcaaagcatctacggcgtcaaccggtacgcggagaagccttcgagaacgttctggatgtttgtgtgggacgcgttgcaggacatgactctgatcatcctgatggtgtgcgctctgctgtctgctgccgtcggtctggcgtctgaaggctggcccaggggcatgtacgatggcctggggatcatgctcagcatcctgctggttgtcatggtcactgctgtcagtgactacaggcagtcgctccagttcaaggagcttgacaatgagaagaagaagatattcatccatgtgaccagagacggatcccggcagaaggtctctatctatgacttggcggtcggtgacatcgtgcatctgtccatcggagaccaggtgcctgccgacgggctgtacgtgcatggatactcccttttgatcgacgagtccagcttgtcaggcgagagcgagccggtctatgtttctcaggacaagccattcatcttggcggggactaaggttcaggatgggtcagctaagatgatggtgaccgccgtcggcatgcgcaccgagtggggaaggttgatgagcacgctgagcgagggaggagaggacgagacgccgctgcaggtcaagctgaacggagttgcaaccatcattggcaagatcggcctgttgtttgccacattgacatttgttgtcctgatggttaggttcctcattgagaaaggtttgacggttggtctgtccaaatggtactctactgatgcgctgactatagtgaactacttcgcgactgctgtcactattatcgtcgtcgctgttcctgaagggctgcctcttgctgttactctgagccttgcatttgcgatgaagaagctaatgaatgataaggcacttgtccggcacctttcagcgtgtgagactatgggatctgccggaaccatctgcacggataaaacgggaactttgactactaaccatatggtggtcgacaagatatgggcatccgag

SEQ ID NO: 197499 - DNA, 324 bp, Zea Mays
gcgagagactcgctactatgtggggttcgctcgacagacgtcgtgggcgcgccattgacggagtccgcacagatcgcacggcactgctccccagggaaatcacgggacatgaacctccccacgttcacgacccgaccataagacccggacatctgaccctgccctcctccttttccctagcgtcacaaagcaacgagaactcggtgggtgagggagagcgggggttccgctgccgtggctttgcgactgcaatgtcggatgggtcgaaattgttggcctatgtactcctacacggtctccggtgtgcgtacgtggcctctgctg

SEQ ID NO: 197500 - DNA, 384 bp, Zea Mays
gtaggctgccccattcctggttctgccattcccattcccaactccgttttcattcccaactcctgtgtgtttgcttcattcccgactgtccattcccaactcctgtgtgtttgcttcattcccaactgtgtcccgcgtccgcgcatgtgatccgtttcccattctcaagcgtctcacgcatgtgatccgtttcccattcccaaacgtctcgcgaaccgcgaccaaatttttaccaaaaaaagctagcagcgtgggttaaagctcacagccaaccaagactacacattctctgggacacactagcccttataaacaagtgtttgcacagttcagtgaaccatgtggtactattcttaacttgtatttgttgacaacgcaggaggc

SEQ ID NO: 197501 - DNA, 564 bp, Zea Mays
agtgaattgaacacggatagcactgaagctgaacagttagaatggagtggtcagttaagaactagaagagagattaactccccatttgacatcgatgatgttacagatccttctcagtttactgataataaggaaaattctggaactggtaagaaactagttctcagaataccacgacgtgatttaagaactcaatttcctttaggaagcggaaaagcagaatgctccatacaggataaagcagtgaagtctctttctctagctaatcatgaaccagttgagcacgaactgactattgaaccaggacattcccctgcctccaaggctgaattaacaattgatggtgatctgcatgatagttctgctgtttgcagtaataactcaattaggtggggtgaggttaagatgcgatcctcaaagcgttgcaagtacagtgagccagctggaggtttgtggtcctcttcaaataacgttgctttgcaggatatcgagggatcgagcagtcagcagatacctcatgaatatggcgatggcatccagccaagtgttgtgcaaaacgtacaa

SEQ ID NO: 197502 - DNA, 362 bp, Zea Mays
caggaattcaattttttcagcaataccttggggagcatacacacaagacagccaccaggatgtgccatcagccagccgaaaattcaccgaaacacagtgaccatcaatcctcgacccaagagaagttacatgactcctccaagcaaccagaatacctccacttgcgccattcgagggagagaaaacgaaattgccaaagtctgaacccaaacaacgacaaaccagccatctggtaacatccgacattttagtttcttgaatacagatcacatccgctttgacgctgtccactaaacatcgaaccacatcttgccgggccgaactattaaggccccgcacattccagcaaagtatttttgaag

SEQ ID NO: 197503 - DNA, 785 bp, Zea Mays
tggcagtcaaacacatgttttacaaaaattacaaatctgtcagggaaaaaatgcctgcggtgctcattactaaaggatcaagaataaaagttaaaaatgcataaaaatatgcccaaagataaaccccaactgttatataccttgataattggagtaatgaactcaaccaagaaagatggaactttaagaagtgatggccagaatgagtgaatgaaattgatcagcaaccctttgatgtgggaaccatcgtgatcctgaagtttgtttgtcaaagcatgagcagacaaaacttgagtttgattggttgatatagaattggagctatatgccaaacctgatctgtcattatcatgagatggccgtatctcaaacctttggtgctatcatactgctttccatgctgcaaaccaaggatttgctttatgttctgaatttcagcgttgtccattatctgcttgtggtttgcctctctgacattcaatagttttcccctgagaggaaatacaccatagtaatctctccctacaacagctatgcccgacatctgcagaggggggagtgagtgtctcatgatttcagttcgatatttgaggtatacactgttatatagaaactatgcattactcacagcaagagcttttgcagagtcaccctcagtcagaatcaaggtgcacttgtgagagtccttcccaccagcttcatttgcatcctcaagcttagggatgccagaaattcttgacttcttgcttccatcagtcttctttaattctttgctaagtttgaaa

SEQ ID NO: 197504 - DNA, 1013 bp, Zea Mays
gataggttactatctgaggtgttggaagcttttttggtgatccgtgggcttgtcgtgcaaaagacaaagttaattaatgactgcaatcatcttttgaaagaccttcttgatagcttgcttcttgagagtactgaaaacaaacgtcaatttattcgtgcttgcatctctggattgcagaggcatgtgaaggaaaaaaagagacggacgtctttggtatgagcacattttttttttctttttggatattgtacttatagtttgatagcaactctaaagtctaaacatatagtgcactctatccatttcatgtagggtattttagaatccttaattctaaaagttaaacattgtaaactttggtcatcccttagtctaaatataatatgtttagtgcacaaaagatgtatcaataaatttgtatttaccatgtcttttagtaagatgttggtttgtagttaattataatatactgtacgatgaattaatggtcaaaccacaccttgaaaaactttcaaatcgtaatacaccttgtaacaagaactggagggagtaatttatttaatatcttgccatgttctctcaccagaaattttcttttgcagtttattttggagcaactctgcaatctgatttgcccagtgaaaccagagcctgtttatcttttgatactgaacaaggcacatactcaagaagagttcatcaggggttctatgacaaagaacccatactccagtgtggatgttggccctctaatgcgggatgtgaaaaataaaatatgtaaccagcttgatttaattggacttttggaggatgattatggtatggaattattagttggtggtagtataatctcacttgatctgagcatttcccaagtctatgagcaagtatggaggaagcaccatggtcaaactcaacattgtttgtccaatgtcagcgcaataactggtgcttcatctatcagagattgcccaccaatgacagtgacctacagactgcaggttagctatgaa

SEQ ID NO: 197505 - DNA, 655 bp, Zea Mays
gcaaaactgagatggttccattctggcaagaaaggctatggattgcagttgcaagaagacgttactgaaggaagatttcttattgaatatgttggagaggtactgttgtcgtccgttattttccgtgtttgtgtccttgtacataacccgttattatgttagtgtgatgattgttgattatgactaatgagctcttttgactctatacttaatgatttctttcaggtccttgacataacatcctatgaatcccgccaaagatattatgcttgcaaaggccagaaacatttctatttcatggctctaaatggtggtgaggtatgctttttagtttttatattttgtccataaactatttatctttttcagatttactattttattgcacttgcatattacatgccaccatttttagtgcaagttctttcacttttgtattaaatttatattcagtgaagaactattcgatcacctccttttattcccttcccttttcatctagtgtattatgttgactttgtgtggtattcacttttcttaatatacccatcatgatgttgacaattgaatacattcttttaatcattttttttgtttcaactgttccaggtaattgatgcttgcactaagggaaacttgggccgattcatcaatc

SEQ ID NO: 197506 - DNA, 684 bp, Zea Mays
tccggagggaggccgaactgcaggcgcggcttgagtccgcccaggaggacctgaagaaggcgaaggatcaactggcattcatcctcggagagagggaccgtcttgtcggggagctcaacgaggccaagagagtcgctgatgagactcacgagaagctccaggatgccctcatggccaagaggtgggccgaggaggccactgagatcgagaagttccgggcggatgagctcgagcaggcaggcatcgacgaggcgcagaggcgggaggacgagtggcagagggagattgagtgtgtgcgtggccagcatgccgctgacttggagagtctggtcaacacaacggaggaggtggagaggctcaggcgtgatctttccatggcgaacgaggccaagaaggctgcacttggccacgccgatgatgcaatgaagattgctgaagtcaatgcagagaaggtggagattctctcaaatgaagttgttcgcttgaaaggcttgcttgattcgagtgctgccagcgaagagagtaagagccgtgaagctgagcttcttgttaagaatctggagtctgaagtttcatctctgaaaggcaaacttgaggaggcaaaagtccttgaagacaggttagccgacgcagaaaaaatgattgaggagcttaaatcagagatagctaatgcgcagaaggtcg

SEQ ID NO: 197507 - DNA, 301 bp, Zea Mays
atggaaatgaaggagagatagactcagacactcgaggcaggaggggttggttgcctaaaatggattttcccatatttgatggtgatgatgttcgaatatggatagacaactgtgaatcctattttctgttgtattccattccagaggggctcaaagttactgctgcctccttgaatctgaaagggagggcagcccattggtttcaagtgtttcgagatactattggattgtttgattggtctcagttcaaaactgcagtactgactgaatttgaggtatccacacattcagataagatgtt

SEQ ID NO: 197508 - DNA, 285 bp, Zea Mays
gcgtgagcagcctcgacgacggcctaggtgtgatgtgtctgtagggcatcaatgtcgaggttggccatggagcagattggatctcctcgagggcctggtggtagggctaggaaggaaagcgggagtgataggggaaaacctcggtctagacaccatgatagaatatgtgttgccagatactagattgatggtagaggtacaaggggtgtacaatatataggcaaggatcatcttgtttgtgtatatgtatactagtgtattttcttgtactctagggtcctccct

SEQ ID NO: 197509 - DNA, 401 bp, Zea Mays
taaaaacagagggagtaacaactttaattgtttatttatttaccatatggacatattgttgggcaataagttatatcattacttggtttggtgaactgcataaatgctgcttacttggccgtatatgataagatccttgattctatcgcagttgcgaagtgcatgtgaatgtgagattggagttcagtgttggatttttttactttggtaaggcgacgtgatggcatgggtgtagagcagcggcgtgataacgagcgagggagagacaacgcgtaggacaagcccttgtggcctagaaagatgtttgtcttgcttccttcgtctggttacatcgcccctgtatttatagttcctagaggacttggttcagaagcaaactagaggaggaattcctaacaaac

SEQ ID NO: 197510 - DNA, 912 bp, Zea Mays
ttaatttgttgatgctaaggcaagccagtaacctggcacacaacatgttcgatgatatgtcatttacagaggtggtctgggatgatgaaggggcactattcgatgaaatgcattgcacggatgtcatctgggatgaggagacacatcatggctttgactcacatggcctattgcagcaccatgctgaagcaatggataaccagatgcagggcaaggagaaattggctcaaagtggagattactatgatgagaggaaagtcaatattgaaccagacatcaacaacttgctcattcatgtcaatgaccatttctctatgttggtgattggtgcggattctaggcgaagtgatgttgtgtgggacgaggacatgttatctgacctcgatactcatggtggcttattacagttactggcatgttgtaaagatgatgagctcaaccaggacagagacactccttttctcttgggccttggtatggatcaggtggatgagatgctggccagcccgtccagccttggcatgaatgaggacttgccatctgtacctgagacacatggctcgttattgcagcaagtggcatgggacaggaagcactttgcttatgaaatgtgcacgcttattgctgagatggtcctggaagatgttctcaccgatgttggcaacctcgctttcagcattgattcaagcatgcagatcagtgatcaaccttccaaatatgcgctagtcatcgatgcttatctgctgaagacgcagtacaaaaaaccatacatttctataagccaatgggatccaggaatttggtgcaaaggtactatggcccatgagcagcaacagcttgagatatataggatgtttgagaaacaatgggattcagttatccttaaatggttcaggaatccttttgtgctgc

SEQ ID NO: 197511 - DNA, 587 bp, Zea Mays
gtcatcttttgcaatggagcaaagagtccctagtgccgcttggcgtactttcgtactgctattcttcaacaagtcagcaatcatgattatcaacccatctcttctcacaacctgcctgttagatcgacttctctgacatatctcatcaacatactggagtgcttgtaggatatcactttctgtgctgtcagaagtcaatgacttacgagcgacgtcaagtttggccgcctcgttgcgattcatccattcatcaatagtgttcctcagagctatgcttggatttaactcagtgttgctgagctccatcttagttacagggcagacaagcctccttccactgctaagacattcattgaaataattcaaaatggcattgcgttcaaacgtaacaccactgtcaatagaaacaggatcccgcataacctgtttggtaagcgggcataggaacgactcatatataggttcaacacgcaagctatcagtggcctgtgacattgaatcataatgaccatcctggacttctgccatcactagtgaaacactgcaaacaagttaaaaggtgctacgttaacataggtggcatgttg

SEQ ID NO: 197512 - DNA, 468 bp, Zea Mays
caaatggtgacatctatgttggcaactttgctggtttagttcctcatggatttggaaagtatatgtggacagatggaactctttattatggcgagtgggatacaagcaagatgagtggtagaggagcaattcagtggccttcaggtgcttcatatgatggagatctttgtggaggtttcattgacggaacaggcagtttcaaaggagttgatggatctgtatataaaggttcttggaggatgaatagaaagcatggaatgggcacaatggtttacgccaacgatgatacttacgaaggtttatggaatgagggcttgccagatggatttggtaaatatacatgggttgatggcaacatctacattggactttggaaatctggtaaaatgaatggcagaggagtgatgcaatggacaaatggcgatactcttgactgtaattggcttaatggactggctcatggaaagt

SEQ ID NO: 197513 - DNA, 478 bp, Zea Mays
atgatgtcgtccacatacaacaacaagtaagcaatagccgagccctgctggtagatgaataacgaggtgtctgatttggcctcagaaaatcccagagtcttcaagtgcgatgcaaaacaactataccaggcacgaggagcctgcttcaaaccgtagagggacttgttgaggcagcaaacatgatctggtcgtgaggggtcaacaaaacccgagggatgagagcaatagactgtctctgagagtgtgccatgagggaacacattcttgacatccagttgatgaataggccactgaccagaaagacccaaactgagcacagtgcagatggtggcaagcttaacgatcgggctgaaagtctcggcaaagtcaacctgagggcgttgagtgaatcctcggaggacccaacgagccttatagcggtcaagggagccatctggattgagtttgtgcttgaaaatccatttatcggtgacgacat

SEQ ID NO: 197514 - DNA, 278 bp, Zea Mays
caggaacatccacttaattaattcggctgatagtgcagccgatgcaattaattggagggcacctataattaattacctacataatcctaatagtggaacagacatgaatgtttgtcgtacaactttcaaatatgttttagttaatgatgaactctaccgccgaactgtcaacaatgtcctgcttaaatgcttgagcccagatgatgctatattagccattgccaaagtacatgagaggatctgtggtacttattaatcagctccgaagatgaagtggc

SEQ ID NO: 197515 - DNA, 503 bp, Zea Mays
aaatctgcacttaaacaatatgtaagtttaattgtgtaaactataacatatcatgtatttaatgtaatgagtttgacatcttaacttacccgtttctggattgtcatgttgtagtattgcaagccactccttatatgcatcaatcgacacttctatagtttcttcatcaacatttgttcgctgccttggacgcttgatgggagttatgcttacctctagatcactgggtggatcttttgtgagcacaaaacttatttttctctcatccatgttatcagacagcatggcctcttcttggtggatgtaatcaagtgccaatagcctggatcgatcaatgccacatcgtttcttgtaaaacaagaagtccctaccagaatatccaagtttcgattttatgtacaccacgttgtaaaaggcaacataagctttatcaatatttactgtgacaatttcttttccaggttgtgctccaatgcaatggaatttcaaggtccatatctcac

SEQ ID NO: 197516 - DNA, 506 bp, Zea Mays
cctccagccttacctgggaaatagctttaccccacagttgctgaaggtttatcacagaaggcaattgaaaagacagtgccaacaaggcctttctcagccacagatggatgatcgctgcggtgatattacggagatcgatgctgaaaggatgctggatcatgctccactgatgaatgccccgaaccccaccgtccagatctcccctccggaattaggctcagaccgggaatctaaaatggatgccttctttaacagcatctgtaggaagccttctggtatcttgccagccccaaaactcataaggaaatctcgtttgtcttcccccacaccaccagttgtatctgcacctagaagaagtcgtcgggtggcaggcatcggggtcgagttcaacatgcaagagctgggaggcaggtccatcaagaaggttatgaaatccttgaagatcatctctaattctgacaattttagcaatgaggcttttgaagattatgtcaatctgttcaagc

SEQ ID NO: 197517 - DNA, 321 bp, Zea Mays
ataatattaggggcattccaaaatgatatgaataccaaaaaaatcttttggccaccctagggaaaggcggggagagggaaaggggtgggccaacaaggggagagcggagagcgccagggtgaagcggccgcatcgacgtggcgagtcggcgagtctgccacaagatggcgacgatgaggcagaaacatgtgaggtgtagcgagggcaagaggcggtaggcggtggcaagcgacaacaattgttgcattgcgacgacgtggtggggcccagtgacatagtgagggcagatggcggtggcaccgtggtgccaaggcaggatcc

SEQ ID NO: 197518 - DNA, 410 bp, Zea Mays
ttgacactatcgcttgtgtcgtgcaacctcagagttaccaattttcttccctcctccgctcgatcgctcaggagccccactccccgactcaagtcacgttgattcagacgattccccagcaagcatgccaagaacagcgtcgatctcagaatcattagcagctggttgtatgaagaaatgagtatgttttcttcttcgggcaaatctcagtgcacagcaagtatagcctctatttcatctggggaaagtcacactctacggcctggattcccaccctcccctcacggatgggtgggttggacacaaactcagaaaaaggactctacaataaaatagcacaatgagcacagagcatatagaaatttgacaagaacagaatccagacagtcataacttaccaccaggggaag

SEQ ID NO: 197519 - DNA, 688 bp, Zea Mays
caggaaggtgaagacgaattgctgccagtggggaggagcaccagcgcgagggcctgtgcctcattgcggaaagccggggacggagttatgcagggacggcgcacgtagacttatcagaagcagcgacggctgggcagctcttcggtaagtgactcccctccctcgcacctgctcggcgtaccatcatttgcatagcgtgcataccgttgttgaagccgattgctagctcgtcgtggcggggcgcggcgccaccattaccccggcgttgatctgagagcgatagcaaaggcggtcggtagtggggagtcgatggcgtttccgccgtcgtccgtcggtgaccgcgtatttttcctggagcgcgttggcgagtagacccgttggggaagatgatgtgctggtcgtcgatctgttaacagatgctcgtgattagacggagggtagtgcatgtggcatccgcaggatcttagatgggcggagcagatttaatcgcgcatacccttgggcgatccaatctagaccatccgactgataatgagcgtcttagattagactcaacttacctcttcgtttatttaaatctgagccatccaatctagatccaacgtccgagaaaacaggataccccttcagcgcagtcgttttgcagaggagcccttaaagaattgcagaatgaacctggcgtccacca

SEQ ID NO: 197520 - DNA, 590 bp, Zea Mays
cctggtggccgtatggattggatcaatgcgatatgcctgctgttcagttcaggctcagatagaactgaaaagtcagatgatagtaacacaccaaatagctatcagtctggtgaaccttattcatcatctttatttatcgagttggctgatgttgctgttagctatgaacctcattttaaacattccactctcagtgctggagcagccgaccgcaagtttttctcatgccttttagctgcatcatcatttaaactccataataaatctgcatcagcctctgcagctactgattttgatatccaattacgtgatcttggagtcctcatttctcaatcatctggttcaacaaatggtacttgcagttatggtgtagattaccttcgtcaagcaggttatactaaggttgtccagaacacattcattgaagcttctctaagattagattcttccttttggaagcttgaaatatctgattcccaatttgacattggtacatgtcatgacacaacttatggtcttattggtttgggatctcaactccagcagctatatggtccagatatgcaggatgctttagatcatctgcagtc

SEQ ID NO: 197521 - DNA, 456 bp, Zea Mays
cgccaggatccaattacagccgtcgatgaacaatcctatggtacccacgacttcttccctcccccgcgctacggacagaggcgccatgcccgcatggcggcggatcacaccggcgacatggtacggccgcacccaccaagactatacctaggtctgatagcgtctactcgaagcggaggttaaagcggattcatggatgcactacataccgccactgatgccgatgaagtacccagtcacggaagaaggggatccgcggaggattccggtcgacggcgagaaattgacgttgctccacagcctcacgacccaattgcttggcacatacggcttccccaggcgaagacaatactccaaaagccaactccgagagcagagaccccccagcgacggctatccctggcggcggcgcgaatctctctctctctctcaccggcgaggctctcagtaggcgat

SEQ ID NO: 197522 - DNA, 352 bp, Zea Mays
tgattccttccatcacccacactctccgatccttcacaggtcttcaacgaggttaacagccgggacatggagaaggtcaacgtgttcagcggcatctttagcagctggatcttcccggcggtcgccggcgccaccgccgcgttccaggtgatcatcgtggagttcctggggactttcgcgagcacggtgcacctgagcgggagactctggctcgctagcatgatgatcggctcgggaagcctgctgatgggcgccggcctcaagttcatccctgtcgatccgggcagtgaaggctcgtctgaccgccacgatgggtaccagcccatccccaccggccccaacgccgtgtgat

SEQ ID NO: 197523 - DNA, 389 bp, Zea Mays
caattaccctgcagtgctaagggacagtgcatgggaacattctctgatatatgagaaagaaaacggacactggaagtgcaagtggtgcagtattgagggtgatcatggtttaactagattgatgtggcatcttgttggatggcagaatcgacctcagtgcccaaatataccaaaggatgttgctgaaaagatgaaggatcaaatgatgtcaaagaaggagcagaaagcgagatcaggtttgtttgacggcaatggctgttgtgaggtgttgtgctcttctaatagttcacaacttgatcagaaccatctcactgcaagaatacatgacagatgttcttcccaggcttttgaccatgctaacagtgaattaaaaggatgcaacatgttat

SEQ ID NO: 197524 - DNA, 992 bp, Zea Mays
attcccgttatcccacgtacgacaccgaagtggagtgcttgcccttcggccttgccacgtcttccccctggctaggacccatcgcctacatgtccgagccgaggcaaggtgtgggtagggggccttcgacccttgatggtccatctttgattaggaggagccgagccctcgttcgtcgagggcgaccaagcttgtggggagctattgcctagcgaagggggctcttgtctttccgctgtgggctgtggcttcctcccctcgagcttatctgcatagcaaaggtgctttgcaatcagatgggaagttagtaggaaatgtgatcgaggtcagggtttggcttcacccaatagataccatgctggagatagctgtggtcaatgtagtcaaggtagttgatgttgaggtggctgtatatgaagctgctgacacaaagaggtgccatgatgatgacaaagatgtgtcggggtagtcgtcatgaaaggggatgatgctgaggtcgatgtagttagggctatcgaggacgtagacaaatgcagtgacacaatcaagagagggttgatgtagtcaagctgcgagggacgaatcatgcgacatggttgccaggcttgggaatgcattgtggatgaagcacacactagtgttgccaatatttgacgtacgaggtagagggccccaaccatgcatcagcgtttgagggaacattagaggtcttggcgatggttgctgtgcgctgaacgatggggtagaaggtgctgatgcaactcacggatgtcgaagtagacaaagtagttggggaagagacgatgacattaaagacgtggttgtgctggacgaataagaagccatacgaagtcggacgtgtctaaccgaaagattagtccaaacggatgtgtctgcccaatggcagcagttcggacgcaaggtatggtggtgatggtagcactcgatgttcgtgatggaggactcaaatagcttgacaaagattgggtatt

SEQ ID NO: 197525 - DNA, 796 bp, Zea Mays
tacaagtggagctttggagggagggaggcctggcctcgtagtttcggtgccagtggtgaaaagtggcagctctgcccacattcctacaccaccgcccaccgcggggccaccgtctccatggcaccacttctccatctccaatccaactgcccttgcgatgctctgcctgctgcacattttcctcccactactacactttattaatcacacagaccgaatcccacgccttctctttccttccccttcgttctctccctgctgctctgctcctgccgcctggctgccgtgccgccgctgatccctctccctctcttccccctcaaagccccaattgccgggtgctcctcttccacccccattgccgactgcttcccgccagagagtggggaagggaggggggtgagaagggagatggcttcttggatagggagtgggtaagaatcacacgatgcagttacctccacctttctctcttctccttttgcgggcatattcttcacctccgcctgcctagatccttctttctttggcccggcttagcttccagtctcaccaacagttctgacctcggagcatctatcaatcggcccactccactctctggtaaggcaaccagccacgccacggcaccctttttgttcgagaatctgcttgcccgcgtcgccgtcgtggctttgttcctcctcgcgactgattcgtcggcctgagtcgtcactttttgtctaattggtttcagcgccggttccatcgggttttgatgcaagagtagaggagttgttgctaggttgttgtgact

SEQ ID NO: 197526 - DNA, 634 bp, Zea Mays
taagagctggagatccaacacacaatgtatttctcttttgtctttatgtgcaaagaacaatgaaggcaaagagttggcccttagtttttctcaaggatcagatttcgttgaaatttcttctgatgttgacaagctgtgttcaatttggagcacagtttctctaagggttgatagttctgaggatgacagtgatgatggaaaaccttacaaggttataccaagaagttcgtaccatcttgtcaacaagaaaaacaactatggcattgcatttgttgatggcttgctagagtttgtgaaaaagccgggaaatccatttaaagtgcaggtttttgatgaatctattttttctgatgcttcaagacttactgttaaccatatgaaatgggacaattatacttacttggatgtggacgatgatgtgcctttttctgtgagggatagattggcaagtggtgcaagttctcaacatgtaatcatcaatgttgacaagattgtttttaccatcactcatgaagtctctgatactgatatttttttcccacttgtccaaacctgcataagtgatatccgtgttgttacgcaaatatttccatctaaaatcaggattctaagttcattcaaagtctcagcgcag

SEQ ID NO: 197527 - DNA, 360 bp, Zea Mays
ccccgactggacggagacgagctggcaaatgttaagcgccgtccatctgcacctactaggctttgtcagtgagtcatggagacgagatgagtacgtctggccacatgcatgcgaattgcgaggacattagtatttggcttttgtcagagtgagtgctcttggaccgcatggtcacacgactcgtgtctcctagccgtttagtggccctgctgccctagatggacagccaaataatattatctctctcaatcgatatccaatcccttttcatcccgtgacaacattcggccaaccttctgcatcttctctctctatatatttttttaattttttttgaatagaagtggacagagttttaac

SEQ ID NO: 197528 - DNA, 404 bp, Zea Mays
agggccgcttcgagaaataggttccttatcattattcttgggaatccattctagaagttggggaggtcagtacaatatcgacatctaaatcacacaaaagagtgtttaagctagagttgaataactaggaatataagcaaaagagaaagaatcctaaaatgtatcttgggggtggggtttcgttaggaagtacgactcagtgtagcaaccctttggccagttgcctgtggaaaaaagaatatttggcgcagatgcaccttgatatccggcatgatgctttttaactccatagaccggaaggggtatcacgactgacggccgtcgactagctgctccctgtgtcgtcgccctagctgcctgccggctctgcggtcctcactcctcagcccacaacccgaccgtct

SEQ ID NO: 197529 - DNA, 394 bp, Zea Mays
ccagaacttatcaaggaagtgtgaagcattagctgtgtcaggtttggcagaatatggtgatgaaatagatgtgattgccccagctgatatcatgaagcagattttcaaaattccatactccaaggcacaagtatctattgctgtaaaccgtataggagatacactcattctaaacacagggtatgtagctggttgcataatcatcatcatgctgagtatagttaatacacatgaatgtttaatcgtgtattcgtgttgtaggcctgatgttgatgaaggtgaaaagatattcagaagacaaggtaaccagcctaaaggatctgatccatcaatatttctgaacttcgcaatgcactctgtgcgagcagaagcttgtgattgtcccccaagtcat

SEQ ID NO: 197530 - DNA, 492 bp, Zea Mays
ggtggaacaatcattagtggttccaacaactttatcatcccatacaaaactcgagtcatcgcatgcaactactagtgtcattttgactgcaacttcattagtttccaagattgatgggacgccaccgactaacaggaactatagatattatggcaatagcattttggggaaacctccgttaatttatgcacaagaaatattgccatcaaagtttgtggggtctaatacatcaccagaaggtcttggaaaggcaaaggtgaatccagttctcttccaagaaaagtttccttctgaacttaatggttcagttccattgcgaaagcatgacttcatgatagaagaacatgttccaaacgaaaaagggatgtgctcagagtcaaagaccgaacaagtagatgtgaccatgccaagtactgcctttggattggaggatgacactagtgttgctaaatctggaagatttcatgcatatcaccagccagttgatttgca

SEQ ID NO: 197531 - DNA, 748 bp, Zea Mays
cagaggttctcggattggttcatgtctcacctcgtgtgcgaccttcagaatctttatgggccttagcttatgggggtccaatggctttacttccactaaccataggcaatgtacatgtggacagccttgagcctgcacctggggacttgccatcgtctcttgctaccatttccctttctgccccagttttcaggattatttcccaagctattcaacaccctggaaataatgaagaattatgccgtacatttgcaccagagcttttatcacgtgttttacattatgtgttgcaggctcttccaaagttggaaagtggggaagaggttctgactgatgaggagcttgttgctgccattgtatctttgtgccagtctcaaagaaataatcatgaacttaaagtgcagcttttcagcagcttgctgttggacctaaatctatggagttcatgcaattatggtttacagaaggagcttctgtcgtctctcgcagacatggtatttacagagtctgcttgcatgcgagatgccaaggcgatgcaaatgcttcttgatggctgcagaaggtgttactgggtaattcaggaaccggattcaatcgataactttgcatttactggaacaaagcgatctttgggggaagtgaatgctctagtggatgaacttttggttgttattgaactactgctaggagcagcatcttcaacagcagcagcagatgatgtccgctgtttgattggatttattgttga

SEQ ID NO: 197532 - DNA, 277 bp, Zea Mays
ttccttctgcaggtctatccagtctgaacgtttaggtgttcctgtaattgtctgtcgtgtgtttacatcttgtaaggatgactttaattcttctatttcatgcctatatgaatcccgttcagcttgtgcagcagacagctcaactgctagttcagcatgttgctttgatttttcagaacactcctttttcagcatctctagatcagccttcaacttgcgagagtggcgttcccacatttttgcctcgtcacggagctcctcaattgtttcttcagca

SEQ ID NO: 197533 - DNA, 575 bp, Zea Mays
ccgaggcagagcaggagggtgatggggaagaggcgcggaagctccgcgcggaagcgtcggagcattttctcgcggcggccaagctgaatcccaacgatggcgtccccttccgcttccttggccaccactatgcgcgcggcggtgacaatcaacgagcggtcaagtgctatcaccgtgccgtgaccctcaaccctgacgactctgaggctggtgtatgtgtgggaatatgtatattcatatgcccaatgtattcgtcggtttgcttgtgctggattctaatgtgttttcccctttatttctgggatatggcgcaggacacactctgtggcttgctagatgttgaagggaaggagagcttggagcttgctgtctgcaaggaggcagctggcaagtcaccgcgtgcgttctgggcttttcggagacttggctatttacaggtaacttgtatagcaatttcttgaatggactatttgttgaagcaagaatgccaatagtatgtgtcattaacagaggtcctgattggatatgttatgttaatgaatcttacggcttcattttgtatcgggtcagaatcc

SEQ ID NO: 197534 - DNA, 329 bp, Zea Mays
agaacgagtggcacagaagcttttggacatccggttcatcaactccggtgatcagttggcagatgggttcactaaggctatcaccgctgcaaagcttcgacagtttaggaccaatctcaaccttgtaagtggctgagattgaggaggagtgttagatgatatgaatatctgttagtctaggttcattgtaactagactcatgcatgcgtgtattgtagatgggaggtgatccttgattacaggatcctccttccatcattgttgtaaccatacttgtgtacatgccaccgccgaggggcttttccttgtgcctatataacacgcaaccg

SEQ ID NO: 197535 - DNA, 2373 bp, Zea Mays
ccgaaaccctaacctcagcggcggtgagggagtctccccgacctctgggaaacccggaatctaagtccgagtcgccgctactagtcgctcccgaaaccctagcctcggcggtgatggcagcggcggcagtgaggctggttaaggagcgcgagaggaagaatcaggtggtgccaccggcatctccgttaatggaggagcccgtgtggaaggaggaaaagcagcgtaagaaaaggaaacacgtgggcgccgcactggtggttccatcgccgccgactcctgatgcggcccaaaacttgcggatggaagccaagatgatggctgagggggcgacggtgaggaagaagcagaggcggctgaaggcggggcaggagcaatccggcgagccaccattttcaattgatgtccatccacaaggaggggaagaagctactgatgatggtggcgttggcgtcatggtcactcagtgtgtcaagaggagcaaaagcaagaactcccgggttttgaagacgcagcagacactgccccaaggttttttccctcccatggccaatcccaattccattgatcaggaccccaattattcctcaccttttggtgcattctttgcccaattcgcctacaaacctgctaatatcgctgatcgcccagcgaggctgcctcctcgaggccacccatcatctgggtcttctctactcactggaaaagagacctccaaggctgcctggacagcaacctcaaacaccaagcaaccatgcccagcctcagaatcaacctcagattcacaagaagaggcaaggatcgaagggaaagaaaagcctgagaagaagatgacaagggagatggcagtgagggagtctacccgacatttggcaatactggaatccatgtctgcttcctcagtcccagtcgctcccgaaaccccaacctcggcggcgatgacagcagcgacagtgatgcaggataaggagtgcaagagggagaatcaggaggcactgccggcagctccattaattgaggaccctgtgccgaaggtagaaaagaggcacaagaaaagaaaagtggcacaaatcacgcagatggaaaacaaggtgatgacagagggtgcgacggtaaggaagaaacataggcggcagaaggtgaagcaggagcaatctggccaaacaccatttctcaatgatgtctattcaaaggcaggggaagaagctgctgctggtggcgtcatgggcagtcagtgtgtcaagaggatcgaccgcagcaagaattccaaggttttgaagaagcagcagacactgccccaaggctttttccctcccatagccaatcccgatttcattgatcaggaccccaattattgttctccttttggtgcattttttgcccaattcgcctacaaacctgagcgccggcaagatgggaatggttcgccacttcctagtaccactggtcgcacagcgaggctgcctcctcgaggccacccgttatctgggtcttctctgcttactgcaaaagaggtctccaaggctgcccggacaacaaccttgaacaccaagcaaccatgcccagcctcagaatcaacctcagattcacaagaagaggcaaggatcgaagggaaagaaaagcctgagaagaagatgacaagggagatggcagcgagggagtctccccgacatttggcaatactggaatccatgtctgcttcctcagtcccagtcgctcccgaaaccctaacctcggcgatgacagcagcgacagtgatgcaggataaggagcgcaagagggagaatcaggaggcgctgccggcagctccattaattgaggaccctgtgccgaaggtagaaaagaggcacaagaaaaggaaggatagggaggctgcaatgattataccatcggtgcccactgctgctgtggcacaaatcacgcagatggaaaagaaggtgatgacagagggtgcgacggtaaggaagaaacataggcggcggaaggtggagcaggagcaatctggcgaaacaccatttctcaatgatgtctattcaagggcaggggaagaagctgctgctggtggcgtcatgggcagacagtgtgtcaagaggatcaaccgcagcaagaattccaaggttttgaagaagcagcagacactgccccaaggctttttccctcccatagctaatcccgatttcattgatcaggaccccaattattgttcaccttttggtgcattttttgcccaattcgcctacaaacctgagcgccggcaagatgggaatggttcgccacttcctagtaccactggtcgcacagcgaggctgcctcctcgaggccacccgtcatctgggtcttctctgcttactgcaaaagaggtctccaaggctgccc

SEQ ID NO: 197536 - DNA, 1907 bp, Zea Mays
gcaaactgagaacattttaactctagaaaaagctaatgataagttaaacaataaaatatgtatcttgacagagcaagtagaacaagccaaggctgagctgcataaggaggtagcggcaatacaagaagagaaggatacagcactaacacaattaagacagtcagagttttcaatacaagatcttgagaatgaggtgacacgactgaaagacgaactttcaattcagctggaaaaaaattccaccttggacaagcaatttgaagaattcaagagcaagctgcatgctgaaattttagacctacgcgcagagaaggacacatctctattggagttacagacatctcaggattctgtaaggaatcttgagattctggttgaaaagcaaactgagaacatttcaactctgcaccaagctaatgatgagttacagaagaacatctacactttgactgagcaatcacaacaagccaaggaggagatgcaggatgagttgaaggcaatacaagaagagaaggatacagtgctaacacaactgaagcagtcagagacttcagtacaaaatctagaggatgaggtgacacgactgaaagaggaactttccgtccagctagaaaacaattccaccttggacaagcagtttgcagaagctaggagcaatctgcatgctgaaatttcagacctacgtgcagagaagggcacatctctactggagttacagatgtctcaggcttctgtcaggaatcttgagattttggtcggaaagcaaactgagaacatttcaactctacagcaagctaatgaagagttacaaaagaacatctacactttgactgagcaatcacaacaggtcaaggtggagatgcaaagtgatttgaaggcaatacaagaagagaagaatgcggtgctatcacaactgaagcagtcagaaacttcagtacaaaatcttgagaatgaggtgatacgactgaaagaggagctttctgtccagctagaaaacaattccaccttggacaagcagtttgaagaagccaggagcaatctgcatgctgaaatttcagagctacgtgcagataagaacacatctctattgaaattacagacgtctcaggattctgtcaggaatcttgagattgtggttgaaaagcaaactgagaacatttcaactctacagcaagctaatgatgagttacagaagaacatctacactttgacggagcaatcacaacgagacaaggcggagatgcaggatgagttgaaggcaatacaagaagataaggatgcagtgctaacacaactgaagcagtcagagacttcagtacaaaatctagaggatgagttgacacgactgaaagaggagctttccgtccagctagaaaacaattccaccttggacaagcagtttgcagaagccaggagcaatctgcatgctgaaatttcagacctacatacagagaaggacacatctctacgggaattacagacgtctcaggcttgtgtcaggaatcttgagattgtggttgaaaagcaaactgagaacatttcaactctacagcaagctaatgatgaattacagaagaatgtctatactttgactgagcaatcacagcaagccaaggtggagatgcaggatgagttgaagtcaatacaagaagagaaggatgcagcgctaacacaactgaagctgtcagagacttcagtacaaaatcttgagaatgaggtgacacgactgaaatgggagttctccgtccagctagaaaacaattccaccttggacaagcagttggaggaggcaatgttgaaagtgtctagcctacatgagaatcttgagaaggcccaagctgaagcagcttgtcaacttgatggcatgagtacaaaaaccaaagatctagaggagacaatcaatcaat

SEQ ID NO: 197537 - DNA, 839 bp, Zea Mays
aaagtctgtgcaatcaacacctaaaagaggtagagggcgacctaggaaaaacccaagtgacaaactgacagactcatctggtattgtatcagaagatgtgtgtacagccctacctccaacaactgcaatctctacaaaacctaaaagaccacgggggaggcctcgaaaatatccaattccaatgaatgatggatctgtttcaggcgctgatgttgaattagggaaagagacaacttgtcagactgcttcatttggctgcagtttggaccacactgcttgcacagagtttaatgccaagttatgtattgttgcagttgatgcagcattgccacctattgacaaactgacctgttcacctggtactgtatcaggagatgtgtgtacagccccaactctaacaactgcaatctgtacaaaacctaagagaccacgggggagacctcgaaagtatccagttcaaatcaatggtagatctgtttcaggcactgttgctgaattaggacaagagtcaacttgtcagccagtttcatttggccacactgtttgcacagagtttaatgctaatttaagtattgttccagttgatgcagcattgccaattgtcgacaaactgtgcagttcatctggtactgtagtaaaagaaagtgtgtgtaccgaaccatctccagcaactgcaactcgtaagcaaccaaagagaacacgggggatgcctcgaaagtattcagacactatgattgacctggggaaagatacaactggtcatcctgttttatttggacgcagtatggatcacactgcttgcacagagtctaactctagttttagcattgttgcagttg

SEQ ID NO: 197538 - DNA, 694 bp, Zea Mays
cacgtgcaagtgggtctacaagatgacctctcgctcattgtcgtctttattatcgagcttttagctaaatcgtcatgtgcctcatttactcgggtactccctccgtccgcatgactagggcgttctgatttttttaagacgggttaaggcagaagtaaaatgacacatgtaaccctgcttcatcttgattaagcataaattacaataaaagctcattattactcggcgccttgacccaagcagcaccacgaagatggcccgctttgcaacggcttggctcctcgattcacgccggccacgatagtgcgtacagtgtaaacgggaacaaacagcagggaaggggaggcagcagtggggaagatgaggcggcggtgtgaagtgaaggaaagggtaaggatggaatgttgtacggtgcggacaggagagatgggctgagtggcgtcaaagtgcatggacaaataaaatgggctaaaacgcctaagtcacgaggacggagggagtacatggtagttgtcacaccataaacaaacacacagttgttgtggtattacaagactacaaatcctttggtgtacaatcatgatacgctgaagtatctaatagcacgaggtatgcaaacctcactaacgttaaagctaaaactagagcaagcatggtttaactagctagcataagtacttcacaaaacaactat

SEQ ID NO: 197539 - DNA, 392 bp, Zea Mays
ttccagtcctctgcaacctacaaaatgtcaggtacatgttcaaactgtctcatttatctttgtgacaaaatatagcagctagaattcatccaaatgactaacttccattctctcattatttctgaagtgcgtcgtcggtcaaccagcatggaagggctgctcacgcttgatgactggaaagaacggagatcagatgtggacaactcagaggacgagcgaaggcggctatccatagggtcactgaagaaaaaggcattgaatgcatcaaacaagctcacacattcactcaagaagaggggaaaaagaaaggtggagcatcgggcatcgtccttcacaatcgaagatgttagggatgagcaagaggagcgagccgtcttcaccttccagcaaaa

SEQ ID NO: 197540 - DNA, 564 bp, Zea Mays
ggagaggaggatgtccttggagcactctcactagttctgtatactcttatattgatgccattagtgaagtatgttttggttgtcctttgggccaatgatgacggtgaaggtatatgggaggttgtgaattgagttaatcagattcaggctttttccgcaaaagtgtgtcagaggcttacatcttccattggttccatgattctgcaggtggtctatttgccttgtattctttgatttgtagaaatgcaaaagtgtgtctcattccaaaccaagtacagtctgagaagaggatgtcaagttttcgactcaagcttccaacaccagagcttgagagatccataaaagtaaaagagaaacttgaatcgtcactactgttgaagaaggtgcttctaggcttagtcttgtttgggacttctatgtttatatccaatggagttatcacaccagcaatgtcaggtttgctttttttcattctctccacacttcaacttaaatcactaaagttctgttagtggattaaccatgaagaatactatagacatcgaatgaatgtttttattttcc

SEQ ID NO: 197541 - DNA, 520 bp, Zea Mays
gtgggtgaaataatcagaagtatctgtgctgatgaacatgcaaatcatgtgggttgtgaatacccaatgacaccagggtgttacaattctgcaccagagcaccccatatctttacttgttgaacaggcaattagtttgatagaaactgcagctggagcaccaggctttgagtcccgcgaaggtgatgatccctctgcagttctagcatcagagctggtggttctttgtaaatgtgattctggaaaggacactgcacctttgattggcaagcttactgaaatatggtggtctttaaggaaaaggagggtatcactcttcggacatgcggcacatgcttattttcagtatctttcccattcatcaactgagcttcaatcttcatatcaccatgatgctttgaaagggaaaacaagaagctacactatgcgtgcgatgctgtatctacttcacataatgttgaactatggggtggaactgaaggaaacacttgaaagtgggctttcaacagttcctttattgc

SEQ ID NO: 197542 - DNA, 577 bp, Zea Mays
ggatatcaaatggaagaatcaagagaagttctactggaagcctggacatccacaatgcacatcatcattagtttcctcagcgagatgcagaggcaactgaaccgacatgactttggctccttcgacagaatcaaggaggaatatttcctggcaatcgcgagggtaactgccatgaagctgctcagctcagctagttctatcggctttcaggtgagcccaccaaccgacaagccatgcgagaacagttacggcggcgctgctagacgtggtctatccaaaatggtagatgtggtgatggtgtaccaggcactggatcacggtttgccagcaatcttatcactgctgtcgggggaaactaaggagctcgtcgttgcagaggctgaagggcttatcaagagactgtcggaagcgttcgccaaatcatcagatgagctgaacaaaactgtcaggtcgcagctcttgttcatcgccgacaccggtgtccatcgtttcacgaagcgcatcgtggatcatgtacggttcctggttcagcacaggagggcggtctatccgatgctactagcggacggccgtcgtc

SEQ ID NO: 197543 - DNA, 846 bp, Zea Mays
gggacatacttcaagcgcccgcggcccgcagcctgctcgcccaggtcttcgccggcgacgagcacccaccaggtccttctcttccctacctgctgtgcgaaaccgatcacccgaaaccctaacttaagcgatctgtctacttgaacctggatctgatccaattactatttgtctgttgtctctggatctgatctaacgaagcgtatatacgtgcgccctaacagcttcaattctttctttttttggcacaaattaatgtgcgcacacccaggtccgctcagtccatctctccagaaatccccagatgttccacagcaagtcgctccctaggcccaaggacacatcggtggtggtggtcgtccttgagacgacagaagtgtacattgtgatcagcttgtcgacgaggagagacacccaggtcgtatacgtcgatccgaccaccggcgccctgcgctacctggggaagcatggggaggacgtctttgattcggaggcggcggcgctgaaccacatcaccaacggatcaagggttctatccaagagcactacatatgccaaggcagtgctgggatacgcggtgttaggaagccatgctctgctcttggtcgcgacacagttgagcgcgtcggtccccaatctgccgggaggcgggtgcatatacacattggcagagagccagtggataaagatccagctgcagaatcctcagccccaggggactggagaacagaagaacatacgtgagctggccaatctagacattgatggcaagttcttcttttgcgagacaagggatgttaccaggcccttcccgagtcctattacactacgggaaccagatgagga

SEQ ID NO: 197544 - DNA, 590 bp, Zea Mays
tacaactaactgccttctttcctttaggtagtttctcaaattcccaagtttgatttttttctagagctttaagctcctccaacattgcctcacgccagttagaattacattgtgcttctttacaatctcttggaattgctacggaatgcaatgatgcaacaaatgctctatatgatggtgacaaagacgcatatgagacataattgctaatgtcatgttcatatccataccttgttggggggactccagctttagcacgcgctccttttcgtattgcaatgggcaaatcataagtgccataatcttcagtttctccatgagacgtcaaaggtacatttatagcctctaatgtgtttggagagaactgctcagtacttgatgctgaattggtttcaggagcctgagattgcacatgggactttcttcttgtatatacttcgcccttatatcgtaagtcgtctccacaagatttattattctcgtgactaggatgtgtctccaattcacttggcattacttgcatcttttgagaagcaccaatcaccacttccattttatttggttgttgttccattgaatcaaccattctg

SEQ ID NO: 197545 - DNA, 471 bp, Zea Mays
attatctcgctctcatccccacaacccctcccacccttcctctgtcagtctgtcgtcctggggaacagttccaccctcttagtcacctcagtaggtgactcagttcttccagaaccgttctacctcaacgacgttcttgttgcccctcacatcattcaactttctattcatcggttcaccaccgacaactctttttctattgcgtttgacccgtttggtttgtttgtgaaggatctggctactaggacccttctcgcctgatgtgacagctcgagacactctacatgatctggccatccacctcctggcttcgaccaccacatccaccacttggcatcatcgtctcggccaccctggacccgacatcatgaccaagctcaccagtagttatgatatatcttgtagcaggggccattttgagagtctatgtcatgcatgtcagctaggtcgtcatgttcgtcttccttttgc

SEQ ID NO: 197546 - DNA, 725 bp, Zea Mays
aaggcatcaagagaagctggcctttccatccacattcattgcagctttgcctagagcgcggtgtgaaggatccattgcctccatttgagtctcccgatttgatccggtcacagccattaaatatttccactgactttgagcaatctgctgcttgcttagaactcaatagtgttggtctggtgaagaatagagatgctagttccttaaacgagtatacaggcaatatcaacttccagtcatgccaaccagtagatgagtcacttggacctttgccatacacatcgccagaggatgggaaatctggtatcaaccaagtgggaagtacaaatgaatcagatcatcctgatgaggttataccaatagatctacaagataatagctgtacaaaagcaagtcagcaaattgaggttgatgtgcccttgcggcggttgagaaatcttgacttatcatgcgagccatctgaaaagaagtgcaaatttgtagtcaagttaggtgccacgacggatattcggcgagcagaggatatagcatctaactctagctcagtttcagatccgatggcttcaaagacttgtcctgtttgcaaagtatttgcttcgacttcaaacaccacattgaatgcccacatagatcagtgcctttctgcagagtctaatactgagcttgttgaaacggtccttgtgaaacctaaagtgaagccaaggaagaagcgattgatggtggac

SEQ ID NO: 197547 - DNA, 432 bp, Zea Mays
gaaaaatggtccatcctgagattggtgcatctgagggtcatgggctcttcttgatttacctcttctcgtgcaagatttgggatgacaccatgtgccaccaccagtttttgctagaactccaatcatgttttgaggctcaaaccactaaacctcttataagtagcatatcctatacgctcgctccacaatatcaacatgtgttaccaccaatcctaaacctttcgatcaccaagtatttcattgcttttgcttgacttagtaaattgtcatcttaacttggtcaacatagtatattgctccatatacccttgcacttgtcgatatccctaagtgtgagccattatagttagtctttgttggcgccaatctgggcgtcaatcactgaagagttgtttctcttagcaggctctctgcggcggcgcagaccgtccg

SEQ ID NO: 197548 - DNA, 314 bp, Zea Mays
caagggtcgacaagcatactccatccgcttcgtcggagaacgacgtatcgttgggacatatgctcgagtacgaggaggaaggcacgacacgtgtctcatcccgtcggcgcccaaaccctggccattaccctgggccctaggaaaaagaataggaggggcaaggcatcagccatcagaacaattagcgctacggaggatgcttcaatctcgatgaggatcgaatttgatcccccttctatcgggacctcaggcctttggtcgtcgcatcctccgagcaccagtaccatagcgcgcccaccaacatcacaaattac

SEQ ID NO: 197549 - DNA, 721 bp, Zea Mays
ctggaatcatttctttggccccttgttcggttgttgcaagcttcgtctcaacaggcactttgggccctgcctcggcttcatcctggttttttatagcttcgacttctatttgctcagaaccagctttgtgttgcgttttgtcagctccggcagttttcttcgtggaagaagggcgttttgaatccagtgtgtctaaaatatctaaaacattcaccatccttttccttctaggggttgtggcagaacttttttctgccgtcagcactgttgcttctgtcgaaggactcagaacccccgacatctttgttgctctttcagtttttgacctttcggtcttatcttcggcaacctttgttaaaatcaccttactcgaaggacccttcggcactgcagccggcttttcaatcttctgtgtgggaggggcaggttccttcggctcagtagctgaagatgtctccccaccaaattcaggcattacggccggttcaatgtagcgtggtcggtgggtaaggaccttcaattttttacccttcggtgcaggctcgctcggagcagccgaagcagcaaccttttcagaggatacaccctttcttttctgcccccgtggtgggtagcgatagtcagggtacacaaatccaatagcatcaaaaaccctatttaatcttttcttttttcggctcccgaaagctgcagatagtgcattatcttcggacttggaata

SEQ ID NO: 197550 - DNA, 583 bp, Zea Mays
acggtagatgccacgaattcacgtgcgccagtatcttctccacctccggccgccgcgcgtccatcgtaaaattcctggccaccgcttgcgacgcctataaattgagccctcccttagctgcgttagattatcgcgaacccagacacgaagaatcgttagctatcatcccccagtgagccccaatttccaatttcccccaattcaagcttccgccaccgtgaaacgagcttcaccgtcgccagccctttcccggttagcccccgtcccctgcttcctcgtttaagctttctcacatacctacgatgcttgctaacccaccaatttgaactgcgagctcaccaatcactgggaacacgatcaactgtccgccacccattcggttcacgtggacagagcttgatagatcactatttgcgcaattaagttaggggaaatggtcaggccgaccccaatttcatggtcgccgctcggagaacccagccgtagccccaatcggccggtctgcacgctcgccggagctcctccgcgcgctgccgacgtcagggacctcacctgtggagaaatagaacctcagggaccccgg

SEQ ID NO: 197551 - DNA, 361 bp, Zea Mays
cctccacagagacatcgggatgggcgtcgagaccgccagtgacgagcatgagcagtggagacgacaaggcctcgatcgtcatggagacaatctcaaaaccgcggaatacaaacgaccctgtagcttggcggctctcttgaggatggacggaggccgaatggtggtagagctcgacacagtcatggagaactgggttcatgacgcggtcaaaggccacgaacgtgccaaggagaaattggtcgtcgtgaagggagacatggacacgataggaaggcaaatggacgacaacagagcgaaggacgagcgtcaagggagcagacatagggaggctccacggtgtcagatgaagggaacgttcggg

SEQ ID NO: 197552 - DNA, 570 bp, Zea Mays
cagggcagtacgtccctaaaagtttatactaggaggacagctgataacaggtggcaaaagtatgattctcaggattccccactcattcaagcccttcagccaaatcaagtctcttctcctctagaacagaatggtattggaaatgcagtccaagcctttgttgacaaagtaaccaggaaggtggatggtctgctccctccaccactcccccacagaagacgatccaagcaacttccatctgacttcatcccacgcagaagcagtcgcctggcaaagcgagatgacaaaacaaatgctgcacgaagacagattcaagctgacctgataagaagcctggatgtgccttgcgatggagagttgttaagtcctaaagcccttgaagcttatggcaacttgttcaaaaactcactctctgaagctcatatcaaagcactgtcagccctctttggatggacagtcccagatgtttttgaacctgttaatgtgttgtgtatcgccgggcaaggcccagaagaccttgagtaaggttgctgttctagcagcacctagtggttttatttggtttttcct

SEQ ID NO: 197553 - DNA, 476 bp, Zea Mays
gtcatggttggttgccggattcacgttggcaacacatctgctagcaatattccttctgagatcacaatttttcatagagtcattaagcttgatgaaggcatgagatcatggtatgatattccatttactactgctgaatcacttttggcagatgaagagttcacaattactgttggcccaacattcgatggttcatctatacctaggatagattgtattgaaatttatggccgagccaaagatgaatttggatggaaggaaaaaatggatgcagcgcttgatatggaagcattgggtggtaatgctactggtggtagatctggaaagagactccaaatcgtgaaggctgctcctatccaggagcaagttctggcagatgcccttaggattctctcacgaatatacctgctatgccaaccaagttgctttactgacatggttgatggaggcatggaacttgataatatgaaatgccg

SEQ ID NO: 197554 - DNA, 471 bp, Zea Mays
gatcaacatgatgagactattaaccatctgctggtgggctgctcctttgcgcgtcatttctggtttgagttgctcaggccttttggtttgcaggacttccttccaggacaggatatagatgattttgatcactggtggtgtttcaatagtgctcggctgggtgggctgagtaagaagggctttgactccttggtcgctttaggcgcttggatgttgtggaagcatagaaatggtgttgtcttcaatggttcccatccaaacttggtggtggccgttcggctggccagggaggaagctttcttgtggtctttgactggggctaagggtttttcttacctcctagctcaaagtcgggtggtttagttttctgttttagtgttggggtgtctgtcagctgacaaacgctctgtcactgcccctgctccagatgttgtttctggctaggtggggttcggtgtgtgtgtgtgtgtg

SEQ ID NO: 197555 - DNA, 362 bp, Zea Mays
atccaggaagtcaaaatcttgggaggaggcagtgggttgctgttcaacaaagggaaaagtagactcatcgaaaacaacgtgacgggaagggatgatacggttggatagggggtcaagacaccggtaccctttgtgatgcggcgagtagccaagaaaaacacacttagcggaacggggatcaagtttgtggctagtggtggcagagaggttgggatagcaagtgcaaccgaacacgcgaaggtgttcataggagggtactgttttgaagagggagaagtgaggagtagaaaagtgaagggtcttggtgtgtagaatgttgagaagaagtgttgtcgtgtggagagcttcaacccagaaggttg

SEQ ID NO: 197556 - DNA, 527 bp, Zea Mays
aatggatcaagagcaaagtataatggtatgatattttattgaacaagagatgcacacaagtagggggagcaagctcgtgattatatgtttaatgcatttgtttgtgcactacatttcttgcttgcatcacatttgtcttatattcctacatacttgtgtgtaagtgtttgctagaactaagacttggatgatgattgatttagtgatatttataagactagtcttagtgtgaaaggagtaactagaatcctatttattatgatctcatgtggtatctagtttcacttgtttctagcaagatgatgctaaggatgaaatgaaaagtagtaaacacgctacaaaggtacatttctattttgtatactttagcatcatgtggtagtgataatgtcccctcaattttcatatctttgcatgtgtgtaagcttgaaaccaaaccatccaagcacacatgtaggcgaggatatcaccaccaaaccgtttttatggtgcttatccaaatcttaacaaatgagcttaaagttgga

SEQ ID NO: 197557 - DNA, 1026 bp, Zea Mays
cgcagccgagctcgacgtcgcgaccgggggcgtcagcttcgcgcctcagggctccgaccaggtgcttgcccttgcctcgcttccgcccgtcggtgtgcgcgggtgtcggggtgtgtttgatctgatcgtgtaaggttagatggttagatgtggcgatgttttcggaggtgtcagctagggtttttagatggcgttttttttttgccggagtaccagtcgcttaaagttttttatgtgctcagagcatcttcaacatttcaagctggcattggtgccggtctgccggaggaggggttgtggggatgatatcggcgccttaagaaatcttcagtttcttagggctatagcgacctcagaatttcttgcaagttgattgattgaatcttttgtgttcaaataattctagattaccacctagaccacggatataaatttaactttgagtgaaagtcccatatttgcagatgcacacggtttgatacttacagatgcatatggtacttacaggtgcttgtatatttgttgaagcttaagagtttcgtgtaatcatataaggatgttttaaatctctgggtgggaatagaacttttgcacttatgatggtttgcaaaaagcaccttgtctggatgataacagtcgtcttggagggtttatgattttgtttctaacaatgccctcccctaacactttttgctctgcatttattgtaaatgctgctataatttgaatcaggtgctacaacctttggaggttaccaacgtgccagaagatgagatcctgattattcgcttcaatgaggtgctttctatcggggagggaactttgacgattgcattcaaggggactttgaatgataagatgcatggattctacagaaggtaattacttttgtagttaagttttttttataaatcaagcaacatattcacaacgtaactttctgtttatagtgtgtatgagcttaatggagagaagaaaaacatggctgtaacacagtttgaaccagctgatgcaaggcgctgcttc

SEQ ID NO: 197558 - DNA, 676 bp, Zea Mays
ctgtagcctccatggcctgcatctgttttggtttactggggactttatcccgtggtccatttatttccatcacaggcttattatatggtcttgcctgcctagagatatgttgcatatagttctctatatctgttgcctttgatgctaactcttcgaaggtgattggacgcaccccttgcaaatatatggccatgtcagggctcaagttgttcatgcacattcgtaccgcttctggttcagtaatgggctgaggacaatgaaggcttaagttcctccatctattgataaaatcagctgccctttcattggccctttgtagagtctgggtcaactcagtgatccctactgtcctttgtgtgctatagaaacgctcaaggaaagcatcttgcatttgttcccatgttctaatagagcccggtgccaacttactataccatgtgaaagcaggtcctgacaatgtttgtacgaattgccggaggaggagagcgccattatgggaggtgtcttggcaagcagctaagaaatgagccacatgttcatgtggagatccagttccattgaacttactaaactgtggttggcgatagttgtttgggaagggtaccatgtcaacttctggtggatatggtttcacatatcctggacgcatggaataatgtgtttgcatgtattgtgc

SEQ ID NO: 197559 - DNA, 530 bp, Zea Mays
ccacggtcttttgacaagagcacataatgctgttgattcagaagtagaggctattacacaactcaatgagcgtgcatcagttgaggatattcttcatgctttggttaccttgttaattcaactatgtccatcctcatgctattctctgaagaagcttagtatatacggaatatcctccatgggagggatggaagaaaatattcatagcttcagtgatgatccttgggctgtcgctggacttgtcattggtctgggaaactctgttgttgctctgtatagacttggagcttatgaagcagttactgaagtcaaggatgtattgatatcatggataccaaatgttgattcgaactctgcattatttgatgaaatagattcagtatcactatgtatgggttcatgtcttgctcttccatctgttgtggctttttgccaaagagtggagctgttgaatgacgacttggatgcattgttcaatcgctacacttctttagcttctgagctcctgaacctcaataaatctgggatta

SEQ ID NO: 197560 - DNA, 387 bp, Zea Mays
tctatctgaaggtaggcagaaaactgcagaccggacctcatcctctgagatggggaggtccaatacacctagatcgcccatgtccctgtggcaagatcccaagtttagtgtgaattctctatgtttagccacccccaacaggttggtatagaaatcattcaaagcttcatgcttctgctcatgagaggtgaccacccgatctccgactgtcaaactagagatgaagtttcttttcttgcggtagcaagcctgcaagtggaaaaaagaagtgtttgcatccccctccttcagatatctaacaagggatctgagacgagccactgtcctatctaatgaagcgagggccaaacaatgttgcttaagcctcctcatgagccatagttcctc

SEQ ID NO: 197561 - DNA, 355 bp, Zea Mays
gctgtatgtgcgggatctagctggaggtttggatgccgagtagtttttgtgtagattcactggccatgccgcggcgtactcggtgatttcaaggctttactagggagggtgatgatttccttcgcggctccttcggtactagaccgtgaccagtggcgttgggtcttggcagctgctgattcagtagatttggcgttggagagctgaatctggtggtctggggactggttgctttatgtggatctgaaaagttcctgcaaataagaggcgccttagtgtttaggccaactccagcaacgccgtgtgcgtgtataacactgttttgcactctagatgcactgtttggagagaggag

SEQ ID NO: 197562 - DNA, 427 bp, Zea Mays
ctcagaggctcgctgcacgagcagattcaagacatccattacaagaataaacaacataggtgatagaggatcaccctgtctcagccctcgttgatgcccaatacattccccgggcagaccatttagtaaaatcttggtagaagaggtagctaacagcccgcttattatatcacaccagatctgtccaaaaccaagttttttcaagacctcgataaggaaggcccacgataccgagtcgaaagcctttgaaatgtctagcttgagaaggatacgagcctgcttctggcaatgtaagaatctggtcgtctgctggtctagcatgaagttgtcaacaattaatcgtttcttaataaaagcgatttgattgggggaaaccatattttgcagccggactgctaacctgttagccaacaatttagacaacaac

SEQ ID NO: 197563 - DNA, 292 bp, Zea Mays
gtggaactggatgttaagatctacagcggcctgatcgatacgttcggcaagtatggacagctagcggacgcacgcaggatgtttgataaaatgcgcgccgaaggcgtcaggccagacatatcgacttggaatgctttgattcaatggcattgtcgggttgggaacatgaaacgcgctctgcggttcttcacatccatgcaggaggaagggatgtacccggacccaaagatatttgttatgatcatcagccggttgggggaacaagggaagtgggatgagattaagaagttgt

SEQ ID NO: 197564 - DNA, 812 bp, Zea Mays
attcttttcaagtgtgacacagttgtttctgagaagcctgtacagtttactaaagtgacacaaattgacagaaaaggccttgaggaaatattcttctggtatccagtgccacctcccggttacgcttctcttggatgtatcgtaacaaaaacagatgaaatgccaagcaaggattccatttgctgccctaaactgagtctagtgagccaagcgaatatgtcagaggatcctatctccatgtcttctagctcaaaaggtccttgctgctggagcatctggaaagttgaaaatcaggtaggccatgatgcttagacaatttctagtaaatattatttcacctcaccgcactgactgaatataatgataaaaatattctgtgttatagggctgtactttcctggccagaccagatgtcaagaagccctcagctcaactggcataccgtattgctgaccatgcgaagccgaaggcacgtgaaaacattactgctgagctgaagctgggttgtttgtcggttggcattcttgacagctcttgtggaatggtgtgtaggcttgctaaattatgtatctctttttaaaatctaaaagttttaacattgttttttctctcgtaaacacagtatttatagaattattacaaatcaaccaatattaccttttttcaggtcacaccactttttgacacaacaatcgctaatataaatcttgcaacacatggaagatttgagacattgaatgctgtattgatctgttcaattgctgcatccacattcaatagacacttggaggcatgggaaccctttgttgagc

SEQ ID NO: 197565 - DNA, 315 bp, Zea Mays
ggtagattggctgtgcggatagcaccaattttactagagtttccctaccagccttggacagcagtttacctttccagccagccaacctgttgttaattttttcgattagtggttggagatcagtcctttttacattcctgtaatgaaggggtagccctagatactttccgggtaagctagagtaatttccagggaacacgtccattagcgttggccataatgatgctggatatcgaattgggaaaatttctgttttgtcatagttgatctttagtcctgaacacccctcgaacgcgttgagaatccctttcagca

SEQ ID NO: 197566 - DNA, 324 bp, Zea Mays
ctcggattgagatacctcaatgcaatgaacaaaagctatgggctggagcctgaaaaggagcactacggttgtgttgttgatttgttagccagagctggtagaatacatgaggctgaggagttgattggaagaattgctgctgaggaaagagatggtgtggtttggacatccttgcttagggcatgtgctgctcgaggggcagaggaaactggaaagatagctgcagagaggatgatggaggcagagccatggggttcaggagcacatgtggtgatggccaacctctatgcaagcaaggggctgtggtgtgaggcagcacaggaa

SEQ ID NO: 197567 - DNA, 664 bp, Zea Mays
taaccttgcagttattcatggtcattatttggatgctttgggccctttcttgaagcatcatccagatgcagttgccagtgttgttaataagctttttgaactgttgacgtctctcccaatcacatttcaggtacatttatgttttacttaagtaaataccatatgctgtggagtgggaaccattgaggctggagattgatagccatcatacaattcaattctacgagtgatgttctagaaatgaaaatctgatactttgagctggccaaatgtttccacgtgcaatcctttcatgttgtttttttattcaaatttgaattatttggttatcatgcccatttcctagttttgtgtttacagttctcatttctgccatttaatgtatggctgtatctgcaggatccatcaaacaattctcgcctagcaaggttacagatctgctcatcattcattcgtatatcgagagctgctgataaagcacttctgcctcacatgaaggtcaggctcagctcatagttgattgcctctttagtaccatttgctattttattctacatggagctgctttatggcacatccttctattaccatggcagagaccacttatagtacgatattcaagtttctaagactatctccagcagcttacccatccttatctcca

SEQ ID NO: 197568 - DNA, 529 bp, Zea Mays
cttatggagatataaatcggaagaaacctgctgttcgatcaagtgatacttttactacgtctgatggcatagctaagagagcaagatttgacatgtctgccacttcaaacctgccagttctgggattgtctgattattctgatatgcaggctgacaatgatgccagtgtgggtcattcatccgatccagctatattgaataatgaagtgtctcctgtcgagaagatgattgaaatgattggcgctttgcttgctgaaggagaaagaggagctgaatccttgggtattcttgtctcaacagtagaggcagatgtcatggccgacattgtgatagaaacaatgaaacatctaccggaagcttcatttcatttagcaacaaataacggtgtccagcaactgaattttaaatattcctctggtctcgtaacacaaaaccttccagccaattcagactccacactattcactgcacaatctacacccacagcagatggagtcagcatctcaccatctgatgcctttgttatgac

SEQ ID NO: 197569 - DNA, 1087 bp, Zea Mays
tgcggtcgccgtctcttcttcctccgggttgcgccgtgtccaggaccaggacagatcggcgctgctccagatcaagaacgccttccctgccgtagacctgctccagcagtggtccccggactctagcggccgcaaccactgctcctggctgggggtaacatgcgactcaagctcccgggtcgtcgctctggaggtgctctccccttcacggcgtttcggacccagccaggagcttgccggcgagcttcctgcggcggttgggctcctcaccgagttgaaagtggtctcttttccgctccacggcctccggggcaagatccccggtgagatctggcggttggaggatctcgaggtggtcaacctcgctgggaactctctccggggcgcccttcctgcctccttcccgccgcggctgagggtgctctcgctcgcttccaacctgcttcacggtgagatcccgtcttccctttccacctgcaaagacttggagaggttggatctttcaggcaaccggttcactggatcggtgccgagagcacttggcagcctgcctaatctgaagtggcttgacttgtctggaaaccttcttgtcggtggcatcccctctggtctggggaattgcaggctgctccgctcgctgcggttgttctccaattcattacacggttcaattccagcagggattggaaagctgaggaaactacaggtgttggacgtatcaagaaacagattaagtggcctggtgccaccggagctcggaaattgctcagatttgtcagtgctcgtattgtctagccagtccaattcagtaaagtcacatgagttcaatctgtttaaaggaggaattccagagagtgtgacagctttgccaagactccgggtgctatgggtgccaagggcgggcctggaaggaactctcccgagcaactggggaaggtgttctaatttagaaatggttaatctggggggaaattttctttctggagcaatcccaagggatctaggacagtgcagtaacctcaagtttctcaacctcagctcaaatagattatctggtttactggataaggatctatgtccgcattgt

SEQ ID NO: 197570 - DNA, 384 bp, Zea Mays
ataccaggcttcaatttcactcaattctccgtttcgagcgatcgtttccgagccgagtgcccaaattccattttcttcgcctaaattcaaaccaagcacacatttcactcatatttacccatataaacctattcgtgaagtatcagctcaattccacatcatttcttgcctcaattcgaattacaaacctcctatggcactatttctcgttcaaacgccgttttcgcgtcgtttgacctctcgatctccatatctctcattttctgtgccataattctttgtgtatgtatttattcaaattttatatacttatgactatgtgactaatacgtgctcacctcttctatcatttcagtgaccttgcctgcccgtgagccgtctcct

SEQ ID NO: 197571 - DNA, 468 bp, Zea Mays
tttattctcatctcatggtgtttgaggctcgactccaacgcaaccaggcggagatgcagatgcatctcaattcctcggccaactacgctcgtcgcggcggcaacaacttgcgtggtcgcggtggccctcgtggtcgcggcggtcgcggaaactactcgcatggtggttcttcgtcgcgtcctacagatccgcctggtgctcgacgtcctgccaccaccaacaacaacagccggcccctttgccagatctgtggcaaaataggccacactgcggtacgctgctggtaccgtcatgatgactcctacaacgaagatccaccgatggccaatgtcgcctctacgttgccttcatacaagcttgacaactggtacggggacacaggcgccacagaccacatcaccaacgaacttgatcgccttgcggtccgagaacgctacaacggcaatgaacaagtccaagtgggcaatg

SEQ ID NO: 197572 - DNA, 1420 bp, Zea Mays
tgcaaaagaactgcatgttaggcttgcctgcttaactgctataaaatgtgttcctgtgcactctgtgcaacgagatttgcaggtgtcaacaagcctctggattgctgctcatgatccggagaaggtttgtaagataacatccctgtgaacttgacttggaactcctctatttttttacgttactcatgtgggagcttccagcactggttctgccctttttagtgaaatatgttgaacttttttcattctagagcaggaaatgatgtttattttcttgctcttcggctcatgtaccttctctaggtggttgctgaattagcagaggaattatgggaccgctttggttttgatgccatcactgattactctggtattttcaatgcactttcccataaaaattacaatgttcgtgctgcatctgctgaggctctggctgcggcattggatgaaaatcaagacaaaatgcaagtaagtcgcctacaatgcaaattttctgttctgtatttgcaccccttctgctactatatagatgctcaagggttttgcaagacgagcaaaggcacatttaaacaccgacattagtttaattattactattgggatgggatgttgttttactcttcgtgaagacatttgaactggacatggacccactgaactaagatggcatgtagggacaaagaggtaatagcacatctcaaaatcatagaatgacatccatttaaaagctggaagatataatgccgtgtatttgggtacggtcttgtgtttctactgtatctttaatttcacattcaaataaaacttgaatagaaccacgttgatcggagattttttttgccaatttggagtaatttctttttattgcgggtgtcatattatttcaggatgcactttctacccttttctctctgtacattcgtgatattggcactagtgttgaatttggagatgcacactggctcggaaggcagggtattgcattagcactccactctatcgctgacgttttggcctctaaagatcttcctgttgtcatgacatttctcatctcacgcgccctggtcagtagtttgctttgtttatgtggatcttaacattgcagtgccacttatatttaacttttaatgcttctcatggtgaacttacaggctgatccaaacgtcgatgttcgtggtagaatgattaatgctggcatccttattattgacaggcatggaaaggaaaatgttcctttgctatttcctatttttgagagctacttgaataaaagggcaagtactactttcctattaataattgtactaatataattcaatatactacattcctattaataaatttattaatatattattgtggctctttgttttcttatttgctatgtaatccatatataacaggcatcagatgagaaaac

SEQ ID NO: 197573 - DNA, 447 bp, Zea Mays
cccctactcacagacgacatcatggaactcaaccatgagggtaacaaggatccaagagaggaccacactatccatctgacattaggaatgcgtcgacacgatagcgtcggtgaggatgtgtttgtcgacggcgtagtggaggagagtcaacaggacctggtcacaccagcggatgtacttagttgattctagggcaaggactacggagacaagggcctgtattctagggagccccatcgcctaatcatgaagattgatgatgaccgatgcgttggtgtgggaagggcatagtcatcaacggggtgagggtcgtcgcccgggacacccacaaactagcgagtggtttcgatgagctagcgctcgagggtgacgaaggtcgcacactccagctcccaggcacgggcggcagtctacacgcactaatgaatggcggtgagggtagtgagg

SEQ ID NO: 197574 - DNA, 4333 bp, Zea Mays
acaaaactaggccttaatatggatgggcctcttgagcgattgaccgatgggcctttttgccttgtataaatccaacccgtcttcctcgtcttcgttagcgtcgccgtttcggtctccggaaaggaaagcaaaagagaaggagggggcgagagaagaaactgatttttggcgaggccaagccgggggtgggattaccgggagcacgctgactgggatcacggcggatggcggcggcggataggcagttggtagttgccgtcgaggggaccgcggcgctggggccctactggtccaccattgtggcggagtacgtcgagaagatcgtgaggtacgtccgggcccctggccccctattctcttctgttccgttcccggtggccggtactgctcttccctttcaggttgtagtgagcgagagaaggggaacttgccaacttggatatgggagaagtggttctggggaaatttcttcttgcctcttcgttagggtttagagggaggaccagactcgcaggaagtttgattgtcgaggctgggggtggaagagagaatgcctgttgacatgtagtagagaaggattttaaacattagcttagtgttggattatttgatgttcctgattgggtttggtgatcattactcaccgggaagaagcgaaggacctcttcgctgttagtgatttgtatgatggaagggcatatagttcctatatattgcctaattggtgatcaggcaggctacgggagtaagcgacagttaagaactgccactggaagcttgttggatgagcttgccagtttttggaactgtgctcatggaggtagtcagttcgaagttgatgttttaggtaactcattgttgtagatgtcttctcgcctattttatctatctgtatcatggcttcgatcttctgtcttatcacaacagtacataagtatatttgtttttctcgaacacacaggagactgcacatctttttataaattagggaaacgaaacaaaacaaaagggtttgcaaagcagagaacctgctaaaaaaacacaagaccaaagagctagttagcaatggaaccggccacattcaagaccctagctaggtctatggatctcagagccttagcaccagccataacccaacaaactgattcatcaaggaagctcctttgaagccttcccaatgaaggggaatccccatcaaagaccaccttgttacggtcaagccatatacaccacgcccctaagatgatgacaccattaagcccccttttttgcttttgtgcacactaagctccacctgtttccaccactctgcgaaggaaggaacatcaacagtcggagtgaggtgaaccaatccaaatgggaataataaactgtgccggaactgacagacaaagatataagtgatgagaaggtgctggattgtttctggcccttgatcgcaaaatgggcaaacaaccgggtgtggtaattctctcttttttaatctgtcagcagcccaacacctattcttcttagccaaccaaagaaagaatttacattttggtggatcctaggttttccaaagtcttttccatggttcaaaagtagctgatcctgcaaacaagattcgataacatgattttgaggagaattttcctgaagcatcatgcctccatctatgttgatcgatatcctgtgataattcaacctccctcaaagaatcccaaagcagcaaatattttgtagacccaacagagaaagatgagtcctgatatcattgacccaccggaagttatcaagggcctgagctacggttgtagaagatagagctcatttacccaccttggcgaccacatctaggacaatgtccctgaccgcagccccattcaaccaattactagtctagaaaagagcgctggccccattcccaataatagatatcatagaatctgcaaacaaatctttgacatgctgctgcacaggtaggttaagaccctgccatgtatcaattctttctagccataaccactttgcttgcaatgcccaactcttaaactgtaggtttgggatccctagacccccaaggtagataggctctgtaaccgtttcccaagagaccaggcaactgcctccattaacctccttccttcctttccaaataaacccccttctaattttgtcgatttccttaaacacccatttgggaatattcattgcaatgagaaggtagattgcacaaaccgcacaagagttgtcctaccagcaaggttaagaaggcgtggtttccaatttggtagtcgctctgcaatcatatctacccatagcataagtcacatcttcttagttctttatctgaaattggaagccccaagtaagtgcaaggaaaggtagccgatgtacagttaagaatgctgtggccttgctgaatagatgacacatcacaacttataggaatggcacaacttttatgcatattagcaaccagaccagatgctgcaccaaagcaatccaaagtgtagaaccagacatagttcatctattccaagttttacccctatttgattggtttttgagctgtttctgacttagaatctaaattgttgcacttatgaacccgtgaatcaaagactaggcaagctagttagtccatatggttgtgatggtcatcaagcaccaacatcaattagagaaaatggtaaaggccatttcccttttaggatcagggagaaccacctttctccgggaataaacgttaaagcaaggaggtttaactttgaacctgtcatcaaggggggggggtcagaccatctaaatgcagagaggttccaatctcagaaccagaagcattcaaatctaagggcttcgccatccccatgcaattccttgcatatttgatttgaagttcattgacttaaccaaattaactcttgaaagttcctccccactgatttggtcaactgcggcacccgaatcaatctctggagaaaggatgggcgcatgagatgcttcggaaacaagacccacagggatcgagggcacaagattaaagaacttcaataacgaagagatcgcaattaaggactaggtagctatcacagggccatctggaagagggaaacccaaggtggcaggaactgaagcgttctcttgagacatttgaattgaagaccctgttgaaggcgctgtcagctcgggaacgaggcacaagccgctaggactgagtattaccggtctatggtcctaaggagctgtcaggagtaagtattgccgatctaggagtggacggggtgttacacccgatcaccttcacaggcctgctcgacacctatggaagaactggcacttgatcatcctaacgacccaatcgtgttgcaaactgaggccgccacagggagggaaggtcggacgataggccaccacactagggatcgctggactggacgacgcctcccatcggtgcgggcacacgtaaatacggtgcccaggaagccgacagtggaagcacctcactgggcgacgacacacatcaacacgatgggatggggacaagcaattgaaacacttcccacgcaagttgataggctatgctctgggaggagttgaaaagagggggcgttggcgaagagatcgtcaacccacaaccttcatcatccttcgcaacaggaggaccggaggagacaagcacctcttgaacgtgcggcgaggttggagaggagaaggaacaagatccacgtcgtcacaccagcgttgagctttagagcggccaacaggacgaggggccagagaggaagagggagaaggggagatccccgacgcagggtagaggttggctgtggccgccggacttggggtaagtactgacgtgaggctgttggaggtaggggcgctaggggggaggggaggaaaggcttaggcgtgtcatgccacaacaatcctcaacgatgtacaataatctaaatatatttgtaaatttgtttgtttttaaagaaaatcgtctgattagcatgctagcaatcttggtcaatggtttgaactccagttccaataccactttcgtaattcatttttcacgcgattgtgctatgcaaatgcatcattttaatttttggtaactgattcatggtgaaaattaaaacttgtgcaggagcttttgtgcaagtgaactgccaggccaggtaattctgtcctaatgatccatttagtatctgagctctcagtttgcacatgatattccactaattgtgtcaatgcataacccgaacttcctttttgcagaagcttgtgggtactccgcctgaacttgcattagttgtttttcatacccatggaccttacagtggtatgcgtttatatt

SEQ ID NO: 197575 - DNA, 365 bp, Zea Mays
cttcaaatcctccacttccgccttgagtttgacagggggtgttaaggcccattaaggcccatatattattgtctgcctatatatatgctacagtacccacgtgggttatcatctcgcctaatcaggttagtcacaccctccacctcttcgacccctctcatggcggtgactaccgtagtagctgtctccatcggtgcaactacctacatcgcacacacatggtcatgctcgagcgcctcttccagcacccctcttcggctcgcactgcatccttggcttcctctgatgcctcctctgccgaggccttcctctcttgcttcgctggcgccgagctcgtcgcggagtcaacactcctcgtgccacct

SEQ ID NO: 197576 - DNA, 507 bp, Zea Mays
agaagggaatccgttctctagagaatatgcaataagaaccccgaaagatcattctgccatggaaaatgattctcctcgttcaaaatactgttcttgctcagcagggcactctcctgttagctctcctgtcgctatacagtgcagatcaacaagactaggcaatttattaaacaggaacgaagtactagatcgttacattgatagagggcatggagatgcaatcgtagatgagaaacagaagcagtgcgtacctacggtttctaatttgggaaggccacctcgaccccactctacagtaccatccataccgagaccattcaaagagacaacggaaagctacccagatgtggacttaaacgacgccttcctttggcgacttgctcaagagggtataggagatacccacaagattacaactatgtgcagtgcatctagacgccacataaacatgtcagatgcttctgaaagagaaagtgcaacaactgttgaagatatttatgaagattt

SEQ ID NO: 197577 - DNA, 1122 bp, Zea Mays
gttctggctgggtggatttttcaaggtacgttttctttagatgatgtgccttatagtttcggtttcaatattttccattacaaacactttgtgatgttctcagcagctcatctttctctccctaactttgtagattggcaatgatgcttctcaatttgttggtccacttgtattgaacctgttgttagaggtacacttctcattccatgacccctacccatcattaacagtgctactgaagtgcattgattctagaacagactgtgcgattatgcatttcttagcgcacctttattatgctctttgcaccaataaactttgtttcccccccttttccagtctatgcaaaaaggtgatccatcttggagcgggtacatctatgctttctcaatctttgcaggagtggtatgggtcattttgtttcctgcatgctgtgcaccacatttgtttcttgtttcggtgcagttgaaacagcaattatagtacttacgtctcttctcattttcagtcacttggggttcttgctgaggcacagtactttcagaacgtcatgcgtgtgggtttcaggttgaggtccacattggtatgtgtttcttttatatgaagaacttttattgtccttctgtaagaggttgtacagtaaacatgcatccttgaaaattgaaatctcgcgttccacattcttgagaccattcttgcttttacttagattggattggggatcaaaactccagatttgtcataacatgtggattccctacaaagccttttagtccaggtagatattggtagggaacttaatgacataatgagattgtttttgcaaattcccccttaacatcatagaatatacctggttttgttggtagtgatattagttcaatgcgaatttgtctttatcatctagaatgcagacccgctatatgatttctatgttaaatgttttgaatttttcttttaggtatggtcatcaaagtttacattgaaatttgaccttttgttcttgtgcagattgcagctgttttccgcaaatctttgcgactaactaatgatagtcgtagaaagtttgcttctgggaggattaccaatttgatttcaactgatgcggagtcccttcaggta

SEQ ID NO: 197578 - DNA, 562 bp, Zea Mays
cagaacatcagtggcaaggtaggagcctacctgtgacttcaacatatgcagaaacgacatggtcagcatatcaacatcgggaagctttctactctctagtattatcctcaggactgtggaggccgggataggcatctgatctcttgcgagcgccaatgctagcctcatcagtgagccacaattgagaagatttctattaatttgataaactgagagaaccatgtcaaatgccctctgaagccacctcctactagacatgtaggacagcgacacaattatactattcagtacccgcggctcaggaagaccgtgaagcttcttgtaattgctcaaagattgcagcgcctcttcaacattcccatccttcatagcacaatttatcttcctcaacagaatttcacgggatggcgcctcccatggtagaaccttatcagcgtttgtgaagatatacctcctccatgacccgtagacattgttaacctgaaacaggaacagaagcattcaaattattgaccactaaagcaaagtgaactgtgcacaattaagtataccgcaaactgtt

SEQ ID NO: 197579 - DNA, 584 bp, Zea Mays
gaaccgaaaacctgaatagactgacaattcagttcttttgggttcggttcgatatttgatttaaaaatgcccacccttaacgtcgagtgactgtaggagaccggtcaactgtcgggtcgtcatcttgttgtgttgacaagtgaagcactcgtaggtgaagtcacggacgagtactcgatcaaagtctgtgcagccgtgcaggcgctgaagggtcttttccatcccttcgtggacaacaaaatgggtcaatgcaaccaccttgtggcacaaatcgagctacacttacacgatgtgcttgctatagagaaggaagtcatcaatggtggagtagactgggccaagaggtgcccaaggggccaatgtgctagacttccaggtgcctcgagtatcgaggcaacaagttccctgtggtctggtgggtcagatactccgagggcagggcaacaggtgttcctggagatggcgaagatgcctaggacctagtgtggatggctcagggcctgatgtagatggttcgggggctggcgcaggtgccctaggggcttgtgtaggtggtgtcttggccctggtgtgcgagttgcccc

SEQ ID NO: 197580 - DNA, 274 bp, Zea Mays
acatgtaacatattcatgtgtttattttgattttcccatcatagcataaactaaaagttgatatgtgttgttcgttgaaactattcccatttgttgctttttgactttggggtataacgttctctcccttttatgacaaagaagttgccattatctggggtacctaatttaattctcattagtgcttggattttgaatagtcaattatggtgctagcagccctgttatattctgcccaccaggtgattcatgcaagtgctcacctcccgaagat

SEQ ID NO: 197581 - DNA, 727 bp, Zea Mays
aagaagccacagacattgaagaatcctttgttcaacacagttatagagaaaaaattggtacgccatataggaaagggacatggcagaattttcaccttagtcatatcttgtatctttgatctgctcttcatatttacatttatatccatggttgaagttcattataaagtgtacgaggatgaaataatgaccactggccagtgtttgtctgaaatgaattcccaatctttctagttcactgggtggtgctatatctgatgaaacagtctggaaggatgatgattggttagccaagccaaaggttacttgcatgcgtgccttttctgatctgcaacattcacaatctgtactgtgtactccatgcccactagtatttaactacatgaaatcaccggcatttgtcatcatttatctggatgacctttgttctatagagacctgtgagaaccacataatgccatagaggtaatgtcgttccagagtttagccagagtttttagcaacagcaaaacccaaaacccatatgtaggatatttagaaacacggatggggaaatcaacatatattttattaatcatctacttccatgtgatgtagaagttcccttgcagttcctctctctctctctctcagaccaagagtcaaataagagcttacaacaaattaatggttgcaatgaagtttaacagttcagttatgaaggcctgaagattactgttgattgaag

SEQ ID NO: 197582 - DNA, 577 bp, Zea Mays
gatcgttcagagagatacacatgtaaggagtccaaggtgacttacaccaaaagatagccgcaagtgaagaagtatagtcgaccgtgtggatcagttcctagaatctctgctcctctcattggatttgcaatatttctagatccatccttccgtatcaaacattcaggacaataccaatcaccttcaggcaaaagatcctccaccaccccaacacatttcgaatgaaatgcagctggacagccatcacagcataacaagttgccatccatgccacaaagataacattcatcgctgtttccatcatccacttcagcagatccttctggaaattgagaagaacccactgccaccttagcagaagagcccctgcccctcttttttcttcttacaccagtgcttctgaagccctcgtcgtttccatctgactctgacaaccttgaccgtatagccccgatctctagaacatcatcagagagtgaacgcagcagctcgagttttacccctgcaggctgcctatagtactctgtactcagcaaacttaaatctgtaagcttcataccatacctcaattctgagc

SEQ ID NO: 197583 - DNA, 507 bp, Zea Mays
cttcttttctacctctctacaagaaacattttcttattttatcaatggcttcaaatagcccaatggggaaagtcgatcgccattgcagcaaagactgtcattccagaaagaacatgttgcacaagcacttttctgctagccctattcatcaaatcagccttccagcttgggagacgatctgcaatcttttccaccagaggaaagaactgttgtttggataatttgtgcaaggatagaggaaggcccaagtatttgcagggaaaggaagcaattgcacaaggcaacctattttggacctccacaatgatctcttcagagcatctgataggataaacatttgatttctgggtgttgttgtgcagaccagaggcatccccaaaaaggtagagaatatcaagagtggtggagatatcagcaacagaggggtgcaggaataaggccacatcatcggcataaatagagattctgtgtagcttctttttctggacaactgctgcagaaatccag

SEQ ID NO: 197584 - DNA, 451 bp, Zea Mays
ttccaaactcctgctcctactcgcaaaggtctgtcggtatcagttgattctcctacttcatctcattgcggttggacaaacttcaacaatgcttttactgaaaacttggacaattctcaaggcacaccaggagcattgaccaccacagcacttcctggtgtaaatgaccaacaatcaggaaatttggagcgtatgacacttgactcactggttgtacaatacctgaaacatcaacaccgccaatgtcctgccccagttacaactttgccaccactttctcttttgcaccctcatgtttgccctgagcctagtcgcagccttagtgcaccggcaaacatagctgctcgagtgggaagccgtgagataagtaggcaatttagtgggatccagatacctcgtagggatcgtcattttatatacagtaggttcaagcagtgtcgtgtttgccgtg

SEQ ID NO: 197585 - DNA, 370 bp, Zea Mays
gagacatcgagtggaacaaggcacaagtttgtgggaggcagtggcagatgtgttgggatagcaagcacacccgatgacgcgaaggtgctcgtaggagggtgccaaagagggtgaagaacccactgatcgcctgggagggaagacggttgaggaggtaggcggcaatgttcaacacctcagcccaatagtgggcaggaagagaagtttggaagaggaggcaacgaggcatgttggtgcatgcgatcggctcgaccgttctgaggggaggtgtgaggacacgacatcatagctccacaccatgggagagaaagaaggtacgagatgtggagttatcaaactcccttccgttatcacattgataacctcggat

SEQ ID NO: 197586 - DNA, 902 bp, Zea Mays
gtccgacatgtctttcctgaattcagcagtcgtgttggacacctgcgagcaaaggtggaatgctctggaaatttgttttcctgcttatgtacagtgaataagtatttctaatgctgtattcatattctttgatgatttttggtaaattatactagctcttcactggtcaataatgatatagaagattaagttggattgccatggggtacactaaatctacaattttctataatgggtactccatttcaaaatgcagtttgatttggtactatacttccccatttgatttatcttatatatcatgccgctcatgacaataaaatcaatattataaaactgttacctcttctaaatgtgagtgtcatggtacctagcaaaaaatgccagttagctattgggtaaaaaaattctgatgtttgaattctcaaatatgtgcatacaaaaaaaatttgcagggagtaccaaatattaaacacccatattttaattgacacaaaattacaactattcccttttccagtggatgcattagttgtaccagtgtcgttaatcaataaaaaaccattgggtactattgatcaaatgaacagaattgaccgacgtacattaattaatgaaatgaaatcatttgatgtatttttatatcagtagtaggtgctaggttggtgtttccttcttgggaccttcaaatatgatctaggtctcttcatggttaatttctaactcattaattctattttacaataatgatctgatatattgaatcttataggcagcatgggttgctgggcagtatgcccatatcaacttttcagacccgaacaattttcgtcaggctatgcactgtatagtttcaggaatgcatgatccagatcttcctgtgagggttgattcggtctttg

SEQ ID NO: 197587 - DNA, 480 bp, Zea Mays
cgccgaactgggaccaatccggcctcatcgccgccttgcaccagctcgcccttcagggacagggcagctgggtgatggactctggcgcctccagccacatgacgtctacggatggtatactcctctctcgtctcccaccctcttatacttccatcactgtcggcaatggtcacaacctacctatcacctgccgcggttcctctgtccttcctaccagttcatccacttttactctgagtgatgtcctagtggttccctccctcgttcgtaacctcctctcggtacgtcaatttactcgtgacaacaattgttcgattgaatttgatgctcttggtttttctgttaaggatatggcgagtcgtcgcgtgatgcttcgctgcgatagtgatggggacctctacaccattccagctgccacccacacctcaccgcacgcctccattgccatcaccacctccctgtggcactctcggctcggtc

SEQ ID NO: 197588 - DNA, 451 bp, Zea Mays
caagccactagccccaagagggagaggaggaagaagtttcagaggaagattcaactcataaccaagaaggttgttttgcttgttatgtggagaagataaggggcatacaacaaggacatgccaagtcacgatatagaatcaaaagcaaatagctgaggccgaagcacggtggaattaaccgaagcaggtcctacatactgcttcatgctattccccatacattcctaagtatgtgggcaaccaacaacccacagtatcagtagcttcggcaagccactccctagctgcatgggccctgccaccatcgccaccactcatggctctaacttcgtctcacaatcaacagctagaagggcaccgtcaagtccaacaacaacacgacacacacgaagagtccaatgctcggacagtcaacaacattgtaccagaatcgagacacatttactgagat

SEQ ID NO: 197589 - DNA, 401 bp, Zea Mays
cagggttcacctcaccgccggggttcgccttcgcctctcagtcgccctggatctcgacgcctgccgcttcgtcgtggcccacgccgccggctactccaccgtccgggctggttggttgggacgcggccaccctggttgccttccagactcccactctgactccgccgatgggtcccgagtggatcgcggacaccggtgctacctaccacagcactcccgaccctggtatactcacctctgttcgccctccttcctctctcccttcgtccatcatggtggcgaatggctcgtgtcttcctgtcacatctgtgggtgccgccggccctcccggctcttttcgcgttcccgatgttcttgtcgctccttctttggtccacaatcttctttctattcgtcggttt

SEQ ID NO: 197590 - DNA, 287 bp, Zea Mays
caacaaatctgatttctcattgcacatagaccttctgacgcacattagccctaaactgcactgcatatgacaagagggctgcacttcttgtgtcattctttgtctccatcactgaacatctacatctactttaaggttaactcttaatttgtccattctcctggaagtgcatgcccacacatataccacatcatgacagcattctctaacttagacaccctcagaccctctccactgctgggccttaatctcgtgccgatagcatgtactacatactgctgttttat

SEQ ID NO: 197591 - DNA, 371 bp, Zea Mays
gccagggaggctgacggtagcgcgtgcgcctgcgtcggttagggtggttgtgcccgctagaggggtcgtgttggcctctagccaggggaggcggcggcggcggaaccagcggggaaggctgcgacagcgacagatttagccatgaagacggtggatccggccggaaaggccgcgacagtgacagatccagctgtggtggtgacgaataaaggggagggcggtggggcgggtacaacccagggggaaacaacaccgacgacgggaaaagcttgaagggggctacgcgggtgccggggttggactagagcatgatctgctcgagcaaggacgacaacgagcaaggacgacaacgacgtgaacaacgcaagcgg

SEQ ID NO: 197592 - DNA, 427 bp, Zea Mays
ttttgacaccatacttggatgtaatagttgggaaacttctattgttactccaggtggatctcacatctagtctttaaaccttaactttaacagtatagacattagacataagcataatgtttattctgttattttaaacttgtatgcttatgatgtagactgggaaccaaatggtgcaagaagctgctttaactgctttagcatcagcagcagattcttctcaggtagatcaggaaatacagttcaatccttcttgttaacatagtaatctaacataaattttcaatcttatttattcaggaacacttccaaaaatattatgatgcagtaatgccatacctcaaggctattctcatgaatgcaactgataaatccaacagaatgttgcgtgccaaatccatggaatgcatcagtttagttggtatgg

SEQ ID NO: 197593 - DNA, 444 bp, Zea Mays
aacgaacatgtacctaggcacatgaatagagttggagtgagatatctggagcaccttggtgccataggatctgtggtggcacgagcatgaaagtatgaccacagttcatccagaggtgctacttagtgccggaggagcccgacgatgtggattgtgctttctgcaagacatgggtggcagtgaggcgatatgcgaggcgagcactgaaccccaaggcaaaggtgcgcgcggagagagaggcgaatggagggagccagggaggaccgtacccgcagaccacagtcgctttcgtcgagcttagtctggcgacgaagacaaagcagtcctgttattctttgtcagcctttttcgtgcggcatctagaagactccgtcgattggaggagctgcctcatatgcgtccatgaccgttgaagcatgatcgtgtggctacaatacaatacgc

SEQ ID NO: 197594 - DNA, 429 bp, Zea Mays
tgaccgaattgctcacagaggctctccaagcaatctcctctgacgcattgaattttgaaacaagcttgaaatcatttgccgtgacatcaaacacggagttgttcgcgctcaaattcccgaaggtcgaagggaagaaatgcaacctgacacagtaacttccaggcagcacactaatggtataccaagttgccgcgttgaagaaacgggcagagctgtaaagcggtccgaatatctcatcagaactgctcttcccgaccagtgacgccgcaagcccagggctgctcaaggtaaaattcccctcaggggttatgtcgccgatccatctccgcccatcagcatcgacagtgctgttcgagccacagctcagaagcaacccgcttccatgagcctgcaaaaaccgcaagctgaggaatgcaacgctcaccacgg

SEQ ID NO: 197595 - DNA, 294 bp, Zea Mays
caaaatttaacgagacagggactaatattcatccgtagagatccagtgggatgtggggacccgaaatcagacactcctcttgaggatcgtggctcatgcgaccttggaagatttagcccattgcctccctgcccctgtaaggctacaaccagcgtccaacaatgagttatgagtgctaaccctaattcatccgttgatgtgttcctcttccttcagaccatcacacggccaccacacatgctcaacgccacagccgtcactcgtcggctcacccacacccagtcaccctccatc

SEQ ID NO: 197596 - DNA, 942 bp, Zea Mays
ggttcctcttccgctgcgcatccaagtggtcgctcaccacggggcggtttccacttcccctcgtcgcggctctgctcgccttctctgcggaggtgaacggggtcacttctgtctctttggaggacattgcaagggacatctcggcaggattgaggaccagcctgctccgatacaaggagctcgttgacgccctggtgcatgtcgcggggcacctgcttccatggggtgccgatgtcaatgccaagaacctgctcctcaacgctccggtcttgctccggctcatggagatgcggtcacaatcggacccttctgaagagtttcttatgagctgcgctccgaacattgctgcaattgtgcaggctaactctaaagttgatgacgaagtgtctaaataccttcacattactccagtgggttctgatgactttgatttcgataatcttgagccagaggagaaagaatttgaaaatcagaatatctcagagaagggcctatcagatgcttaccaaaatgtcttaaataggcttgcccagctacagaaacttgggaaggttggtaaaggtactgacaggaggaagcgattgaaaggaggactggagctggagccatgcatggacacagtgaataatggttggagaaaggacatgctgcttgaggatgtggtggatattgacgttggctatgatgcacctccaccatcgtttactgctggtttggagttgcagaagcagaggagagcacgtattgaagctgctaagcagcgaattgatgcaactaggaaggctcctgctgctccagctgcaaaagcaaataactcagaagacgttgtaagaaaaaaattgaccatgaagaatcgagggggaaagaagaaggatgatatcgatcatatccttcccagtgacaatatgacaggttgttcaggtgctaggaaaaagagacgaa

SEQ ID NO: 197597 - DNA, 673 bp, Zea Mays
ttccggtctggcgtcgtctctcccctccagtgtcttcagaggtaccccctcctctggccatggcggatggcagtgacataccccataagagaaaaaggcgtcgcggaaaagggggtcgggcagacccgcaagtgaagcatccctcaggatcagttggagaagacgacgttcgtccggcaacggccactcacaacatggttgccaggccttcttgtgtattggatttttcctccgacatggcacgagaagaggcggcgcttcgccgcgctttgtttgtcacgatcattggtacaaggccagaggtgttaggctctgaagtcattgaagaagtggcacgaagttttgagatcgaggcagattccatgtccattcatcagacctacccggaggacttcatcctgattctttcggatgaggatgctgcaacaaaggtgctcaatggaggaagagttcttagagggcctcagtttcatattcagttcaagcgctggacaagactggctcatgcaacggcagctgcattgccgtcgctggtcgacatcgagatacaagggattccgttgcacgcttgggggcagtccacagctgaacagctacttggtaattcctgttggatcacagatgtgcacccggatacttccctgaaaagagatttttcatccttcaggcttcg

SEQ ID NO: 197598 - DNA, 545 bp, Zea Mays
catatttgcgctgttttgttcaatcttgtccctccaaatggtcttcatggcttccaatggctgagtattggtataattgctgcttccatacttctctgggtcggtctcctttcgaagtattgtatggccattctcctcggcactttggtctgtcagttgatgattcggtgaaccatgctgatcttaagctctggctgtctcaacgtgagctcatgttacgagctgtgcaacaacatcttcttcgggcacagcaacgaatgaagaatcaggctgataagcgtcggtccgaacgcgagtatcaagtgggcgatatggtgtatttgaagctgcagccttatgttcagacatctgtggctgtgcgtgctaatcacaaacttgtttacaagtactttggtccgttcgaaatcttgcagcgcgtggggaacgttgcttacaagttgaaacttcctgagtcggctgcagttcatcctgtgtttcacgtatctcagctcaagccctctcttcatcccaggcatttggtgagcagctctcttcctgttgttccg

SEQ ID NO: 197599 - DNA, 544 bp, Zea Mays
gggaagaaatcctatagggaggctctgttttctcccaggcctgctgcgtccagggacgttgatggttgggtgacggtggttcgtcggcgtccgaacaccttgaagtccctccccagacctgtcccggtggatttgcgcggaagatgcttcaattgtttctcgtctgagcaccgtgcggctgtgtgccgtaatcgcgtgcggtgttttttctgccggttgccggggcaccgtgtgggcgtgtgcccgcgccggcggacggaccctcccatccctggacgcactttggtgtggcgacctgtggctatgagaccttcggagaagaatgtctgcgatcgagatacggctgtggctggcgagtctggacctgttacaacgactggtgaaggcgcgaggaagagaactcgccgtggacagaggaagaggaggtcgggcgctggggtgcagttgccttctccgcctgccttcggcctggataagccggtgagctttgtcgggcgctgtggaagagttgatcgggctgaggaggaactccgtcgtgcactga

SEQ ID NO: 197600 - DNA, 479 bp, Zea Mays
gcatacagtcatggcagctttttggatgcgtaaaagcctagcttgagccttggtcttttcagcttccagcaacctcagtcgtttcttctcagcagcagcgcgcttcagagaaattgcagagcgcacctgctccatgtatttgctctctgattttgccttctgcaccagggacctcgctgtcctctccttcagtgcggcccgcttctgcatatcggcatgcagaaggcgcatgcggttctcctctgcctgtcggacacgagactcaactctggtctcgagtcttccctttccttctcaaacctcatatccacatcattcttagcagcttgtctgagttcatccaacttggtcgagtcggttatgtgccttcgccaagaaggattagccttttatgctcagcagccagaagcttcgcttcaaggcgctgcccatggtcttcttcttgagaggaccacgacgggctccgtggcttcttcctt

SEQ ID NO: 197601 - DNA, 1817 bp, Zea Mays
cagaacttgatagatggaaggatgaccagtgcacattattctctggaaaattccaatgtcacggtcatcaatgcttgtgatttgttcaagcagccgcttcgtggttcacgccctgaccatattgttgtcatcctcagagggcttccaggtttacttgaaatattgctaactttcttattattgtattattgacaaaaataattgcatgcaaattaaaaatatatatatcaaatttctacttcctacattaatatgatagggttcttactttatagcatggagtggaagtgatagaccaaacagtgtcatacattagccttttacattatggacaacatgctttgtcctgttgttttaaactggcaatctgtaaagtttctaactttctattgcatatgtggtttgcataattgaatgatattgtatttacattatcccaaattattcatcttttgtattcaataaaattgtttcacaaatccacagttaggttgtctttcactatagttgtgaaaatgtgaactataatttgtacaaaattgtaacatgtaggtagtggaaagagttatctggcaaaggcattgcgcgatcttgaagttgataatggtgcaaatgcgcctaggatacactccatggatgattatttcatgattgaagttgagaaggtcagcaggaattggaaaactactgttcttagtaatgatattgatttagtttgtgtaataattgtcttaatctgggtaatctggccaatattctcttagaaagtggaagacactgaaggccctaaatcttctagtgcatcaaaagggaggaggcagttgactaagaaagtaattgagtattgttatgagccagaaatggaggaggtgatattactttcaacaacgctgtaattctttttctcttgtcatatgcacctgcaaacttgagctcgctatattagcaaagctatacactcatgctatcatttgtaaaaatatgcaaagctaattgtcctatcatttaatttcctagtaattcaacttttcatggtgaagcttctttatcgatacggtatctttgtatataggatgcccaatggcaacatcttaaaaatgaatcatatgctgctcctccagaacatcaacatatagaattaggcccatttttaggccttctcttggcaggctttgaataaaaagttataaattaatttttgttttgtttcagctcagtccttgctccttaatttttgtttctgttactttggcttgtttatcagctattatatagaccagtattatcgttgctgattttttgtgtattttatagacttacaggtcaagcatgttgaaggcattttcaaagacccttgatgaaggaaattttacatttgtgattggtatggagttatttagagcagcttatatcaatcattactgtccaattcccatatgtaatattttcttctcatggttgtttcttcaatattgtggaggtgccttcaaaatttatgggttaacgaaacactttaccatgctttattttttctttctttcacatcatcagtgctacatatgagaagtcaacaccttcatgtaccagtgaaagattttccttttcttttcagcaatcagaaaaaatattctcttttggttgggtcttcagttatgtactgttttgtttccaaaatgacaggatggataacttgaaatttggacagtgcccacttttgttgcacttcatgacattgtgtattgtttaaaacttcaattttagtcacactttagctgacctagcaaaattcagcggttgtgcaccaagagacgccttca

SEQ ID NO: 197602 - DNA, 460 bp, Zea Mays
cagtatgcatacatcgccagctttgaggcatctgtcggcactggctgtgggcagggtcggcctggactagatctgcaacatcctgagggtgagctccatcacttggggaggggcgcggatgttgactggcctggggacaagcagcgcgaccagcgcagacaggctggggatgggcgggcatgatcagcccagacaggctggggacagggcaaacgggcggtgtggggttatgacggcaacgagcagtgtggggtcttgtgaacagggagtcacatgggggcattttggtcaaatgtacaaatgctctaatttttagggctcacatggggatgcattttggcgtacactgacagaaagcaaaggaagtggcaaataaggaatataagttaaactggatgatggataaggaaccaaaaagaaatcagtggcaaatagagcactgagttatgtacatatggcg

SEQ ID NO: 197603 - DNA, 324 bp, Zea Mays
gctggttgactataaacctgatatacgtactagtatagagctgcacctaatgcatcttcatgcttggctgagtgtgatcctatcatcagcagaagggatactttccgaacttttagaagcacacataacagtaagtatttcatgtttggaggaactttggacttgtcctcttatattttggtaaaataatgtttagtttcgtttttctaaggcttctttctcctggtttcagacttctgaaatgactcttgcacttggggacctttttattcatttatttacggatgggtttggttccactgaagatacagccgaagatgcaga

SEQ ID NO: 197604 - DNA, 315 bp, Zea Mays
agaagattgtgattgttgataatcaagtatgttatattggaggtcttgatctgtgctttggtcgctacgatagtcctgagcacaaagtcgctgattctcctccagagatgtggccaggaaaggactactacaatcccaggtattttgttgttatcttctacccattcagatgtatggggcaaagtccctaaatgtcacttcatctctgtaaatagggaatctgaacccaattcctgggaggacaccatgaaagatgagctggaccgtgataaatatccccgcatgccttggcatgatgttcagtgtgctctctat

SEQ ID NO: 197605 - DNA, 814 bp, Zea Mays
aaaatatcttatcaaatcgtgttttttaaaggtccataatggtgtagatgtcatttccattctgcgaaatggttcagcggctgtgaaggctgctgctttaatgaaagaaagagggtatactaatcgcaggtctcgacaccgtctgacacctggaacagtaaagtttgctgctttctatgtactgtcacttgaagggagcagaggtctcacgatattggaagttgcagaaaagatccaggtatatctacatcaaacaaatttctagattgatactgacctgttatttctaatggaacctatactggtttgttcttgtttctcttcagaaatctggactgagagaccttacaacaagtaagacaccagaggcatctgtatctgcggcattgtcgagagacactaagctttttgaaagaacagcaccttcgacatattgtgttaaaactccttacagaaaggacccagatgactctgaggctgtgttgtcagcagcacgtgaaaaaatcagggtttttcagaatacactttcagagtgtgaagaagtggagaaggatgtggatgaggctgagagggatgaggattctgaatgtgatgatgctactgatgacgctgatggtgacgacgtgaatattgagggcaaggatgccaagtctcctctagttggagctcaatatgacacacaaattacagtagttggtgatgtaaagaaagaatcaaacagtgtgatgaacatatcagtgccaccaagcattcaaattaaatctagtgcaagtgtaccgttgcatactttagacagtaaagcaagtagttcaac

SEQ ID NO: 197606 - DNA, 2031 bp, Zea Mays
agctgatttgcctgcactctttcttgtcttcattgtacttcctgtggtagcttattttcttctcgggagatggcatgatgctgcaagtaagaaggcaagggtaagtgtgcttgctcagcgagctgcagaagaagcctatagagaggaaacaatggcgtgcccagacattattctgccagggtcttccttgagaactatgccctatttcagacctatgcctgcattaagacaggaataccatgaatgtgcaacttgccatgcccctgcaaagactcgttgctccagatgcaaggctgttagatattggtaattttttttcttgtctgtatccatttctataatcagtttatgtattgaaagaaaccatgcctgatcaggcttatttgaaattcaaagatctggtccatcactcatccttctccagtttatctaacctgttccacttagcaataaaaacaattctactaaagctagtttagattttgtttttttgcactgagatattagtttatggcatactgacatagtgggactgcggaaggtggcaaattaatttcatataagagagcgccattttttaaggaatttctgatttctgtaatgaaggagagtttttaaaattgatcttctgggtgtcccaatctaactcctccccaccacaaacaggaatttctgatttgtgtaatgaaggagagattgtttccccaatttttatcattcatgttgttattggccatgttgataatctaacggtctaagctcatgattctaactcactcttatgatcaaataggagcacccttgcttttcatgcgtgtgatatggattcgtaactaaggtccaagcagttttagacgcagctttgttgattagtcatgaaatatgattaattggctttttactctctaatgctaagcaatagcaacgaaattttcagattgaaaagttttaatccttgatttatctatatatccaagttgtatacttgtatgtgcctagcaactagtcaacaaatttgtctacggataagcactgttgcagcacactactagtattttggccgacttgacatcagtgtcagtacttgcggttattattttcaccttcatctggtagtgagtgggttgcctgattttgtggcctatttctatattgaaaaaccatgcagatcattatgttgtttagatagtcacgggctcatggccaacttgaagcttagggactgacctgtttctgtggacctcaggttgatatttagcaataagatttttgtctctctagtctctactgctttagccctccactgtgtggcattaatctctcctggctagaatttgtattagactagtaagtaggcttgaactgatgacttattgtctaattatatctaattcaccttaggctagttggtcaagatgttaaatgtgcctactaagatgttaaaattaatcacctcatcatcacagtagatccagcacatggttagaagtagcattgcagatataagctctttgacataatgcaatattctttgtgactgattgattgaatttgttcttgcaccattactgtgttaattgtcttcattgtgtactaactactgtgtacactatcttgcccttatgtcaatgacacctcataaagtcataatcattttgaatgtgatgcagctctgggaagtgtcaaatagtacactggaggcaaggacataaggaaacatgccaaaagtggcttggtagtggttctagcagctttggtggatctagcactgaggctactgaacagatgccgttcttgactaacttaaattcacctcttccgggtggtgacattcacttgcgtgacttgaacttcgatactttatcagaaccatcctttcccacaactgatggttataatctagatactgatccatttttggcagacagaagcaacatgaataaatcaaatcaaggtattcatatgagcgaaaatggtgctgttggtgtatcttttgaaaagaataattataatgctgatgatgaaatccac

SEQ ID NO: 197607 - DNA, 768 bp, Zea Mays
cctatgtggttcctcatgccccctatataatggataaaaatcaaaaggtagcattttatgattttttgagaagtgtgaaatttccagatgggtatgcttgtaacctagcatcatgcatcactgctgatggatgcaacctccaaggcttgaaaactcatgattgccatatcatacttcaaaggattttaccagctgctcttcgaggaataatgcacgatgaaatatatgtagcaattgcagaactaggtaacttctttcagcagctatgcgctaggacccttaaattagatgttttgcaccaaatgaaagagaatatcccaattgttctatgcaagcttgagaaaatatttcccccatcattgtttgatgttatgctccacttgtcggtacatttacctgatgaggcaatacttagaggaccagtccaatatggatggatgtaccctgtagaaagaaggttatacactttgaaacattctgtgcggaacatggcacgacctgagggttcaattgcagaagcatatgttgctaatgaatgtttgcatgcatgttcgaggtattttgacgatcttgagacaagacacaattacgagggaaggaatagagagcatgttgatatgagtaagggtgacttatctgttttccagcatggagtagaattacttggagccccaaggattacttatttagataaggattatgataagatggtttggtatgtgcttaacaatggtgcagaggtcgagccatatatagagtatctattcc

SEQ ID NO: 197608 - DNA, 1335 bp, Zea Mays
catactagtaaacccaggcaggtgatcatttctggtttcagatttggtctgaataattcctatactcaccttattgttgccaactgacatgtttcgctttaccagctacatcatttgcaaagactccattgcagccagtattgcctctactggaatcagtgccaagcgagtttcatgctacagtgccgtatcttctcagttttgtcatgggtacaactcctcttagctcttctttgaaactatgaaacactcaagaatataggtcatctttatcctggtcttcttttcacccctttcccctataagaaaacatagtcttaaatgttcacgcggaatttcttcttaaatatacttgatgtcaaattcgattgttgctccacattttcttggtagagaaatcgttaccttttttcaactcattttagtattattatccctttgttatacactaaaaaggatagttccttttccttgacaatacttttgctgctgttttaatctctaataatctccacttatacactaacaaaattctcttatctctttttcgcattattatgtatttcatttcttttcatgccacccctgctaggtcagttctgtttcttcatcaactaaacaaagagcagagaattcagaacaattcaaaaattaaaggcacataaatgcagatagtatagtatagtatagacagtatggaatcaacgaaaaatgttgtcatttataaaaatactcaaactttttgatgaaccacaatatgcatggaacgtactagggaaatcacttgaaactttgaagacgttcaaatagaactcttggatttttagggtatccaacatcttccttccacaaaaaatcttatacataatagcatctatattttaatgtattatatatatttttttgtacttagtggcaaaagagaggcatgtttcattggtaggaaatatattagagctgtaaccatgtagaaataaaaaataacttatatatatatatatatgttcttacttcagaagatatgtttcaacaggtgacccactgaagatggctgcagttagcattgaaaacaacctatctcctccagaaactctgcagaaattgtcagacagtctcacatcaatgcttcctttgctttcagtatgtcatccattgttcccgcttttccttcccagttacatacaagtttcaatacttttgaaaccataaacctaacgctcataagtattgtcgcaccagtcttcttccttttccttaaacacgcaagagagttgcatacgtttctactaactcagttgttctataatctaagacccaattaacaaaaaaaaggtg

SEQ ID NO: 197609 - DNA, 1028 bp, Zea Mays
gttcaggcaattataaaatttaaaagtgctcttgggcttgatgatgtagatgctgctaacatgcacatggaggtattgcctcccgatctatctcctatgctcttattgttttcgtctttgtttcccacattctctatgttttatgccaataaggtacattttcctctttgattgttgtactagattggtagacgcatatacagagagaggttggaaacgagtgatcgtgatgctgacatggaacaaagacgggcaagtgtctatgctttgatatatgaatgagatgtttggaacttcctgttggcccatgttataaccatgtcgaattttttgcaggcatttcagaagttaatttatgtgtccaatcttgtctttggagatgcatctgtattcctacttccttggaaacgtctgtttggggtgactgattctcaggtaattaattataaaaatgcttgttaattttttgcatgccttctctcagttttatgctttgatctcacagagttatttgttctgtattttgaagttcagttcgttttttctggcaacgttgctctttgcatagttgttatgctgcttttgatgcagttgatatttcgaagagtttggacaaatgttcatcaagtgttaatgccactactcacagtccaaataagaatgtctttctttacttaccatggtattaagtatcatttgacattatgtttctagattgacattgctatgagggaaaatgccaagaatttatactcggtgcagctcaagtctattggaagaggtaatgctagaacacagttttgtttaggtgttagttcaattataaagtcatagtgtcatattattcataagttttgctttatcaagtaaatcatatagtgtgctgtaaagacagcaatatcaattttgttgttgttatatttattgtttgatatatctcttattgcatctcaagaacattctgaaatcacaaaatgctctcggtttaggtcttgacataggcacactcattgaagtaaggagagcac

SEQ ID NO: 197610 - DNA, 593 bp, Zea Mays
ggacgttctaaattcaataatcttgaaggctgagagctatggtttgttacagtcgctgcttcgtcggggaattggacagagaatttccttatacgcctatgatgtggttctttttatgcatccggtgaggagtgacttggagacagtcaaacaagtttgaaggttttcggtgaagcctcaggacttgttactaatttagcaaagagctcgtttactccgatttgctgcaatgaccaggaggttttggcaatccaagagacgctatcttgtaatttggtgaattttccttgcaagtacttgggcctgcctttgtctattagaaagctctccaagagggaccttctccctctagttgagaaggttgcagatcgattgcctggttggaaagctgctcttattcacccagctggtagggctactcttgtcaaatctgtcctctcagctattccagtttaccaccttattgcacttcaatgccccaaatgggtcatcaaagccattgacaagattaggagaggtttcctctggaaaggccgcaaaaatatcaaaggagggcactgtttagtgggttggcagaaggtgtgtttaccatt

SEQ ID NO: 197611 - DNA, 475 bp, Zea Mays
cgaacactggatcgggcgatacttctggcgcagattcagcaggaagtggtggagatgaacaaggccaaatttcagaggaattatctaggtggcaaagtaatggtgaacacagtgaaaggagatcctagaggagtgactggccctgctgatttggctaaggagaggcagctgagagagtttcggaggctaaatggtttatgttttggttgtggagagaagtacgagccaggacatcaagctaaatgccttaaaagaggtggagcacaattacataatctgactgtagaggatatggggttggtgttgtcagatgagacgttgcaacagctggatcaggaagataaggaagtggaggaagcatataagctgtctataaatgctatcagtggaactgaccgtgagaattgtatgagagttcgggcactgatccagaatcaagtgttggtgatgttggtagactcgggcagttcctcaa

SEQ ID NO: 197612 - DNA, 723 bp, Zea Mays
ccacaagccattgcctggctgctgtcatatcctctcccatgtcgctcgtgctaccattccttgacttgccatacagtgctgccgcgcccagagcccccacggacatggcagatgcagttgtgccgtacaaggccgaggagtccagcaggcgcaccacctccctgctcaggtcaggtatcatctctcccatcccaacgatgaaatgcgcgccgatcttcagagcaaaggtcagcagcttcatgaacttactcatgtaaggtagcaaggatttcaccgtctggttgtccacttgaatcaggtcacagccgagctgatcttccactacatgcatctctctacggaattcacatagcatatgcacccgtaaggaccgcatcccaggcagtattcttgtgaccagctgtttggaccggttgtccaggctaacaagataaaacatctgtggcactttcctctcctccaactgggtgttgtaattcatcatgtagtccattttcctgtggagttcagtcaaaaggtgatactcatagtacctcaagcttgcgatttcctccttgaggtcccttattccttgttccactctcttcaatctttgtagaaccatctcaacaccttttgcaatgcctaatatggaaggatcaaccacatctgtttcggggatgatttcatgttgctgctgattgtcagggttgacagcaagttcagttgcgaggtgctgtagat

SEQ ID NO: 197613 - DNA, 420 bp, Zea Mays
ggaaactaaataagagagttacattccctatggagttagatctgacaccatacatgagttgcactgatggaagtgacctgtatgatctctatgctgtagtcgttcatctggatatgctgaacgcatcattctttggacattatatatgctatatcaaaggttatcaaggaaggtggtataaaattgatgactgcaaggtatatagtttaacatttgtattgatatgacttacgacacaaataatctgtattaagcaccatttaccagcttctttgtatatgtaggttatggttgttgatgaggaggaagtacatgctcaaggcgcttatatgcttttatatagcaggtaattgcagttctaattattttgatgctgcctatcattgtcagtgttatgttcttgtggggttgggtgcattg

SEQ ID NO: 197614 - DNA, 826 bp, Zea Mays
gtggcccttcctcctggaggtcttaaagcatttgggtttcgggcaaatttggtgtgatattgttagcattcttcttgcttctgcctcttcccaagtaatgcttaatggtaaaccaggtaggagaattattcatagacgaggtcttcggcagggggaccctctctcccccatgttgttcatactggttatggatgtgctaggctatttaattaaggaggctgctaatgatggtttgatggtgcctctaatagaaagttcagttcataaccgtatttctatttatgctgatgatgtggtgattttcctccacccggtggctcttgatttagtaatcaccatggacattatcaggatttttggggaggcagctgggctcaaagtgaatatggcaaagagcagcgttttccccatccactgtactgctgaaaatctggataccattcataatctgctgccatgcgttgttgccaacttcccctgcaaatatttggaggtgcctctatccttaaagaagctcggcagacaacactttcagccattcattgataaaattgcagatcgtcttccctgctggaaagctgatctgttgactagagctggaagactgattattgtccagactgtcctgtcttcaatgaatatctacttaatgatggccatggaccttccttcttgggttttcaaagcaattgacaagatcagaaggaatttcctgtggagagggaggaaagaagctttgggaggacattgcttggtagcttggaacaaggttacaaggccaaaagaatttggaggattgggtatattaaatctgcgtttgatgaat

SEQ ID NO: 197615 - DNA, 379 bp, Zea Mays
gacaaattccctatactagtggtagatgagctgctggacgagctccatggtgcttgattcttcacaaagctcgaccttcgctctggttatcatcaggtgcgagtacacccaacagatgtccataaaacaacctttcgaagacaccgcaaacattttgagttcttggtaatgccattaggtctatccaacgcaccgactaccttccaagcattgatgaacgtggtcgtaggggctcttctacgccgttgtgtcctcatattctttgatgacatcctaatctacagctcgtcttggttagaccaccttcgacatgtcaaaggagttctggaaatattacgggaaaatcatctcttcatcaagcagtccaagtgttcttccc

SEQ ID NO: 197616 - DNA, 475 bp, Zea Mays
aggatagcgcacatgctccttcttaaacttatccagagcttcaaaggctagatgaagcacaggtgaatgttcaaacttcgaaaagtcgctcagaaggaaatcaccaggatctctcattgcatctcttagtgccttgaaacgtagaaccttcggttctttgacttgtgtaacgataccaccttttgtgtaaacaccatagctacttgtgtcctcctcgacgctaaatgaaaacggcctagcattttttaccttccttggttttccatcattcagttctgtcatgccttggacctcagagaaaacaacaagatcaccgtcctgaaactcaagcctctcatcatcaacacaggatacaattgcaggagtgtcgttgctgatggatgcaattataccagtatgtggatcttcaccatcaacgtcaaggacagtaaactcaggtccaaaatcacagaagacactaccgaaaaggccacag

SEQ ID NO: 197617 - DNA, 301 bp, Zea Mays
tgaaagctttcccaaggacaggggcagtccaagatattgacacgggaaatctgaaatggggcaggggagagaagcttggacccgcatcaaatcatcttcggtacaacgaatggggaacacactacttttcaggacattggtcttgagccccgaggcttacccaaaaagccgaaggatctccaggaccaaattgatgtctgaagccaccggcctaagaaaaaccaccgcgtcatccgcgtagagaaaaagcctgtgatgcaaagtcccagaagatagctgctgaagtaacccttcatcggaa

SEQ ID NO: 197618 - DNA, 567 bp, Zea Mays
cttgctgtgtctgatcgttgtttgcgcaatggagcatctgataatttgcttcagttgctcatcgaacagaaggaagaaaaaggtccaggcacaggacaaattcatccatatggatctcacagtcttgggaatgatacttctcagtactgcttgaggctgagagacaaaaaagttgcagctcagctcgctctaaagtacttgcacagctgggaccttgatgctgcaaccaatgttctaactatgtgcatgtgccacttacctgagaatgatcctatgcgcagtgaggtagtttcacttgcatttattcatatttgaagttaaaaaaacatctgaaaatcctctgtctgattgaaccatgattatacatgccagctaaagatgttccaatacatatagctgaaatggcttatctagctaattatagtatttcacattacaatctgtggttgagtgctgtaaagatctgtcacgccatagggaagctattttatttctttataattttgtttgcatcattttgtaacaggtgttgcacatgaagcaatctttacagaggtatggccatat

SEQ ID NO: 197619 - DNA, 421 bp, Zea Mays
agggccgaagctctgggagggaccattccaagcagcgaattataaaaatcccaaacaacctccttcttctccttttgatcaatgattaatctgttttggacctggatttttccaataaaattcttctttttcctatatctggcgtgctggtgaaagtatttagtgttggcgtcaccttctttcatccacaacagcccactcctcaaacgggctatggttctctcaagggaaaccaaagccaaagaaagatgttttaatcgttgtcttagccactcttcctgtggggatagagatctagaatctcttgcaatttccagcttatgaagaatttctttagccatcaacatctgtttttttatgttgcccacctttttctgactccaggaatgcagatgtttggacagcctcattagtttcccag

SEQ ID NO: 197620 - DNA, 682 bp, Zea Mays
ggaatcataacagtgctgatgttgatggggttggaagacatatagacagtactgatgttgtcagagtagaccagagtggtgcggcgcagaggagcttgcagttcttggagtaactggcgcaaccaggtggcgtcagcgacggctttcgccacacctcagtattcagcctcggcgctggatggggagaccgtgtttaacgctcaaaggactaggagatgagactgtcacccaagaacacggcgaagcccgaggtagacttgtgtgtatcaggacaacttgcccaatcaacatcgtagtaaacctctagctcggtctgtgtacaaggtcggatcaacaagccgagacgtagagtgtcatgaacgtaacgaacgatgcgcttcagagcagctagatgaggctcacgaggatcatgcatatgaagacagatctgctgaactacataggcgatggcagacctggtgaagatgaggtaatggagagccctgccaggctatggaaatccacagggtcagccactggatcaccaacagtaccaggcaactttggattgacattaacgggggtggagcagggcttgcactcaaccatgtcgacacagtcgaggatgtcaatcatgtactggcgctgagacatgaacaatccatctgccatgtgttgaacctgcatccttaagaagtgatga

SEQ ID NO: 197621 - DNA, 394 bp, Zea Mays
ttagaaaaccaagacattgaagccacttgtttaggagatttaagcatttttttggagaaaactagaccatttcttgttttccacaacacccaatccacaccaactactatcacccacaaggacttgttcctatctccaccatctttgttcaggcacagctcctggaatttatcaacgatggtggtattttcggccagcccaagctgtcctgacccagcaccaggccaccatcgctataaggcatctgaacagcagatggtccacttgatttttactagatagcatataacttccactatttcgaatgatatatcactacaaaaatcacaagtaaaagtgtcacattggagactgtcactttcttaaatgacttacatttggaatcagaaggagt

SEQ ID NO: 197622 - DNA, 563 bp, Zea Mays
cgatgctgaccccaatgggtgtgatccatctgacgctgaccccaatgggtgtgctgtctgtgttgctgatgaaaatgaggaggaggaagaagatgagatccctctgactcggaagaacagtcggtgatacgtagccagtggggaaagtagtggagttccttctcctgctctgtctgccctcattggtctacaagaattgtctctggcgaactttgatcagactcttgaagatatggttccagaggatctgttatcagagcccggcggatggtgacgcgatggatgtttgtgctgatgcattcgacgccgggttggggtcatcccgggcagcgtcccgcgcctcatcgaccttggagcgcggtcttgagggtcaggaaactgacttggattgtcctgctcccatggaagtgattgagggaccttcagccttagaggtggctgctgcagagaacttggccctcaaggatggtgttgacacttacccagcccccgagggtgttgccggggatgattcggctcgggtgggaagcgcaagctgcaacccagccccgagggtattgccg

SEQ ID NO: 197623 - DNA, 337 bp, Zea Mays
gatgaaagctagacatgaataaataggaagttagagtcgtggcaagagaccctagagtccaaaggttttagacacagtagaacccgaatacatgagatgtgattcggcactactacacatgagggatgagatgttagttttgaagatcaagtagtgcttagaaaggataccttttggtatctaggatcaatgttatagagagatgaggatatcgatgaacatgttagccatagaataaaaacagggtggaggaagtgataccaagcattggtcttctatgtgacaagggggtcccagaggaactaaaatacaagttctataggacctgctatgttgt

SEQ ID NO: 197624 - DNA, 371 bp, Zea Mays
aaatacactaatgtactagaatattagatgtcacatttaagaagatgtgttaatttaaatttctcttctagaggatggaaaattgatggctgatgcagaagctggtgaattttgggctttgtttggtggcttcgctcctcttccaaagaagacactttcagaggataacggggaagacaaggaaatcatcatcaaattgatgtggtatttcactagtatttttcctatgtctacaaagcatcagctttagttgtcaacaagaacaattatgtactatttaaattatgccatctgttagattaattttctctcaaagttatgaaattgaatgaattatttatttgaccagcatcaaccaaggaaaattggag

SEQ ID NO: 197625 - DNA, 451 bp, Zea Mays
tcgagctcgaccgacgaccgtcgatcggtacccgtcgtcgtcgcggcgtcgtcgacgacggcataataatataataaccaggccagggcagggaagatggtgaagttctccaagcagtttgaggggcagcttgtccccgagtggaagcatgccttcctggactactgcctgctcaaaaaggatctcaagaggatgcagcacgcccggcaccatgctgctgccgaccgtcgccaagcagcaggcctaaccgacacgcaagaaactgccgccggccaccacgcggaacgggcctctctctctctgtcccagtggctcctggacaggctccccgctggcctcttcggctccaatgctcccaacagggatcgtcatggggtcatacacgtacgtacacgatgcgaactaacacctgttgctacacgcaccgtccacgcagcatacatagtccatg

SEQ ID NO: 197626 - DNA, 277 bp, Zea Mays
aataccgccatgtgaggtcgcgaacgtgttcggtgtgctctggagactctcctcgaccatcaaccaagcccagagtaaagctcctgacgagatgcccatgcgagcggacatacatctccccatggtgctttgaaacgacatcttcttgcacacagcgggcagcaccagttccaagggatcccggggatggagaccaaattatataggctccgggtccaacagaaacgacccgagaaaaagggggagagatacgagccagcgatttcggagtccgcgc

SEQ ID NO: 197627 - DNA, 1915 bp, Zea Mays
ggcatgtcagaacgatggtggatcattgttgaggtgtgtgattacatgtattgtacttatatcagaaagatggtgcaaaatttatttcacctgtctttcactaaatttattatcttgttgccatgccttttttgaggggtcaagagactgtttcctcttttctaatcttctttatggggtcttttggtatgtaactgaacaatgcaattatatttgctttgcttctaactttgtgaggagacacatatagacctagaaagattggtagtaaatgcatagaaatgtcattattttcaggaacctcttatataaaatgcgatgtgcatgcaattcttttaatggtcatataaatttgcacctttttaaagattaccaatttaaactttttgtagttgattcctatcgcaggcatgcagtggtcagtactcagtaacattaacattttattttacaggattctgaaaatgataccatttatcattcagagctattcacattaacgaagaagatggcaagaggaacacctacaaagatatcttttaatgtaccaatatttgaacctcatccgccacagtactatatacatgccatctcagactcatggctacatgctgaaacactcttcactgtttcttttcataatttgacattgccacaggtgaatcgaacaatcgctcactgatgctcgttaatgcttattttgattattgtatactgaatgctgcacccattgcccatgcagacacaaataacacacacagaactcttggacttgaagcctcttccactgagtgctcttggcaacaaaacgtatgaggatctgtacagattttcccatttcaacccgatacaaactcaggtgcctttggaacccagttatctaccgttccattgccaatgccattatctgcattatagggattgtaattaaacttttaaagctattccaaccattgttttttgttttgcaactgttccaggcattatcagttctttttgcatagtggtgagttgtttgtgggaactgggaaacatgtattcttgattgaacataaattggagaatcaagtaaaaattaccaaatgctaaacaatttgcatccatttttttgaagttcacatgatgctttttgtatgcatctcttgttgtataatgcccaaacacacctagtaccattgctgaattgtttgctcatttgtatgtaaactattaaatttctactttcttcctttaggcttttcatgttctttatcacactgataacaatgtactcttgggagctccaactgggagtggcaaaacaatttcggcagaacttgcaatgctccatcttttcagtacacaaccagacatgaaggtttgtttatcaacttccaaaaaatctgaaagtttttttttggcatgatggcaatttaatgccttcccaatacctgttttaggtagtttacattgctcctctaaaggcaatagtacgagaaagaatgaatgattggagaaaacgtcttgtaattcagcttgggaagaagatggtaaagagcactccatagcttttatttctctggtacattaaaagtaaacattcatcttaactgaagtaacacttctcataattgataggttgagatgactggtgacttcactccagatttgatggccctattgtcagctgacatcatcatttctacccctgaaaaatgggatgggattagtcgaaattggcatagcagaagttacgttatgaaggtctagacctgtctttcatatattagctatttagtttttccctcattccgtagatcatatataataggttaatttcattttagttgttgaatatattttacatgattattgacaggtcgggctcatgatattggatgagatacatcttctgggagctgaccgtggacccatc

SEQ ID NO: 197628 - DNA, 338 bp, Zea Mays
gagttagtcacataaagttaagatagttgtgggtaggataggtttcagaaggtaggttggttagtatatctgttttgttgttaggttgatagagaggggttatataaccatctgatgggtaaggtagttgcatatggtcaagttagtatagggcaccaatttaggttgaaacctatttataggagtaaggtctaatctacttcactagtatttaactatcctattaagtaattcacattagattagataatattagattaaatctaggttagattgttatgactagatagactagataagatctcattgacttggattagatcatggtggttactttg

SEQ ID NO: 197629 - DNA, 438 bp, Zea Mays
acacttacagttgtcaagcagatcctccagtaccatcatagtacgtatactcgactacgggcttcttcgacgctcctccatccacgagctaatcatctacagtgacactgactagacagggtgcccaaaaacccgcaaatccacctcaggatacgatgtgttccttggaaacaacctcatctcctggtcctccaagcgttagcccatggtcttccgccccagcgcctgaggctgagtaccggatcgtcgctgatggcgtggctgaagcgagttggctccgacggctcctccaggagctccacatctcgctcaccaagagtacactcatataccgcgccgcctacctctccatgaacccggccgagcaccagcgcacaaagcatgttgagattgatcttcattttgtccgtgaacgcattgtcgttggggacgttcgtg

SEQ ID NO: 197630 - DNA, 385 bp, Zea Mays
ggacaaggtgggatatctcacctcataaagcccgctatgggctatatcattaaccttgctcttaggggtattgctctatgacacgttggagtgggagacacaatccgcctaattggttgcccacgtagtcttattctgggccactccgcgtgttgactttgtttgagtatttgtttggttacttgcacgtgggagacgcgggctgcacgagtggatgcaaaataagttattttgaggttatctgtctgtgtccgcttgtacgccagaaatcgctgtatctagccagcctggttgcacgcgagctagctgcgcgacgactgtgaaccaatcaggcggaatcagtctctgggaggacacctttctggatcagccttggtctaatgag

SEQ ID NO: 197631 - DNA, 334 bp, Zea Mays
cgcaaatatgtatacccatataaatttatgaactcttccaagacgtcaagcatcttagtcatctgagtaaatatcaaggccctgtggccttctgatttcaaacgccttaacagaatagcaagttcctgcaacttcccacagtcaaactggatcaaacgcctatcaggaaagtagacttgacgacgaacgatagcagaccttataggagacagaatgggagaaaacttgtacatgcatttttctctatatgctggatcaataaaaacaggagactttcctttgctgcaccagcaaacagggggaggagctcgagcagctggaattgcgaatgtaa

SEQ ID NO: 197632 - DNA, 543 bp, Zea Mays
gtcgtagcgaggggtttccttgattggtgaatcttcgatcaaggatggagcaccgggctttgctgctcggcgtggcgctggcctttctgctggcctctggctcccagggcttgaaccatgaaggttggcttctcctagcgctgaagagccagatgaacgacactctccaccacctcgacaactgggacgcgagggatctaacaccatgcatctggaagggcgtcagctgctcgtcgacgcccaacccagtggtggtgtctctcgacctcagcaacatgaacctgtcaggcacagttgcgcctagcattggtagcctgtctgagctgaccctccttgatctgtcctttaatgggttctatggtaccatccctccagagattgggaacctgtcgaaattggaagtgcttaacttgtacaacaacagttttgttggtacaataccccctgagctcgggaagctagataggctggtcacgtttaatctgtgcaacaacaagcttcatggcccgatacctgatgaggttggaaatatgacagcacttc

SEQ ID NO: 197633 - DNA, 359 bp, Zea Mays
attagatactaggtatacctctatataccgtgcccttctgaggatagcatcttcgtgatccttctttgccacgacagaatcttcatattccttctttgctaccttctcctgatctctgctagatttctcaacatcattttctacaaagttactcacatcgcctgtgtctgaagcagggagcacaataacagacactagcttttgggcaacactcgattcacttgcattgtttccatcagaatctttacattcctccatgttcccttttccctgattagaagaagcatgctgttctgcgttattttttgaatctactgcattgttagaaacttctgttccatcttttgcataaaagaaat

SEQ ID NO: 197634 - DNA, 443 bp, Zea Mays
gctatattggggtatgattggctaaagagccatagtcctatggagtgtgattgggacaacaaggtgctgacattctgggataaaggggtcagagtgcagctgaagggggatggcgtaggaagtacagaggtattgcaagtgtcagctgttcagctgagcaggtggatgaagggaaatgaagtgtgggcttttgtgatgctcgaagcaatacaggaggaaggtgctgaaaaggaacaggaaccgctgaggcagatacttaaggagtttgaagatgtgtttgctgtgcccactggactacctccggttagaatgtatgaccatcatataccattgctcccagggtctattccggtgaattccaggccttataggtattcacctttccacaagacagaaattgaaaggcaagtgacagagttattaactgcaggattgatagtacc

SEQ ID NO: 197635 - DNA, 515 bp, Zea Mays
aaaaagggggttcttctcatgcgcaacatgttaacacactccacatcattgaagttgtaaattctattcaagtttctgtgcctctcttcatccattgcactcattggggcataagtgatcctaggtcgtgccacttgacactggacaagtctagaaacaaaaaatgcatacacaacagcaacaagtccagctgccctcactattaacatgcgcctctcatcatcatgatccatctagatgcaaaggaacagagccaagtatcacataaaagctcaccagcagtaacatgatgcagtactagatcataggcatggcaacaaaataagctcagatctagggaccaaatcataggcatggcaacaataagctcagattaaatgctataaaatcataggcatggcaacttaagctcagatctagtgctaatcaatcatagacatggcaacatataagctcagatcattcaagaaatgaagggggaaaggggaggggaaggaatggcgtctgttataccg

SEQ ID NO: 197636 - DNA, 1362 bp, Zea Mays
ttgttctttgggaagagaatggtcggccctttggctgcttgaagtccatggtttgctttaatgaagcttgtctttgggcaggatgctgataaccatctgaggctggctcttctgtattcattttctttgaccagccctgggtacccaactcagtgtcaccattgggttcagtgtgttggtcactaggatctacagaattgcttcgttctgatcccatcatttcaggttgtctctgatctctgattgcttgctgattttgtttttctgcagccttttcaccaataccacgagaagcttccttcacagtacgtgtaacaatcggtgctggaaaggacgactgcctcctgggcgttgtcgtcttcatagtaccagcttgtttcgcatcctctacaccgatgaagacggtttgcctagctcgttttttgccaagcatggcctctttgtgttcatttaacttgggtctctttgcgggattgctcgcaaacctaaacgcataattggcttccactcctttaacatcctttgacctgttgcaaggatctagatcatcaccaggctgatttcctttacattcagaaatttgcatgttctctgatcctgtagaagaaccatgaaccagatctttagacgcatcaaccatttcagcatcactacattcagcagcagtatcatctttagtcacaccaccagatttaatgagatggggctcgctctcttgggattctttcttcaaatgagtgcttgccgtaccagtgatctcatctttgttgctactccctgcattttcagaaatgctatctgcatcaaagcattctccttcttctctttcaacggcttgtgacacctgattgcaagtttcagccttaggagaagcactatcagtggttcgattgtttaccatggccgttgattgtatactagaattctgattatcttccaccttcatcggctcctttgtattgtttgaatctttgttgttcttcacaaagggctgaaagccagatccaatggatgcatgcttgaaggcattattatcgttcaatatcccctgtgactgtgatcctccccctggctgaaacaatgatggggcatacgtcattggaacagggagggatttctgaggttgtgacacaacaacagcagcttgtgacgcgacaacagcagcttcttgtgacacaacaacagcagattcatttggtacgacagcagcagcttcttcttcaacttctgctgggagtttgttaaggtcaaataacatcctttctcgagaacccatgtcatgtgtagatgcatatagcttgaatctttcaagtagtagaaccaggcaatttcctggaatacaagagcacccaatggaagaaa

SEQ ID NO: 197637 - DNA, 278 bp, Zea Mays
ccaggctgaaggggtatcgtgagccctcgtgcgtccgatcagcactttatggctgtgattaaattcccccacaccagaacgatgcacgcaggcaaccgttcgatcaagatccaaaggtgccgacatacctaaccgaaggggtatcctcacatttaatcgtggccggtgatctgcatatgcgcggcagagagctaaccagagcgcgtgctaatctcggccctcgcccacggatccaacgattactaacctttcccctttcctaaccatctgtggctgct

SEQ ID NO: 197638 - DNA, 294 bp, Zea Mays
ttgggagttgaaccatcttggagtgaagaaggcagaaatgtgattaaatctgttggactcgaagggatttcgtaactgcagcaaggccaatgaaggcaaattagcacttgatggaaagcactcttcgtctacttcttggtggagaaagaatcaattagagataccaaatgaggcgtccagaaactgtcgagagaacttcatgactccaccagccgagggaattcgtaactgcagcaagcaccatattaaatggagcatacctttcatctcccaaggttgtttagtgcaaataag

SEQ ID NO: 197639 - DNA, 855 bp, Zea Mays
gctggatatctaagcttgaagtcttccaggtgctcccaagaagtatccgtctctgctcggcctgtccacttgaccagaacttcccacacccaccgattcagccttgcacggaggactttttctggtgtagggatgactctgccgttgaggagctcgggcagcggtataacttgggttggagcctcccctatgaatttcttgagtagagaaacgtggaacacatcatgtattctggccctgggaggaagctgcagcttgtaggagacagtgcccaccctcgatagcacttgatatggcccaaagaactttgggccaagtttgttgggtgtagcagaagtgacaccaactgctgtgcgctgctgtaagcgcagccatacccaatcgccctcatggaactccacttcccgtcgatgcttgtcctggtagtttttcattgtcacctgtgactgaatcaatcggtaacgaatagccgccaagaattcgtcgcgtgcctgtagttgtttatcaacagcagccacctgtgatgttcctggatgatagggcagaagagcaggaggttcgcggccatataccaccttaaatggagagcatcggagagcagtctggaaggaagtgttgtagcagaattcggcccatggaagccatttaagccactctcttggtctatcccctgctaggcaccgaagatacatggtgataattcgatttaccacttctgattgtccatcagattgggggtggaaagctgaactcatgtgcagcttaactcctgctagctggaacaattctgaccagaatgtgctagtaaatattgtatctctatcactgacaatggagcatggcaacccatggaga

SEQ ID NO: 197640 - DNA, 373 bp, Zea Mays
aagccaatgctcaagcattccatcaaacagcgactaactttgtcatgccagtagcccctgctcagaattttgtttcgtcttcagttgcaccattagcgccacctcttagcatgatgccgcctccattcagccagccagttgttcagccaggtttttcagatccactgcaaggttctccagctagagaagagggtgaagttcctgagtctgagttggatccagacacaaggagaaggcttctcatattgcagcatggtcaagacacaagagatcctacacctccacacccagcgataccaccagtgcaagttccagttcctccagtgcaacctcatgggaattggtttcccacagaggatgggataaacccaag

SEQ ID NO: 197641 - DNA, 1192 bp, Zea Mays
gggcaggcggtggagggggtgcagcaggcctaacaggagatgaagtagatgcaaatagaggcagatgtgatgcagcaggtctaatggtagatgaagtagaagcaagtagtggaggtggtggtggtggtggtggtggtgcaggaggtttactgagagagcacctagaaggcggtggggaaggtggggattgaggtgtccctgacagtataagagatgaactcaaagcaggtggttggggggtcagcggttgtggtgcatgagaccttacaggaaaaaggcctaggcataggtggaggtgggggtggcacaggtggaggttgtggtgcagctggcgctggagatctgaaagaagttggagatggaggcagatgataaatcctagaactgaaaactgatgatggtgggggcagtgggggtgggggtggagcagaagttggcaacaattcaattgtgacagtagttgaggatttctgatgatttgtggccggagtagtagttccaagtgactgaaatgtcaattgtctctctggatgagatggaaggcctacaacatgaaaacagtttaattataaaaaatacatgaaaattattcttaaaatgcattccgacttaacctgaattgttgagggtaggttgggatgagccttttgcttctgacatcatagtagaatctgataccagcaaatctagtggcgatggtggagggcgtagcagtggcataccctttgttacaacaggagtacctgttgtgtcaaaggtcaaagtagttgaaccacaacgattctcagcacttccagcatggtcttccaacagagctgtaattccaagggctgaaggtgcactattaaatcttggacaagctgaaagtaatctaggactggagtagccagaaagagcagggcatgaactagaaattggaaatcgctgtgacataattatagtgggaaaagagtgttggcctgaaccatgttgctcatcaagtttagcattttgatccttaagaactggatcaatagatttcatggtagagggaacagccttttccagtgaaattgactgttttgcgttactgtcaaccttgtgaactagagagccaggattttcttggacaacagaaattccagttttaacttcagaattagtggtttgctccaacaagaccaatctctcttggccaacattttccagtttg

SEQ ID NO: 197642 - DNA, 5966 bp, Zea Mays
aggacaccatgcgtctccttggggtaataaaatcactcccagcaataacttcaagaattggagttggaggtgccgcatcgagttgggtgataaaagaatttattgcccagatccatacagtttcaaaagttgcattgcacaggaaatcaaacctagcctcttttcttgaaagtcacggtattaattgtacttctgacttgtttaactaaatttgtatgcttgactattgcatgttgacttttagaaggtttggatattctattaatgctgtctgtttttgtttcatcttttgtatgttttttttttcaaccacacagaacttcacatctttatattaataaggaaaagaaagcatccaaaatagaccgtttacaagagagggtacatacacccatgttgtttttgggattagatatttacattaatttttaccaattagcataatggcgtatgttgcatttatgtgagttggagaatgaaaccctaaccctaactagggttgggactgatatatatatcaatagttgttggccctggcccattacacaagggtgtgacagtaattacaaggggctaactccaaaaccctagacaggtactctaacaatgtgcccccctacatacacataaaaatcattttggaatgtactgattttttcatcgtgtcaattatttgccttcttttttatgtttttgtatttgcctcctttatttctgttctggagataataacctgcatgcttagttaagtttcgtgagaaggtaggctagatgattctgtaggttatccttcttttctaacatgtgtaaacatgagtagttttacagtttaaattacatgaaactgcaaagatgtcacatcaattattctgctgccgctgctgcttttgttgtttttgatgtgcaaccttgccaactttactctgcaatctacatttgtatgattgtatctactagtttgagcatagaacaccgcaaatgtttagatacaataatcaagtgctgaaatgtgaaacatttctaatttaaaatattttctaacattcaaattcaaatatttattataatgactatattttgcaggtacagaactagtcgatggtcttatgcaggtattctggtgtatattagatttagacaggccggacacacagacaataaatagtcttgttgtgccttgtgtggaatttatttatagctatgctgaatgcctggctttgcattccaatgaaaaaactagtgtgtcagtgggacctgcagttgctctgctgaaggagctgctctttgcaccatatgaagcagtacagacatctagcaggtgattttctcttctactgttcatacatcagtaagagtaccacaattaatatttgctagtttttcttttgtttttgtatcattttctcacttgtgttttattgctgctttccagtttggctatctcatcccgatttcttcaagtccctttccccaagcagacaatgatagctaatgatgatgctcctgaaaaccaagctaaagcaagtgcttctgctatgaattcaaccagtgcaaactctcaggttatgattgaagaagatcctgtcacatcatcagtgcaatattgttgtgatggctgttccaccgttcctatacttcggcaaaggtggcactgtagcatatgtccagattttgacctatgtgaaacttgctatgagatacttgatgcagatcgtttaccagcaccccattctaaagatcatccaatgtcagcaatacctattgaagttgatacatttggaggtgaaggcagtgaaatccatttctctgtcgatgagctaacagattcaggtgttcttcatgctgataggagtgttcagacctccccatcatcaattcatatatttgatgcaagtgagtctgcagacttacctgagactattacagaccaggcaactgtttcgatttctgcatcaaaacgtgccattaactccctggtacttaaccacctaattgaagagcttagaggctggatggggaccactgctggtactcgagccatacctttaatgcagttattctacaggctttcttctgctgttggtggtcctttcatggatagttcaaagccagaaaattttgatttggagaagtttgtgaagtggctaatggatgaagtcaacataaataaacagttccctgccaaaacacgatgcacatttggtgaagtattgatccttgttttcatgttcttcacacttatgttccgcaactggcatcaacctgggagtgataattctcattcaaagtcaagtgggagctctgatttgacagataaaggtcctgctcaggttctgggatcaacaacaataactcttccgtcatctagtgctgacctggataaaaatgagtttgcttcccagttagtccgtgcctgttctgccctcaggcagcagaaatttttgaattatcttatggatattctgcagcaacttgttcatattttcaagtcatcatccataaatggagaagctggttcttctggttcaggctgtggatccctattgacaataagaagagagctgccagctggaaatttctctccctttttttcagattcatatgctaaatctcatccaactgatctgttcatggactactacaaattattgttggagaatactttccggcttgtatatagtatggttagaccagaaaaggagaagtctgctgagaaggatagatgctacaaggttcccaacactaaggatctaaagttggatggatatcaagatgtgctttgcagctatattagcaatcctcatactgcatttgtccggagatatgcaaggaggctcttccttcatttatgtggcagcaagactcactattacagtgtgagggattcgtggcaatgttcccatgaagttaagaaacttaataagatcataaacaagtctgggggtttcagaaatcctgtgccttacgagagaagtgtcaagctcataaaatgtttatctactctttgtgatgtggctacggcaagaccaaaaaattggcaaaagttctgtttgaagcacatggatcttcttccatttctcatggacaatgtttatcatttcagtgaagagtgtgttattcagactctcaagcttctaaatctggctttctattcaggaaaagatgctaatcataatgcacaaaaagcagagactactgatctaggaggttctacgaggactagctcacagtctccagatatgaaaaagaaccggaaggctgatgatggttctgaaggttcctcagaaaagtcgtgcatggacatggaacaggttgtagagatgttcagtgataaggaaggtgacatgttgaaaaactttatcaacatattcttactagaatggaactcagcaggtgtccgtcatgaggctaaatgtgttctatttggagtgtggtaccatgcaaaaaaccgacttagggagacaatgctatcgattctgctacagaaggtaatacatcttcctttatatggacaaaacattgttgagtacactgacctcatcacctgtttacttgggaaagtgaacgacttcagtgcaaagcagaatcactctgaacttgtgaataaatgtttgacatctgaggtcataagctgcatctttgacacactccattctcagaatgagctattggcaaatcatccaaattcacgtatatacaacacattgagttgcttagtggagtttgatggctattacttagagagtgagccttgtgttacctgcagctgccctgatgttccgtattcaaggacgaagcttgaaaccctcaagtctgagacaaaatttactgacaacagaattataataaaatgcactggaagctttactatacagtcagttacaatgaacgtttatgatgctcgtaagtctaaatcggtcaaagtacttaacctgtattacaacaacaggcctgtgactgacttatcagaattgaagaataattggactctttggaagcgtgctaagagctgccatcttacatttaatcagacagaattgaaggttgaatttcccattccgattacagcatgcaatttcatgattgaacttgattcattttatgagaatcttcaagcttcttcccttgagtcactgcaatgcccacggtgtagcaggtctgtcactgataaacatggcatatgtagtaattgccatgaaaatgcatatcagtgccggcagtgtagaaatattaactatgaaaatcttgactcttttctctgcaatgagtgtggatacagcaaatatggtcgttttgaattccacttcatggcaaaacctagtttttcatttgacaacatggaaaatgatgatgacatgagaaaaggattggcagcaatagagtcagagtcagaaaatgctcataggcggtaccagcaactgatgggatttaaaaagcctctcatcaaacttgtgtcaagcataggtgaacaggaggtagactcgcagcagaaggatgctgtccagcagatgatggtgtccttgcctgggcccacatgcaaggtaaatcgcaagattgcacttcttggtgttctatatggtgaaaaatgcaaagccgcttttgattctgtgagcaaaagtgttcagacattgcaagggctccgccgtgttttaatgacatatctacaccaaaaaagttctagtgacaccaatgcattaccagcattttcaataccaaggtctccaaatagttgttatgggtgtagcaccacgtttgttacacaatgcttagagttattacaagtgctttcaaaacatgaaaactgcaggaagcagcttataagtgctggagttttgtcagagttatttgaaaacaacattcatcagggccctaggacagcacgcactcttgctagggctgtgctatcttcgttttctgaaagtgatgaagatgcagttcatgaattgaacaacttgattcagaagaaagtgatgtattgccttgagcaccatcgttccatggacattgcacaatcaacacgagaagacttactgctgctatcagagacttgtgctcttgtggatgagttttgggaggcacgattacgtgtcacctttcaactgttgttctcttctattaaggttggagcaaaacatcctgcaatttcggaacatattattcttccttgtttgaggataatttctcaggcttgcacgcctccaaaatctgattgtggggacaaagagtcaggtttgggagtatctagcttgacgttgcactctaagaatgatgatacaactggtaacacagcatctaataaccccaatactaagattcagtcagatatatctggaaaaatttatgatggaagtcgaagagaccaggatattccacttttgagctattctgaatgggagggcggtgcgtcatatttagatttcgtccggaggcagtacaaagtatcccaggcagtgaaaggatctgctcagaagacacgccatgattcatataagtctgactatctggttctcaaatatggactcagatggaagcgtcgtgcatgtttgaagtcaagtaagagtgacttctcaaaatttgccttgggctactgggtatcagacttgatcttgagttcgtgttcccagtcaataagatctgagatttgcactctcataagcttgctatgcccatctaactctcctagacaatttcagttattgaacttgctcatgtcactacttcctcgaacactctcagctggtgaaagtgcagcagagtactttgagttactagggacaatgattgattcagagtcttctcgtctattcctaactgttcgtggttgtttgacaacattatgttctttgataacaaaagaagtgtccaatgttgaatcacaggagagaagcctaagcattgatatctcacagggattcattctccataagcttgttgagctcctgaacaagtttcttgaagttcccaat

SEQ ID NO: 197643 - DNA, 271 bp, Zea Mays
acagccttcctagtttagccttaccttgtataggtgacagccttcctagtttaggagattgtatccttgtacaccaggccacttggctatatatatgagaagtcacccacctgattgggtgtgcggtgctttcccctaaaccaactctctacatggtatcggaggaccaggatcaattcgatccaggccttccttccgctgccctctgcttcctctcctctcctccatgtctgagccgaccttaggcgccagcgccgaccttgacgccatc

SEQ ID NO: 197644 - DNA, 677 bp, Zea Mays
agccagtgctttggacttgccagtaggccctagaccctagacatggggtccctactttggggtcgtaatgccctcaataggaccaggcacatccttctatttcgtggataggattacacttagtcgtagtaagtcccttgttcccacgggaggccttggaccctaaagaggttggggaccgacaattcatattatgcaaggtcgagggccttggggaccccaaagaggttggggaccgacaattcatattatgcaaggtcgagggcctcggaccccaaagaggttgggtaggtcatttgttctaaacatgaactgctttcacaccgaacatctggtcccaaatttacctgcattgttaggctgctgtaaattccaggatttccttcctgtggtcaactacgtctacagtggttgctacaaattccaaagatttccttccggtggtcatctacttccacgcgtgcgaagctatatatccacgaggacccctagatccacaaaattaaagctggaagctcgtttgtctctcctcccctcccctgcaaaattgctaagtagaaagggggttgcaaattgcaaccggccgtgggctgagaacgactttcgtgttttgcagccagccaagccacatatgtccggctccccaaaacaaacggaccatcggaaccctagaaacc

SEQ ID NO: 197645 - DNA, 348 bp, Zea Mays
aacggacggtgtagtccgacaggttgagccacaaggtcggcgatggcgagacggtgacgttgtggtcgacccgcgggcagctcgcgtcgtcgaggacgtccgggtcggcgaggtagatggtggaggtgggatagtcgatgtccgtcacgttgtaggagtagcctgtgttgctgctgttgccgccgagctgtatggtggggtactcgtcgtccacgcagtcgatggccagcccagggtacccgcagtaggaggaggagttgcccaggacgtccgccgtgtcgtcggaaaggtagaacgggtaggtgatattcacttcgccgcatctgtatggttgcagcttgcatatgg

SEQ ID NO: 197646 - DNA, 1172 bp, Zea Mays
atcttgttgaacttgaacagattcagctgttgcatccaccaccattacatcctcctcctcctcttgctgctcattatcatctaggaaaatagctcttttccttctattggatttccaataatccctcatctcctttataattgcagtagtggtctttgaacatatctttgtatcttcatagccaccttctagatgctgctttagcctttttatccctctagaaactgtggtgtcacaaaggttgcatgtcacttgatccctatttttcaaatttgcccaataaccatacttccaacctgaatcatttgagctagccttccttgttttttctgtctttggatcatagttgccattgttgccagaagatgggctagccattaattgattttagttagtgctgctgctgcataaaaaataggagggtgatccaaagcacatgaggcagtaaggcaagcactaaggcagtaaggcagggacgcagggtgatccaaatcacatgaggcaggcagacaggcagcagcagcagcatgaaaaatgggactacacaccagggcagtaaggcactaaggcaggcagcagcagacaggcagcaccgcagcagtaagacacacgagggcagcaaagcactatatatcaactcaagcacgagcacactggagtgaccatcaacacctaacagactagcacaaataactagctcaagcacgagcacaagtcaaagtccaagaggcaagcacaagcaagcaggcagtatatccaagagattcagaacagagagaacagaggaagaaggtgcaagaagagtagctttgatccgatgggaaggacgctagcagggaggccgaaggtgtggatcgatgggcggggatccaatcggaggggcgaatccgctccaatcgaagggcaaatcggcgggtggaactccaatcggaggggcgaatggaggctgacggtcggatggaggcggacgaccgcgcggactgtagctgctagcgccgccctcttttgtcttctcttcctctcttccctctctttccctcccactctctcgatttggcgtgctgcaggaaagggtgtgcgcgtgcgagaggtgtacacgctccaaaagcgtgagcgcttgccgcgccctcctgtttcccgcatgcgcgcaacctcgtttcggcggtgtggcg

SEQ ID NO: 197647 - DNA, 558 bp, Zea Mays
gtgagattgtcctcttgtcgagatcctcacgtcccggtcctcaccaccggtggcgacggggtgtgacagttggtaccagagacggtgtatcctcggcgtggggggcgacggacggccaccagctcttctctgcgctagctatcggggtggcgacgacgattgttggcgcgtcgacggcggatccagcggtccggcgtggtgacctcattgatccggcgcgacctacctccttcagctaacggtggcgctccagcggcccttggctcgagttccgttttgttccgcgatggcttccctttcccccggcaactccttcatcgaggcggtgtcgacggcggtggttgcggcggatttggcggtgctgggctgacgggaggtctcgatttggcggtgctggtggcggcgactccatcaagttgcctgtgtgctccctcaactttcttcctcagatccccttcggcaggcggcgtgcccacgacgccactgtttgggatatctggtgacgagtgctctcagtcacggcactggtgacgggttccctttctctgagactccaac

SEQ ID NO: 197648 - DNA, 330 bp, Zea Mays
gaacaccagaagaccatcaaactcagacccgcaccactgtaccaactgttgcaaacgggaacggttctcagaggatgctatcaagctgctataagttacaaaaacaactccatctgtgatcccaaaggttttagagtctagcttagaatatggaagcttatttaaagcgtgcactgcagaaaaagcatatggtgtcactgtgtcagtcacaaatatcagcaacatacatgaatggaaaatggatgtatttaccagatagatgttaaaatttgagttcttcatttcaactcgattattaaactaccagacaggtcatttggtcaatgaaat

SEQ ID NO: 197649 - DNA, 332 bp, Zea Mays
cagaaacggaacctcaagacaaacatcggcatcactttcttcccaatcctgatttgcgtgcttctcatcgtgctccagaacgtcatcaacagcgagcttgacaagcccaagtacaaatgcggttgcgtctgcctcgagaccagtgccaacggaaggtgcgtaaggaaagagtgtggcattcagtactcgacgctggatcaggtggggagctgtccgattcccagcccgccacagtggccagccctgattcagatcccccgtgctgatttccgggctgcaaggacgttctcccaaccgtttaatgatttgcctgatccattttgccgtgactc

SEQ ID NO: 197650 - DNA, 546 bp, Zea Mays
aagaatatcaaatgttggatctttgttgtccttattaggtcctctctttttaatactttttcctggaaacaacttggtcacaacagtcaatttctcacccacaattgctttaatctcttccggcaattcagatttgttgctttgtctcagtaatttctctacggttttcccaataagtgatgtcgctctctcatcaaagagcacgaattctagctcataggtgccatcagtggcatatagagatattttatacctatttagagtataggttatagacattgataaaatacaagaagttttgtgtataaaaatgattgtacagagagtttacctgtggaccatctgagaggagatgtggccttgtttacaaatgtatgtttttccttcatatcttgttgatgtattgcattttgtgcatccttgatagaaccagggcttattgtcagcaattcttgttacaatcatggtgcattcgaaacgtttgctctgtaaatgtaatgattattaagtaattatataagttctgtaacaataattttaaatata

SEQ ID NO: 197651 - DNA, 782 bp, Zea Mays
ctttagggcttgcgtctctggaaagaacgatagccagaactaggtcgcgcctgaattggttaaaggagggagatgcgaatacctcttatttccacctgcatgcgaaatacagaaagagaaaaaattatatggctaaagtgaaagtggacgacagactcgtgatggaccaagaaaggaaaaaggaggtagtgtgggagttctttaataatctgttgggaacggccagagaacgtgagttcaccctggaccttccttccttccacccaggaactcaacttgatctcgaaggattgaatcaaattatcactgaggaggaggtttgggacactatcaaatcgctgccggcggataaggcacctggcccggacggcttcacaggccgtttctacaaaattgcttggccaacaattaaaggagatttcatggcggcggtcaacaggttgatgcaaggggatgtttccaggttgtctttgctgaattcagcttttattacccttcttcctaaaacagcggaggccctggagctaaaagattacagaccaattagtctcatccatagttttgcaaaaatcataatgaagctgctggccaaccggcttgctcctaagctgccgcagctggtctctctcaaccaaagcgccttcgtgaagggtcgatgtattcatgacaatttcatccttgtgcaacagatggccagtgtgcttcaccggcagaaagaggctaggatacttctcaaacttgacatcagcaaggcttttgactcagtttcgtggccctttttg

SEQ ID NO: 197652 - DNA, 525 bp, Zea Mays
acagccaatgtaagagccttttcattgtttaatcgattggtagacaaagtaatgtgcttctccttctctacatcagaagagtagtatttgtgatcttcattaatgtgctcatcaggttttccatcctcctcattaaccaattcatcctcctctggtctgcccgcaacctcctcactgaattcttgattgtccacagcttcttcctcctccaacttcttgagagccatatagtcagcttcatcttctgcctgtctaatagctgcttcaacatctgcaattgacagagccagatccacatcatttgaagctcccacggatgtagagcaattcttctcctgaccttccacacgaagagatgtgtgcccggaaaagaactccataggatcaagtttcttgaagaattccgtattgtagctaccacgttgtatcactaaatcatcaagagctcgtttctgatttgctttcttgagaatgttctcctctatagtgctttcactgatgagtctatatatgtgaacttcacga

SEQ ID NO: 197653 - DNA, 465 bp, Zea Mays
ttctggatttatttgcatatctgatattatatggttaccatatggtaataattgcaggacaaactaagaaaagcacttgctgaacctgtggagtctctatttgatgctgcagaccaaacaacctggcaatcaataagaaacatttacaaacgtgagacagaggccatcctaccagagtttctgaataacctttgtcagtttgaaatggaatatgctccagcagaagaaatggtatccaaattaaaggattatgcccgaagtgttgtggaaagtaaagctaaagaggaatctagcaaagtatcgatccatatgaaggagaggttgataaaattctttatttattattttttggggggggggattctgacactgtttcatctgttgccaggttcacaacagtgtttagccatgacaaggattcaattccaagggtctggacaggaaaggaagatgttcgtgcaatag

SEQ ID NO: 197654 - DNA, 474 bp, Zea Mays
acacgagctcaattccttcccgcagcgcagttgctcaagtcagcaaactgaacccgtccggattcgtgcgccgccgagcacccctcgacgccagcggcgatggcagccgacgacgtgcgcgagctcctcctctccaccacagccgacgcctctgacccgtccacgcccctctcagcgcccgacctccgcctcctcatcgaccgcctacgcttttgctccgaccgcctgaacgcctcggccctctccttcgctgcctctaaccgcggggtcctcgctaatgctctcctccgcgcagcctccgccgccgattcctccgcctccctcgagtcttccctcgactccgcgcttgccccgctcgcctcctggcccgacctctccgacctcagggcccttgccgaccgcctcctcgctgcccgccgcgagctcgctgagcgccaggagcacctagccgctgcctccatgattgcctcgctt

SEQ ID NO: 197655 - DNA, 518 bp, Zea Mays
tagacagttagggaacagggtaaagatggtgtctgtagactttttggctgggaatacaaatgttaagatgtaaccgcataaggatatgtcatgtgcccaagattctcgaacagaagttacctcaataatcgatagttcaataaatagattagtttgtatgattaatttactatgttgttcttacacaactggtacataaattcagctacatctaaacttagtcaatgacatatgctaacttttgttgtttttcacagtggcacagaacacttctttgcatgaattccttgatagttatctacaattcaggcacaggtggtatgatttgccacaccgaggcccaaagggaactgtagcaggtttggttgttggggagcttgagctttgccgtcgtgtatttatggtcctctatcgcatgtgagatttctatcatttcccatcttttgtcgttttgttacctttttaactgagttttttttagatcctcgaataaggatcctggagcaggtcgcggcgag

SEQ ID NO: 197656 - DNA, 395 bp, Zea Mays
ctccggaaccttcctcacgctcgggctgtttggcttgccatcgagggccagttcatgggcaacgccgaggcccgggctctccgcctcgacgccgctttccgcaccttcgtccagggggacctcagtgtcagtgcgtactgctgcaagatgaaggacatggcggactcacttggcgatctgggctaccccgtggaggactgcatgctcgtcctcaacgtcctccgcggcctcagcgatcgctacacccacctccggtcgttgatcatgcgccagcgccccttccctaccttcctctaggtccgcgacgaccttgccctggaggagatcactatgggtactcaggctgcattgatctccggcccgggctcctcatcctcctcgacaccagctctcac

SEQ ID NO: 197657 - DNA, 346 bp, Zea Mays
ggaagaaggttaaggtcctgtcgtcctgatgctcccgataacaacaacaactccgttcggcaggcggtccaaatcgccgccgctccgatccatcatccacgctcgcattatctatcccttctgattaaaattaatctccgtgacgatatcgcactgattccttcttcctcgttcccgctgagcggtcagcggctgcagagtgcagactgagtgatcgctacttctacgcgcgccgcgagcaccaccgaacaagtagcaaccggggtggattgagcgtggtcccaacacgggccagaattccgccatgatgaggccatcgccgccgcggcgcctatccctcgccgcc

SEQ ID NO: 197658 - DNA, 295 bp, Zea Mays
ctcctcttcctgtcacccccatgttgactgctgcccgccaggccgccagagagggaggattaggaaaggggggaaagagagacggacggcttctcgggagtgggtaagactcacatgatgcaattacctccatctttccctcttctccttttgcgggcatactcttctcctccgcctggctagatccttctttcctcgtcccggattagctcccaatctcgccaatggtccaggttgctggccgtggaacatttcttcagttgggcccactctctggtaaggcaaggcaaccagc

SEQ ID NO: 197659 - DNA, 1471 bp, Zea Mays
gtcgtctacttcccccaaggccacagcgagcaggtgaacccacccacctcccctttctcggagcctgcccgccttacccgtgctgcgattcatcattcacggcggctccttcctcctcattggctgcctcttttgccatattttttttgtaaatttttttcccgtatggtctgacttgtccatgtgccgcgacttttttaaaaatgctttctagttgccaattcctgctttgatgctgtgcataggaatatcttaattcgaaataacggggccctttggggtcttgacagatgacagggccaagattggttcctgtcgaattttaaattgctaaaagtatcagggacgtgacttgatttgctgttctccatttagtttgtgtggtgctgccagtgccagttgacaggatccttttctgtttagggtgatcatcactattttgatgcacatatttttacaacaaaaaaaaagtgtgcaaaatctgtatcatatgcagttgggagcaatgggcccactccccccccccccccacacccccactccccttgtttcatgggtttctggtgtgctgcaccattcccctgcttgctgtttggtggatgcaggagccaagtacgactgagttttagcttttatagctgacgctttcagtaacctctgtcacgaatctcatggatttggtgccaaagaagtttgattcgagcaagtttagaccttgttcggttgcatgtgttgcatggatggaggattaaatctcttcctatttaatttttaaataggaagggatttaatctctccgatccgaatgcaaccgaacaaggccggcctcaggggtggtggtaggatgatcacatgctcggttctggaagagattctctggctgaatgcgagtgctgggaggtgcccaacttcggtttttcctttccttttcgctcgatggaagaaaacggaagcttttcagttatgattggctgatggcttcagcgcacatggtggttgtagtagctctgtgatgcaatgcatctgtgtcatgtgctgtcgaatcccaacgactttcggtcacacctttctcatttggcttctacagtagatgttagtttcgcactgtgctggtgttcagggattttcggccagatttacaacagtagttactggttctacactgtgcagcttacaggggctgtgtttgaggttgagtatgagatttagagttggctcttactgtaggttgcagcttctatgcaaaaggatgttgacggacatgttccaagctacccaaatcttccgtcgaagttgatttgccttctgcacaatgtcactttacatgtaatgttcagctgtgcccccattttaattgtcttctgtttgatcatttattaatttatatactaaaaggatttgttctgggggctttcgtaggcggatccagaaacagatgaagtgtatgcacaaatgactcttttgccagtta

SEQ ID NO: 197660 - DNA, 332 bp, Zea Mays
gttctcttagatctttgaatagtgcttgtcgcggaatagtgaggtatatttgtttatacgacccttaggtctttgcactttatcatgtaaacattgttatgattatgaaaaggttgatcaaggtgtttgatatcccctttcctacatacattagtttgagggtagatacatgtcatgtaatttctgttccagccttgctgtctgcttacattgcttgatcatgctcttgtttcaaaaatgtaactgttatttccatgtgcagcctcccattaggagcatagggcacacttaagtgttttcccaggccaagcctgccgggcaaggaagtgcgg

SEQ ID NO: 197661 - DNA, 1363 bp, Zea Mays
cgccgcctctgatggagcagatggcacaaccggtgaggaagccaccggtgggggtggcagcgccatacgagtacctgaaaaagaagacacggacgacagtccaaaaggagctgtaaccgggttagagtgatcatcgaggaagtcgaaggtcgctggtgtgggtggattggaatcctcagaaaagggaaacgaggtttcatcaaaaaccacatgatgggagatgatggtacgattggactggcgatcaaagcataggtagcctttgtggtggggagaatagccaagaaagacacaaagggttgagcgaggagataatttatgtggagtggtggcagaaagattggggtagcatttgtagcaaaaaacacgaaggtgctcataggatgggttgtggttgaagagagcaaagtgtggtgtagaaagtgcaagtgttttggtgggtaatatgttgagaagatattgttaatggagtcgcaacccaaaagctggggggaacactagactgaatgagggtgcgaatgatattgttaatggagcggataacacgttcaaccttaccattttgagctgaagtgtaggggcaagacatacacacatgaagttgcgagcttgaaggttgtcaaatttgcgaccattgtcgcactggatgccctggatggtgacactgaactgcgtacgaacgtaggcaaagaaattggttagggtggagagggtgtcagatttgaggcgtaaaggaaatgtccataaatagtgggagcaatcatccaaaataacaaggtagtatttgtagccagacacactggtgatgggtgatgttcagagatcgcagtgaattaactaaaagttacaggtggcgcgggaggaagaggtagggaatggtagacgaacatggcgtccgagttgacaagcatgccatggatgagtgctagtatttttataacaaggaattgcagatgactgcgctagatgagataaaatggcgtgaccgggatgtccaagacgttggtgccttaaggtagacgcaaggaagaagccaggaaccgcagggggtacaacggaccagagctattacatcagaagatcttgcgccgagtgggtagatccttcacagaacaaccaaaaggatcaaattcaacagagcaattattatcagtggtaaattgtcggacagaaataagatccttaatgagggagggggaaactaaaacattgtgaagggaaagattatagggaagatgggtggtgccagtggaggtgacagggatgagatgaccattaccaatgataatatgggtaggaagatgctgggaagaagagggatgagatattatatcagcgtcagatgtcatgtgactggaggcac

SEQ ID NO: 197662 - DNA, 292 bp, Zea Mays
ctcaattcataggcttcaattttagcctggcttcgccactggtcgaagttgtggtttgccaccaccaccaccatcgttttgatcagggagtggatctcgtgcttccgccgatggcacatcagtctaggtgtgcgtccaggtagtgcccatagatgaccagcactagcagaaggagtgccacgaggaggcactttctggggtcgcgacagccgtcgcgatggactagagctaggtcttcgcctttgacggcgctacggggtatggtaggtgtgcttgctgttcagttgaattg

SEQ ID NO: 197663 - DNA, 869 bp, Zea Mays
cgcagaggaggcccaaaacgctgctggcacaacgtcttgaagtgtggccagtgtagtgtgggcttgtcgcgccgtagcatgacagaccacagctgtgtagcgctcgtgagatagtacgtggccatccagactttatccacctccggcgtcccttgattgtagaagaagctctcacagcggaacaaccaaccaacatgatcctctttgccgtcgaatgtgggaaagggaaggttgtggtggtgctggttgggagggttttgctgctgtgggtaagcggtatggtggggttcggaaaatcctgggatgggtgatggggagtgtgggaagggtatctgatggatgggtatgggcatggtagatgtgggtggcagcaaggctgaggttggcggtggaaggttggttgaggtggatcggagtggagcggctgtggtggtgatcggcggtgatggtatgggtggcgcggcggggtttgacagaggaggtattccgccataacctgacatgccatatgggatggaagtagggctggtggacgctgggggcggtggtgttggcggcctactgatcatttgagtgatcgcggtggtgagatcggcaagggccttcgtcatggtgtcgatcttttgctctagcgctgcgttggcggaattggtcgcggcagcagatgcgacatcgctggtgttgtcgtcgttgcctggcatctccgataccagattgttggagttgcggcttctaagaaggtatgagtggtgaggagaagggcgaggctctggaccacggtgtttgggcgccgttgtcctagggttgggctgctggctggaaggggcacgataccgttcccgcggtgaacagtagacacaggaaaaggg

SEQ ID NO: 197664 - DNA, 294 bp, Zea Mays
agtaacttattgcctaacagataactcaagttattcatggattgtatcatgaatggttggggaagttgtatgttatatgtcctgtcctactgcctcagatactataacaataggcatctttaaatgcgaaataaaactgaaatttgttatctccagtagcaaattttctcagaagcgatcaggtctggcaaatttagtattccaaaaggagcgagatactgtatgatgattgggcattaagcagttttttgcactaggaacataagctgccaccttgcttgtcaacaactaaat

SEQ ID NO: 197665 - DNA, 657 bp, Zea Mays
cttccactggcaccactcaccttccacataatctatcccttaaaagtgtccttgtctcaccgtccctcattaaggatttaatttctgttcgtcaattcaccaccgataacaattgttctgttgaatttgacctgcttggttgctctgtgaaggatcttcctactcggcacgagatcctcagatgtgacagctctgcgccactataccccctccggctcccggctaccacccttcatgcatcaacaacacctactatgtccctatggcaccagcgtcttgggcaccctggtcatgtcgtcttatcccatcttgcccagtcgtcagtcattccctgtaataagagtgccaccgctcctttatgtcatgcttgttaattaggacatcatgttcatcttccttttcatacatccacctccagggctactaaaatttttcagttaatacattgtgatttgtggacctcccctttgactagtgtctctggtcataaatactatcttgccattttagattattattcccactttctgtggacattccctttgcgccacaaatcatacactttgtccaccctcaccgctttctttgcctatgtccgcactaagtttggaatcaccattcagggtattcagtgcgacaacggctgtgagttcgaca

SEQ ID NO: 197666 - DNA, 478 bp, Zea Mays
ccttaatttagttatagcggtttgatggtatggcgtattgagaattttaagccagttcctgtgccaacatcattacatggaaaattttatatgggtgattcatatatcatcttgaaggtatggatttactgatacacttttcacgaacatcttttatttaggaaaattgttggtgcatcttaattgaagggtaaaatagttggtcctgcttgaagcaaaagcttagaggcgctgagaaatatgtgacaaatgttttctctaattttttatatttctcatcttgtatcatttagtttaacccttaatggtgcatgatacactttactgtctaatgtccataaagttctcatcatgatagtacattctatttatgattgatcttagtattgccttattttttctgcactgaatattgtttcctgcagacaacagctttaaaaaatggttcctttcgccatgacatccattattggcttgg
